United States Patent Application Publication US 2010/0144538 A1 - sequence listing, part 4

SEQ ID NO: 5630 - DNA, 2245 bp, Homo sapiens
ctctgaccgccgccggctttccacccacctgcccggctcatcacctctgactcctgcgggccttccagccggcgctatctcgcagcccccgaccagctcggcctgctgtcgggcatctctgctgtcctccggctgtagggctacctgcctccctcccggggggtgcactgcgagtccgactctagtgggggcagcgcctagcggactcccaaacccgctcaggtcctgccggcctcaccggcaccgcccaccctccagccggccgcggctctgcgcttgcgcgccggcagcacacagtgttaggggcgcgccctctgctctggacatgcgcgccgtcgcgagcgtctctgggaccggaagtgcgggcgagcgcgggtccccgggtctgacaggagcagcctgtgggcaccgcggcggtagttggaggcgggagagggtccgtagccgcgccgccctgccccgccatgggcctcctgtcggacccggttcgccggcgcgcgctcgcccgcctagtgctgcgcctcaacgcgccgttgtgggctctgccagtggcctggcttgaacggacgatgcggtcagtagggctggaggtctacacgcagagtttctcccggaaactgcccttcccagatgagacccacgagcgctatatggtgtcgggcaccaacgtgtacggcatcctgcgggccccgcgtgctgccagcaccgagtcgcttgtgctcaccgtgccctgtggctctgactctaccaacagccaggctgtggggctgctgctggcactggctgcccacttccgggggcagatttattgggccaaagatatcgtcttcctggtaacagaacatgaccttctgggcactgaggcttggcttgaagcctaccacgatgtcaatgtcactggcatgcagtcgtctcccctgcagggccgagctggggccattcaggcagccgtggccctggagctgagcagtgatgtggtcaccagcctcgatgtggccgtggaggggcttaacgggcagctgcccaaccttgacctgctcaatctcttccagaccttctgccagaaagggggcctgttgtgcacgcttcagggcaagctgcagcccgaggactggacatcattggatggaccgctgcagggcctgcagacactgctgctcatggttctgcggcaggcctccggccgcccccacggctcccatggcctcttcctgcgctaccgtgtggaggccctaaccctgcgtggcatcaatagcttccgccagtacaagtatgacctggtggcagtgggcaaggctttggagggcatgttccgcaagctcaaccacctcctggagcgcctgcaccagtccttcttcctctacttgctccccggcctctcccgcttcgtctccatcggcctctacatgcccgctgtcggcttcttgctcctggtccttggtctcaaggctctggaactgtggatgcagctgcatgaggctggaatgggccttgaggagcccgggggtgcccctggccccagtgtaccccttcccccatcacagggtgtggggctggcctcgctcgtggcacctctgctgatctcacaggccatgggactggccctctatgtcctgccagtgctgggccaacacgttgccacccagcacttcccagtggcagaggctgaggctgtggtgctgacactgctggcgatttatgcagctggcctggccctgccccacaatacccaccgggtggtaagcacacaggccccagacaggggctggatggcactgaagctggtagccctgatctacctagcactgcagctgggctgcatcgccctcaccaacttctcactgggcttcctgctggccaccaccatggtgcccactgctgcgcttgccaagcctcatgggccccggaccctctatgctgccctgctggtgctgaccagcccggcagccacgctccttggcagcctgttcctgtggcgggagctgcaggaggcgccactgtcactggccgagggctggcagctcttcctggcagcgctagcccagggtgtgctggagcaccacacctacggcgccctgctcttcccactgctgtccctgggcctctacccctgctggctgcttttctggaatgtgctcttctggaagtgagatctgcctgtccgggctgggacagagactccccaaggaccccattctgcctccttctggggaaataaatgagtgtctgtttcagcagctatttg

SEQ ID NO: 5631 - protein, 561 aa, Homo sapiens
MGLLSDPVRRRALARLVLRLNAPLWALPVAWLERTMRSVGLEVYTQSFSRKLPFPDETHERYMVSGTNVYGILRAPRAASTESLVLTVPCGSDSTNSQAVGLLLALAAHFRGQIYWAKDIVFLVTEHDLLGTEAWLEAYHDVNVTGMQSSPLQGRAGAIQAAVALELSSDVVTSLDVAVEGLNGQLPNLDLLNLFQTFCQKGGLLCTLQGKLQPEDWTSLDGPLQGLQTLLLMVLRQASGRPHGSHGLFLRYRVEALTLRGINSFRQYKYDLVAVGKALEGMFRKLNHLLERLHQSFFLYLLPGLSRFVSIGLYMPAVGFLLLVLGLKALELWMQLHEAGMGLEEPGGAPGPSVPLPPSQGVGLASLVAPLLISQAMGLALYVLPVLGQHVATQHFPVAEAEAVVLTLLAIYAAGLALPHNTHRVVSTQAPDRGWMALKLVALIYLALQLGCIALTNFSLGFLLATTMVPTAALAKPHGPRTLYAALLVLTSPAATLLGSLFLWRELQEAPLSLAEGWQLFLAALAQGVLEHHTYGALLFPLLSLGLYPCWLLFWNVLFWK

SEQ ID NO: 5632 - DNA, 457 bp, Homo sapiens
ccgtgcccgggcttttgcccgggacttcgccgcccaccgcaagaagtcgggggctctgccagtggcctggcaccaccatggtgcccactgctgcgcttgccaagcctcatgggccccggaccctctatgctgccctgctggtgctgaccagcccggcagccacgctccttggcagcctgttcctgtggcgggagctgcaggaggcgccactgtcactggccgagggctggcagctcttcctggcagcgctagcccagggtgtgctggagcaccacacctacggcgccctgctcttcccactgctgtccctgggcctctacccctgctggctgcttttctggaatgtgctcttctggaagtgagatctgcctgtccgggctgggacagagactccccaaggaccccattctgcctccttctggggaaataaatgagtgtctgtttcagcagctatttg

SEQ ID NO: 5633 - protein, 94 aa, Homo sapiens
MVPTAALAKPHGPRTLYAALLVLTSPAATLLGSLFLWRELQEAPLSLAEGWQLFLAALAQGVLEHHTYGALLFPLLSLGLYPCWLLFWNVLFWK

SEQ ID NO: 5634 - DNA, 1267 bp, Homo sapiens
ctacaggcatgcagtcgtctcccctgcagggccgagctggggccattcaggcagccgtggccctggagctgagcagtgatgtggtcaccagcctcgatgtggccgtggaggggcttaacgggcagctgcccaaccttgacctgctcaatctcttccagaccttctgccagaaagggggcctgttgtgcacgcttcagggcaaggtggggctgcctgcctgcctgagggctgaagggcacagggtctgtgggaggggctgtctcatcctgtcctgcacctctaaagctgcagcccgaggactggacatcattggatggaccgctgcagggcctgcagacactgctgctcatggttctgcggcaggcctccggccgcccccacggctcccatggcctcttcctgcgctaccgtgtggaggccctaaccctgcgtggcatcaatagcttccgccagtacaagtatgacctggtggcagtgggcaaggctttggagggcatgttccgcaagctcaaccacctcctggagcgcctgcaccagtccttcttcctctacttgctccccggcctctcccgcttcgtctccatcggcctctacatgcccgctgtcggcttcttgctcctggtccttggtctcaagatatcctctgccccttgccatctacctgtgaccagcctccagtctcctcaactctaggctggggagagtcttccatcctgatggggggtggggtacgggggtgagccctgggtccccctctgggcagatcccgttacacctcttgttggggtccttgattgggctacgctctggaactgtggatgcagctgcatgaggctggaatgggccttgaggagcccgggggtgcccctggccccagtgtaccccttcccccatcacaggtgatggcacccccttctgttgttggaatgggcttctggggtctgactggtgtttagtgttgcaacttagcctcagctggtgggatggtggtggtctttggggatcccctggccccagggtccatctccaagagcctgtgtgccctgcagggtgtggggctggcctcgctcgtggcacctctgctgatctcacaggccatgggactggccctctatgtcctgccagtgctgggccaacacgttgccacccagcacttcccagtggcagaggctgaggctgtggtgctgacactgctggcgatttatgcagctggcctggccctgccccacaatacccaccggtaagaggctgggctggttgttggggg

SEQ ID NO: 5635 - protein, 114 aa, Homo sapiens
MVLRQASGRPHGSHGLFLRYRVEALTLRGINSFRQYKYDLVAVGKALEGMFRKLNHLLERLHQSFFLYLLPGLSRFVSIGLYMPAVGFLLLVLGLKISSAPCHLPVTSLQSPQL

SEQ ID NO: 5636 - DNA, 1052 bp, Homo sapiens
ccttgacctgctcaatctcttccagaccttctgccagaaagggggcctgttgtgcacgcttcagggcaagctgcagcccgaggactggacatcattggatggaccgctgcagggcctgcagacactgctgctcatggttctgcggcaggcctccggccgcccccacggctcccatggcctcttcctgcgctaccgtgtggaggccctaaccctgcgtggcatcaatagcttccgccagtacaagtatgacctggtggcagtgggcaaggctttggagggcatgttccgcaagctcaaccacctcctggagcgcctgcaccagtccttcttcctctacttgctccccggcctctcccgcttcgtctccatcggcctctacatgcccgctgtcggcttcttgctcctggtccttggtctcaagatatcctctgccccttgccatctacctgtgaccagcctccagtctcctcaactctaggctggggagagtcttccatcctgatggggggtggggtacgggggtgagccctgggtccccctctgggcagatcccgttacacctcttgttggggtccttgattgggctacgctctggaactgtggatgcagctgcatgaggctggaatgggccttgaggagcccgggggtgcccctggccccagtgtaccccttcccccatcacaggtgatggcacccccttctgttgttggaatgggcttctggggtctgactggtgtttagtgttgcaacttagcctcagctggtgggatggtggtggtctttggggatcccctggccccagggtccatctccaagagcctgtgtgccctgcagggtgtggggctggcctcgctcgtggcacctctgctgatctcacaggccatgggactggccctctatgtcctgccagtgctgggccaacacgttgccacccagcacttcccagtggcagaggctgaggctgtggtgctgacactgctggcgatttatgcagctggcctggccctgccccacaatacccaccggtaagaggctgggctggttgttggggg

SEQ ID NO: 5637 - protein, 114 aa, Homo sapiens; identical to SEQ ID NO: 5635

SEQ ID NO: 5638 - DNA, 1286 bp, Homo sapiens
ctgcgtggcatcaatagcttccgccagtacaagtatgacctggtggcagtgggcaagtaagtagtctctggtcccccctttccatgcccaggatggggtctagctggagcggagtgggggatggcctggtggctctggccagccgtgaacctgccccacacctgacagggctttggagggcatgttccgcaagctcaaccacctcctggagcgcctgcaccagtccttcttcctctacttgctccccggcctctcccgcttcgtctccatcggcctctacatgcccgctgtcggcttcttgctcctggtccttggtctcaagatatcctctgccccttgccatctacctgtgaccagcctccagtctcctcaactctaggctggggagagtcttccatcctgatggggggtggggtacgggggtgagccctgggtccccctctgggcagatcccgttacacctcttgttggggtccttgattgggctacgctctggaactgtggatgcagctgcatgaggctggaatgggccttgaggagcccgggggtgcccctggccccagtgtaccccttcccccatcacagggtgtggggctggcctcgctcgtggcacctctgctgatctcacaggccatgggactggccctctatgtcctgccagtgctgggccaacacgttgccacccagcacttcccagtggcagaggctgaggctgtggtgctgacactgctggcgatttatgcagctggcctggccctgccccacaatacccaccgggtggtaagcacacaggccccagacaggggctggatggcactgaagctggtagccctgatctacctagcactgcagctgggctgcatcgccctcaccaacttctcactgggcttcctgctggccaccaccatggtgcccactgctgcgcttgccaagcctcatgggccccggaccctctatgctgccctgctggtgctgaccagcccggcagccacgctccttggcagcctgttcctgtggcgggagctgcaggaggcgccactgtcactggccgagggctggcagctcttcctggcagcgctagcccagggtgtgctggagcaccacacctacggcgccctgctcttcccactgctgtccctgggcctctacccctgctggctgcttttctggaatgtgctcttctggaagtgagatctgcctgtccgggctgggacagagactccccaaggaccccattctgcctccttctggggaaataaatgagtgtctgtttcagcagctatttg

SEQ ID NO: 5639 - protein, 228 aa, Homo sapiens
MQLHEAGMGLEEPGGAPGPSVPLPPSQGVGLASLVAPLLISQAMGLALYVLPVLGQHVATQHFPVAEAEAVVLTLLAIYAAGLALPHNTHRVVSTQAPDRGWMALKLVALIYLALQLGCIALTNFSLGFLLATTMVPTAALAKPHGPRTLYAALLVLTSPAATLLGSLFLWRELQEAPLSLAEGWQLFLAALAQGVLEHHTYGALLFPLLSLGLYPCWLLFWNVLFWK

SEQ ID NO: 5640 - DNA, 1436 bp, Homo sapiens
ctgcgtggcatcaatagcttccgccagtacaagtatgacctggtggcagtgggcaagtaagtagtctctggtcccccctttccatgcccaggatggggtctagctggagcggagtgggggatggcctggtggctctggccagccgtgaacctgccccacacctgacagggctttggagggcatgttccgcaagctcaaccacctcctggagcgcctgcaccagtccttcttcctctacttgctccccggcctctcccgcttcgtctccatcggcctctacatgcccgctgtcggcttcttgctcctggtccttggtctcaagatatcctctgccccttgccatctacctgtgaccagcctccagtctcctcaactctaggctggggagagtcttccatcctgatggggggtggggtacgggggtgagccctgggtccccctctgggcagatcccgttacacctcttgttggggtccttgattgggctacgctctggaactgtggatgcagctgcatgaggctggaatgggccttgaggagcccgggggtgcccctggccccagtgtaccccttcccccatcacaggtgatggcacccccttctgttgttggaatgggcttctggggtctgactggtgtttagtgttgcaacttagcctcagctggtgggatggtggtggtctttggggatcccctggccccagggtccatctccaagagcctgtgtgccctgcagggtgtggggctggcctcgctcgtggcacctctgctgatctcacaggccatgggactggccctctatgtcctgccagtgctgggccaacacgttgccacccagcacttcccagtggcagaggctgaggctgtggtgctgacactgctggcgatttatgcagctggcctggccctgccccacaatacccaccgggtggtaagcacacaggccccagacaggggctggatggcactgaagctggtagccctgatctacctagcactgcagctgggctgcatcgccctcaccaacttctcactgggcttcctgctggccaccaccatggtgcccactgctgcgcttgccaagcctcatgggccccggaccctctatgctgccctgctggtgctgaccagcccggcagccacgctccttggcagcctgttcctgtggcgggagctgcaggaggcgccactgtcactggccgagggctggcagctcttcctggcagcgctagcccagggtgtgctggagcaccacacctacggcgccctgctcttcccactgctgtccctgggcctctacccctgctggctgcttttctggaatgtgctcttctggaagtgagatctgcctgtccgggctgggacagagactccccaaggaccccattctgcctccttctggggaaataaatgagtgtctgtttcagcagctatttg

SEQ ID NO: 5641 - protein, 223 aa, Homo sapiens [sequence omitted]

SEQ ID NO: 5642 - DNA, 1424 bp, Homo sapiens
ctgcgtggcatcaatagcttccgccagtacaagtatgacctggtggcagtgggcaagtaagtagtctctggtcccccctttccatgcccaggatggggtctagctggagcggagtgggggatggcctggtggctctggccagccgtgaacctgccccacacctgacagggctttggagggcatgttccgcaagctcaaccacctcctggagcgcctgcaccagtccttcttcctctacttgctccccggcctctcccgcttcgtctccatcggcctctacatgcccgctgtcggcttcttgctcctggtccttggtctcaagatatcctctgccccttgccatctacctgtgaccagcctccagtctcctcaactctaggctggggagagtcttccatcctgatggggggtggggtacgggggtgagccctgggtccccctctgggcagatcccgttacacctcttgttggggtccttgattgggctacgctctggaactgtggatgcagctgcatgaggctggaatgggccttgaggagcccgggggtgcccctggccccagtgtaccccttcccccatcacagggtgtggggctggcctcgctcgtggcacctctgctgatctcacaggccatgggactggccctctatgtcctgccagtgctgggccaacacgttgccacccagcacttcccagtggcagaggctgaggctgtggtgctgacactgctggcgatttatgcagctggcctggccctgccccacaatacccaccgggtggtaagcacacaggccccagacaggggctggatggcactgaagctggtagccctgatctacctagcactgcagctgggctgcatcgccctcaccaacttctcactgggcttcctgctggccaccaccatggtgcccactgctgcgcttgccaagcctcatgggccccggtatgtatggatcagccccacttcccccaatgcctgtgccctcatcacagaccgcaccctcattcagtagccctttcccccaacctggtgcccatgcccccaccatggagcctaccttgatgttgcttctccacccaggaccctctatgctgccctgctggtgctgaccagcccggcagccacgctccttggcagcctgttcctgtggcgggagctgcaggaggcgccactgtcactggccgagggctggcagctcttcctggcagcgctagcccagggtgtgctggagcaccacacctacggcgccctgctcttcccactgctgtccctgggcctctacccctgctggctgcttttctggaatgtgctcttctggaagtgagatctgcctgtccgggctgggacagagactccccaaggaccccattctgcctccttctggggaaataaatgagtgtctgtttcagcagctatttg

SEQ ID NO: 5643 - protein, 170 aa, Homo sapiens
MQLHEAGMGLEEPGGAPGPSVPLPPSQGVGLASLVAPLLISQAMGLALYVLPVLGQHVATQHFPVAEAEAVVLTLLAIYAAGLALPHNTHRVVSTQAPDRGWMALKLVALIYLALQLGCIALTNFSLGFLLATTMVPTAALAKPHGPRYVWISPTSPNACALITDRTLIQ

SEQ ID NO: 5644 - DNA, 1652 bp, Homo sapiens
acagggtgctcagcctgggggcccagcctcccgctgtcacgcgctgcctgcggccgagacccctgcccgcgccctctgccgggctgccctccaagccgccctttctctggaggtcctcagcctgcaggggcaccctccacccggccatcgcgcagcctgggaaggtggagaaaaggagcgtcggggtctcggaggcggcgtgggaaacgccgggcggagcgtggcgctgtcacggcaacagagagacgcgacggggccccgccccaccgccagtttccacgacaacccgaagagcgtggggaggcaggcggtgccccggcccctgactgacgcgaccgggaccagcgcgcttcgtccccgcccacccgacaggccccgcccccgagcccggccccgccccgcgctccccggctttcgcgaggttttgactctcgtggcgccccaggggccgacgggagtggcggccgcgcggaggaggccaagatggcggcagctgcggcttcgcttcgcggggtagtgttgggcccgcggggcgcggggctcccgggcgcgcgtgcccggggtctgctgtgcagcgcgcgtcccgggcagctcccgctacggacacctcaggcagtggccttgtcgtcgaagtctggcctttcccgaggccggaaagtgatgctgtcagcgctgggcatgctggcggcagggggtgcggggctggccatggctctgcattcggctgtgagtgccagtgacctggagctgcacccccccagctatccgtggtctcaccgtggcctcctctcttccttggaccacaccagcatccggaggggtttccaggtatataagcaggtgtgcgcctcctgccacagcatggacttcgtggcctaccgccacctggtgggcgtgtgctacacggaggatgaagctaaggagctggctgcggaggtggaggttcaagacggccccaatgaagatggggagatgttcatgcggccagggaagctgttcgactatttcccaaaaccataccccaacagtgaggctgctcgagctgccaacaacggagcattgccccctgacctcagctacatcgtgcgagctaggcatggtggtgaggactacgtcttctccctgctcacgggctactgcgagccacccaccggggtgtcactgcgggaaggtctctacttcaacccctactttcctggccaggccattgccatggcccctcccatctacacagatgtcttagagtttgacgatggcaccccagctaccatgtcccagatagccaaggatgtgtgcaccttcctgcgctgggcatctgagccagagcacgaccatcgaaaacgcatggggctcaagatgttgatgatgatggctctgctggtgcccctggtctacaccataaagcggcacaagtggtcagtcctgaagagtcggaagctggcatatcggccgcccaagtgaccctgtccagtgtctgcttgccatcctgccagaacaggccctcaagcccaagagccatcccaggcctgttcaggcctcagctaagcctctcttcatctggaagaagaggcaagggggcaggagaccaggctctagctctgggccctccttcagcccccatcatgggaataaattaattttctcaatgtaca

SEQ ID NO: 5645 - protein, 325 aa, Homo sapiens
MAAAAASLRGVVLGPRGAGLPGARARGLLCSARPGQLPLRTPQAVALSSKSGLSRGRKVMLSALGMLAAGGAGLAMALHSAVSASDLELHPPSYPWSHRGLLSSLDHTSIRRGFQVYKQVCASCHSMDFVAYRHLVGVCYTEDEAKELAAEVEVQDGPNEDGEMFMRPGKLFDYFPKPYPNSEAARAANNGALPPDLSYIVRARHGGEDYVFSLLTGYCEPPTGVSLREGLYFNPYFPGQAIAMAPPIYTDVLEFDDGTPATMSQIAKDVCTFLRWASEPEHDHRKRMGLKMLMMMALLVPLVYTIKRHKWSVLKSRKLAYRPPK

SEQ ID NO: 5646 - DNA, 1320 bp, Homo sapiens
acagggtgctcagcctgggggcccagcctcccgctgtcacgcgctgcctgcggccgagacccctgcccgcgccctctgccgggctgccctccaagccgccctttctctggaggtcctcagcctgcaggggcaccctccacccggccatcgcgcagcctgggaaggtggagaaaaggagcgtcggggtctcggaggcggcgtgggaaacgccgggcggagcgtggcgctgtcacggcaacagagagacgcgacggggccccgccccaccgccagtttccacgacaacccgaagagcgtggggaggcaggcggtgccccggcccctgactgacgcgaccgggaccagcgcgcttcgtccccgcccacccgacaggccccgcccccgagcccggccccgccccgcgctccccggctttcgcgaggttttgactctcgtggcgccccaggggccgacgggagtggcggccgcgcggaggaggccaagatggcggcagctgcggcttcgcttcgcggggtagtgttgggcccgcggggcgcggggctcccgggcgcgcgtgcccggggtctgctgtgcagcgcgcgtcccgggcagctcccgctacggacacctcaggcagtggccttgtcgtcgaagtctggcctttcccgaggccggaaagtgatgctgtcagcgctgggcatgctggcggcagggggtgcggggctggccatggctctgcattcggctgtgagtgccagtgacctggagctgcacccccccagctatccgtggtgaggactacgtcttctccctgctcacgggctactgcgagccacccaccggggtgtcactgcgggaaggtctctacttcaacccctactttcctggccaggccattgccatggcccctcccatctacacagatgtcttagagtttgacgatggcaccccagctaccatgtcccagatagccaaggatgtgtgcaccttcctgcgctgggcatctgagccagagcacgaccatcgaaaacgcatggggctcaagatgttgatgatgatggctctgctggtgcccctggtctacaccataaagcggcacaagtggtcagtcctgaagagtcggaagctggcatatcggccgcccaagtgaccctgtccagtgtctgcttgccatcctgccagaacaggccctcaagcccaagagccatcccaggcctgttcaggcctcagctaagcctctcttcatctggaagaagaggcaagggggcaggagaccaggctctagctctgggccctccttcagcccccatcatgggaataaattaattttctcaatgtaca

SEQ ID NO: 5647 - protein, 96 aa, Homo sapiens
MAAAAASLRGVVLGPRGAGLPGARARGLLCSARPGQLPLRTPQAVALSSKSGLSRGRKVMLSALGMLAAGGAGLAMALHSAVSASDLELHPPSYPW

SEQ ID NO: 5648 - DNA, 1040 bp, Homo sapiens
gccgacgggagtggcggccgcgcggaggaggccaagatggcggcagctgcggcttcgcttcgcggggtagtgttgggcccgcggggcgcggggctcccgggcgcgcgtgcccggggtctgctgtgcagcgcgcgtcccgggcagctcccgctacggacacctcagcgtggcctcctctcttccttggaccacaccagcatccggaggggtttccaggtatataagcaggtgtgcgcctcctgccacagcatggacttcgtggcctaccgccacctggtgggcgtgtgctacacggaggatgaagctaaggagctggctgcggaggtggaggttcaagacggccccaatgaagatggggagatgttcatgcggccagggaagctgttcgactatttcccaaaaccataccccaacagtgaggctgctcgagctgccaacaacggagcattgccccctgacctcagctacatcgtgcgagctaggcatggtggtgaggactacgtcttctccctgctcacgggctactgcgagccacccaccggggtgtcactgcgggaaggtctctacttcaacccctactttcctggccaggccattgccatggcccctcccatctacacagatgtcttagagtttgacgatggcaccccagctaccatgtcccagatagccaaggatgtgtgcaccttcctgcgctgggcatctgagccagagcacgaccatcgaaaacgcatggggctcaagatgttgatgatgatggctctgctggtgcccctggtctacaccataaagcggcacaagtggtcagtcctgaagagtcggaagctggcatatcggccgcccaagtgaccctgtccagtgtctgcttgccatcctgccagaacaggccctcaagcccaagagccatcccaggcctgttcaggcctcagctaagcctctcttcatctggaagaagaggcaagggggcaggagaccaggctctagctctgggccctccttcagcccccatcatgggaataaattaattttctcaatgtaca

SEQ ID NO: 5649 - protein, 270 aa, Homo sapiens
MAAAAASLRGVVLGPRGAGLPGARARGLLCSARPGQLPLRTPQRGLLSSLDHTSIRRGFQVYKQVCASCHSMDFVAYRHLVGVCYTEDEAKELAAEVEVQDGPNEDGEMFMRPGKLFDYFPKPYPNSEAARAANNGALPPDLSYIVRARHGGEDYVFSLLTGYCEPPTGVSLREGLYFNPYFPGQAIAMAPPIYTDVLEFDDGTPATMSQIAKDVCTFLRWASEPEHDHRKRMGLKMLMMMALLVPLVYTIKRHKWSVLKSRKLAYRPPK

SEQ ID NO: 5650 - DNA, 377 bp, Homo sapiens
cgtgtgctacacggaggatgaagctaaggagctggctgcggaggtggaggttcaagacggccccaatgaagatggggagatgttcatgcggccagggaagctgttcgactatttcccaaaaccataccccaacagtgaggctgctcgagctgccaacaacggagcattgccccctgacctcagctacatcgtgcgagctaggtacacgggctgcccatggggtggtgctggagagatgggggaagggctgacttgtgcttggaactaaggagccatggatctggtcctaggcatggtggtgaggactacgtcttctccctgctcacgggctactgcgagccacccaccggggtgtcactgcgggaaggtctctactt

SEQ ID NO: 5651 - protein, 77 aa, Homo sapiens
MKLRSWLRRWRFKTAPMKMGRCSCGQGSCSTISQNHTPTVRLLELPTTEHCPLTSATSCELGTRAAHGVVLERWGKG

SEQ ID NO: 5652 - DNA, 1023 bp, Homo sapiens
ctacacggaggatgaagctaaggagctggctgcggaggtgtggggtctggggatgcctgggacccagggctcagggctcccactgttgagatggcagggttgtgatgaggctctcggtggcaggtggaggttcaagacggccccaatgaagatggggagatgttcatgcggccagggaagctgttcgactatttcccaaaaccataccccaacagtgaggctgctcgagctgccaacaacggagcattgccccctgacctcagctacatcgtgcgagctaggtacacgggctgcccatggggtggtgctggagagatgggggaagggctgacttgtgcttggaactaaggagccatggatctggtcctaggcatggtggtgaggactacgtcttctccctgctcacgggctactgcgagccacccaccggggtgtcactgcgggaaggtctctacttcaacccctactttcctggccaggccattgccatggcccctcccatctacacagatgtcttagagtttgacgatggcaccccagctaccatgtcccagatagccaaggatgtgtgcaccttcctgcgctgggcatctgagccagagcacgaccatcgaaaacgcatggggctcaaggtaaaagggttgggaggccatggtgggtatcagagaagggctgggagctgggcagggctcctccccactcccttctctgagccttccttgtctgcagatgttgatgatgatggctctgctggtgcccctggtctacaccataaagcggcacaagtggtcagtcctgaagagtcggaagctggcatatcggccgcccaagtgaccctgtccagtgtctgcttgccatcctgccagaacaggccctcaagcccaagagccatcccaggcctgttcaggcctcagctaagcctctcttcatctggaagaagaggcaagggggcaggagaccaggctctagctctgggccctccttcagcccccatcatgggaataaattaattttctcaatgta

SEQ ID NO: 5653 - protein, 237 aa, Homo sapiens
MGWCWRDGGRADLCLELRSHGSGPRHGGEDYVFSLLTGYCEPPTGVSLREGLYFNPYFPGQAIAMAPPIYTDVLEFDDGTPATMSQIAKDVCTFLRWASEPEHDHRKRMGLKVKGLGGHGGYQRRAGSWAGLLPTPFSEPSLSADVDDDGSAGAPGLHHKAAQVVSPEESEAGISAAQVTLSSVCLPSCQNRPSSPRAIPGLFRPQLSLSSSGRRGKGAGDQALALGPPSAPIMGIN

SEQ ID NO: 5654 - DNA, 2281 bp, Homo sapiens
gtggttccgggtacgcagacggcgcgggacgcagggcggacacccacctgcctggctgggttagatcaggccgcgccgggccgggtctggctgggctgggtcgctccgcgtcggtgccggtgcgcaggcgggggcgggctccgcgcagcgcgggctcttcaagatcggagggcggcgccgcggcctccgctcgggccgcactgtatccgggggaagaagctccgcggcgacgtcccgttactcccggccctgccggcccatccgggctgccaccgcgacatagcctcgcccccttccacagagcccgctctcgcgaccgacctgccgccgaccgccacagagcgctccggcgagtcagcgagccgagcgagcgagcgagcgacctccgcctcccccggccggacaacaacaagcgtccgccgggcccggccccgcgcctctgaatggcccgctccagtctccgagatcgagagctcgaatagccatcgggtgccgtacccgccactcagttctgccttctacgtctactggttatggagcctgtctgtcactcttctcgtcgtactaacccgcttacccccggcgttcattggccgtggcctctctagctccgccccctaggggggtcgaccccgtaaccagtgaggcgcgggccaacctagtgcgacgtgtgggcgtggcgggggctggggtctgcgggcgaaggtggcagcccattggaggtcccgggagcgaagtccagctgccgttaggcgctgggatagtcgcacgctggatgcatctacgtccgccgagcccctggggcgaagaggccgcgtccgccttcagttgtggccggtgcttcgccccctgacccttcgcccccaaagaccagctctaacgtgagcgcctcggccgccctgccccagcctcgtacacgccgccagcctcgcccagccggtgtccggagaccctcgggccgtgtccatttgtgggcaaagccagcggggcaggcttggccagagtgcaccactcggcgccgtcccaggcccgacgctctgggcgcgcccggaaccccaggttcgcggcccgtgtttccgaccggcggagggggctcagcggcccgatcccacggaagcgcgctcggaggggtgggacccggccggaccggagatggcgccgccagcgggcggggcggcggcggcggcctcggacttgggctccgccgcagtgctcttggctgtgcacgccgcggtgaggccgctgggcgccgggccagacgccgaggcacagctgcggaggctgcagctgagcgcggaccctgagcggcctgggcgcttccggctggagctgctgggcgcgggacctggggcggttaatttggagtggcccctggagtcagtttcctacaccatccgaggccccacccagcacgagctacagcctccaccaggagggcctggaaccctcagcctgcacttcctcaaccctcaggaagctcagcggtgggcagtcctagtccgaggtgccaccgtggaaggacagaatgtggcagccgtcctggcccagcatcgtgtggccctgagtgttcagcttcaggaggcctgcttcccacctggccccatcaggctgcaggtcacacttgaagacgctgcctctgccgcatccgccgcgtcctctgcacacgttgccctgcaggtccacccccactgcactgttgcagctctccaggagcaggtgttctcagagctcggtttcccgccagccgtgcaacgctgggtcatcggacggtgcctgtgtgtgcctgagcgcagccttgcctcttacggggttcggcaggatggggaccctgctttcctctacttgctgtcagctcctcgagaagccccagccacaggacctagccctcagcacccccagaagatggacggggaacttggacgcttgtttcccccatcattggggctacccccaggcccccagccagctgcctccagcctgcccagtccactccagcccagctggtcctgtccttcctgcaccttcatcaatgccccagaccgccctggctgtgagatgtgtagcacccagaggccctgcacttgggacccccttgctgcagcttccacctagcagccaccagaggttacaaggggagagtggcccttccctcacaagtccgacatctccaggcccccactgaactccggggacctctactgactgcttgctgggacagtcaccagggttggggggaagggccacaaaatgaaaccattaaagacccttaagagccagcaag

SEQ ID NO: 5655 - protein, 319 aa, Homo sapiens
MAPPAGGAAAAASDLGSAAVLLAVHAAVRPLGAGPDAEAQLRRLQLSADPERPGRFRLELLGAGPGAVNLEWPLESVSYTIRGPTQHELQPPPGGPGTLSLHFLNPQEAQRWAVLVRGATVEGQNVAAVLAQHRVALSVQLQEACFPPGPIRLQVTLEDAASAASAASSAHVALQVHPHCTVAALQEQVFSELGFPPAVQRWVIGRCLCVPERSLASYGVRQDGDPAFLYLLSAPREAPATGPSPQHPQKMDGELGRLFPPSLGLPPGPQPAASSLPSPLQPSWSCPSCTFINAPDRPGCEMCSTQRPCTWDPLAAAST

SEQ ID NO: 5656 - DNA, 2485 bp, Homo sapiens
gtggttccgggtacgcagacggcgcgggacgcagggcggacacccacctgcctggctgggttagatcaggccgcgccgggccgggtctggctgggctgggtcgctccgcgtcggtgccggtgcgcaggcgggggcgggctccgcgcagcgcgggctcttcaagatcggagggcggcgccgcggcctccgctcgggccgcactgtatccgggggaagaagctccgcggcgacgtcccgttactcccggccctgccggcccatccgggctgccaccgcgacatagcctcgcccccttccacagagcccgctctcgcgaccgacctgccgccgaccgccacagagcgctccggcgagtcagcgagccgagcgagcgagcgagcgacctccgcctcccccggccggacaacaacaagcgtccgccgggcccggccccgcgcctctgaatggcccgctccagtctccgagatcgagagctcgaatagccatcgggtgccgtacccgccactcagttctgccttctacgtctactggttatggagcctgtctgtcactcttctcgtcgtactaacccgcttacccccggcgttcattggccgtggcctctctagctccgccccctaggggggtcgaccccgtaaccagtgaggcgcgggccaacctagtgcgacgtgtgggcgtggcgggggctggggtctgcgggcgaaggtggcagcccattggaggtcccgggagcgaagtccagctgccgttaggcgctgggatagtcgcacgctggatgcatctacgtccgccgagcccctggggcgaagaggccgcgtccgccttcagttgtggccggtgcttcgccccctgacccttcgcccccaaagaccagctctaacgtgagcgcctcggccgccctgccccagcctcgtacacgccgccagcctcgcccagccggtgtccggagaccctcgggccgtgtccatttgtgggcaaagccagcggggcaggcttggccagagtgcaccactcggcgccgtcccaggcccgacgctctgggcgcgcccggaaccccaggttcgcggcccgtgtttccgaccggcggagggggctcagcggcccgatcccacggaagcgcgctcggaggggtgggacccggccggaccggagatggcgccgccagcgggcggggcggcggcggcggcctcggacttgggctccgccgcagtgctcttggctgtgcacgccgcggtgaggccgctgggcgccgggccagacgccgaggcacagctgcggaggctgcagctgagcgcggaccctgagcggcctgggcgcttccggctggagctgctgggcgcgggacctggggcggttaatttggagtggcccctggagtcagtttcctacaccatccgaggccccacccagcacgagctacagcctccaccaggagggcctggaaccctcagcctgcacttcctcaaccctcaggaagctcagcggtgggcagtcctagtccgaggtgccaccgtggaaggacagaatggcagcaagagcaactcaccaccagccttgggcccagaagcatgccctgtctccctgcccagtcccccggaagcctccacactcaagggccctccacctgaggcagatcttcctaggagccctggaaacttgacggagagagaagagctggcagggagcctggcccgggctattgcaggtggagacgagaagggggcagcccaagtggcagccgtcctggcccagcatcgtgtggccctgagtgttcagcttcaggaggcctgcttcccacctggccccatcaggctgcaggtcacacttgaagacgctgcctctgccgcatccgccgcgtcctctgcacacgttgccctgcaggtccacccccactgcactgttgcagctctccaggagcaggtgttctcagagctcggtttcccgccagccgtgcaacgctgggtcatcggacggtgcctgtgtgtgcctgagcgcagccttgcctcttacggggttcggcaggatggggaccctgctttcctctacttgctgtcagctcctcgagaagccccagccacaggacctagccctcagcacccccagaagatggacggggaacttggacgcttgtttcccccatcattggggctacccccaggcccccagccagctgcctccagcctgcccagtccactccagcccagctggtcctgtccttcctgcaccttcatcaatgccccagaccgccctggctgtgagatgtgtagcacccagaggccctgcacttgggacccccttgctgcagcttccacctagcagccaccagaggttacaaggggagagtggcccttccctcacaagtccgacatctccaggcccccactgaactccggggacctctactgactgcttgctgggacagtcaccagggttggggggaagggccacaaaatgaaaccattaaagacccttaagagccagcaag

SEQ ID NO: 5657 - protein, 387 aa, Homo sapiens; identical to SEQ ID NO: 777

SEQ ID NO: 5658 - DNA, 182 bp, Homo sapiens
cagaggccctgcacttgggacccccttgctgcagcttccacctagcagccaccagaggtaccagaggtggcacaggcaggggaggtggggggcagggcagaatccacaggaatgacccagctcctcccccacaggttacaagggccacaaaatgaaaccattaaagacccttaagagccagc

SEQ ID NO: 5659 - protein, 50 aa, Homo sapiens
EALHLGPPCCSFHLAATRGTRGGTGRGGGGQGRIHRNDPAPPPQVTRATK

SEQ ID NO: 5660 - DNA, 531 bp, Homo sapiens
gaccctgctttcctctacttgctgtcagctcctcgagaagccccagccacaggacctagccctcagcacccccagaagatggacggggaacttggacgcttgtttcccccatcattggggctacccccaggcccccagccagctgcctccagcctgcccagtccactccagcccagctggtcctgtccttcctgcaccttcatcaatgccccagaccgccctggctgtgagatgtgtagcacccagaggccctgcacttgggacccccttgctgcagcttccacctagcagccaccagaggtaccagaggtggcacaggcaggggaggtggggggcagggcagaatccacaggaatgacccagctcctcccccacaggttacaaggggagagtggcccttccctcacaagtccgacatctccaggcccccactgaactccggggacctctactgactgcttgctgggacagtcaccagggttggggggaagggccacaaaatgaaaccattaaagacccttaagagccagc

SEQ ID NO: 5661 - protein, 69 aa, Homo sapiens
MDGELGRLFPPSLGLPPGPQPAASSLPSPLQPSWSCPSCTFINAPDRPGCEMCSTQRPCTWDPLAAAST

SEQ ID NO: 5662 - DNA, 483 bp, Homo sapiens
ttgcctcttacggggttcggcaggatggggaccctgctttcctctacttgctgtcagctcctcgagaagccccagccacaggacctagccctcagcacccccagaagatggacggggaacttggacgcttgtttcccccatcattggggctacccccaggcccccagccagctgcctccagcctgcccagtccactccagcccagctggtcctgtccttcctgcaccttcatcaatgccccagaccgccctggctgtgagatgtgtagcacccagaggccctgcacttgggacccccttgctgcagcttccacctagcagccaccagaggttacaaggggagagtggcccttccctcacaagtccgacatctccaggcccccactgaactccggggacctctactgactgcttgctgggacagtcaccagggttggggggaagggccacaaaatgaaaccattaaagacccttaagagccagc

SEQ ID NO: 5663 - protein, 120 aa, Homo sapiens
MGTLLSSTCCQLLEKPQPQDLALSTPRRWTGNLDACFPHHWGYPQAPSQLPPACPVHSSPAGPVLPAPSSMPQTALAVRCVAPRGPALGTPLLQLPPSSHQRLQGESGPSLTSPTSPGPH

SEQ ID NO: 5664 - DNA, 438 bp, Homo sapiens
ggcaaaggtcctggaaaaccaagggcctagaggcctggacagaggccacagcacagcacacccatatcttacctctaggcagcaagagcaactcaccaccagccttgggcccagaagcatgccctgtctccctgcccagtcccccggaagcctccacactcaagggccctccacctgaggcagatttccacctagcagccaccagaggtaccagaggtggcacaggcaggggaggtggggggcagggcagaatccacaggaatgacccagctcctcccccacaggttacaaggggagagtggcccttccctcacaagtccgacatctccaggcccccactgaactccggggacctctactgactgcttgctgggacagtcaccagggttggggggaagggccacaaaatgaaaccattaaagacccttaagagccagc

SEQ ID NO: 5665 - protein, 119 aa, Homo sapiens
QRSWKTKGLEAWTEATAQHTHILPLGSKSNSPPALGPEACPVSLPSPPEASTLKGPPPEADFHLAATRGTRGGTGRGGGGQGRIHRNDPAPPPQVTRGEWPFPHKSDISRPPLNSGDLY

SEQ ID NO: 5666 - DNA, 471 bp, Homo sapiens
gcctccaccaggagggcctggaaccctcagcctgcacttcctcaaccctcaggaagctcagcggtgggcagtcctagtccgaggtgccaccgtggaaggacagaatggtcaccttgcctcttacggggttcggcaggatggggaccctgctttcctctacttgctgtcagctcctcgagaagccccagcccagctggtcctgtccttcctgcaccttcatcaatgccccagaccgccctggctgtgagatgtgtagcacccagaggccctgcacttgggacccccttgctgcagcttccacctagcagccaccagaggttacaaggggagagtggcccttccctcacaagtccgacatctccaggcccccactgaactccggggacctctactgactgcttgctgggacagtcaccagggttggggggaagggccacaaaatgaaaccattaaagacccttaagagccagc

SEQ ID NO: 5667 - protein, 66 aa, Homo sapiens
MVTLPLTGFGRMGTLLSSTCCQLLEKPQPSWSCPSCTFINAPDRPGCEMCSTQRPCTWDPLAAAST

SEQ ID NO: 5668 - DNA, 2357 bp, Homo sapiens
gtggttccgggtacgcagacggcgcgggacgcagggcggacacccacctgcctggctgggttagatcaggccgcgccgggccgggtctggctgggctgggtcgctccgcgtcggtgccggtgcgcaggcgggggcgggctccgcgcagcgcgggctcttcaagatcggagggcggcgccgcggcctccgctcgggccgcactgtatccgggggaagaagctccgcggcgacgtcccgttactcccggccctgccggcccatccgggctgccaccgcgacatagcctcgcccccttccacagagcccgctctcgcgaccgacctgccgccgaccgccacagagcgctccggcgagtcagcgagccgagcgagcgagcgagcgacctccgcctcccccggccggacaacaacaagcgtccgccgggcccggccccgcgcctctgaatggcccgctccagtctccgagatcgagagctcgaatagccatcgggtgccgtacccgccactcagttctgccttctacgtctactggttatggagcctgtctgtcactcttctcgtcgtactaacccgcttacccccggcgttcattggccgtggcctctctagctccgccccctaggggggtcgaccccgtaaccagtgaggcgcgggccaacctagtgcgacgtgtgggcgtggcgggggctggggtctgcgggcgaaggtggcagcccattggaggtcccgggagcgaagtccagctgccgttaggcgctgggatagtcgcacgctggatgcatctacgtccgccgagcccctggggcgaagaggccgcgtccgccttcagttgtggccggtgcttcgccccctgacccttcgcccccaaagaccagctctaacgtgagcgcctcggccgccctgccccagcctcgtacacgccgccagcctcgcccagccggtgtccggagaccctcgggccgtgtccatttgtgggcaaagccagcggggcaggcttggccagagtgcaccactcggcgccgtcccaggcccgacgctctgggcgcgcccggaaccccaggttcgcggcccgtgtttccgaccggcggagggggctcagcggcccgatcccacggaagcgcgctcggaggggtgggacccggccggaccggagatggcgccgccagcgggcggggcggcggcggcggcctcggacttgggctccgccgcagtgctcttggctgtgcacgccgcggtgaggccgctgggcgccgggccagacgccgaggcacagctgcggaggctgcagctgagcgcggaccctgagcggcctgggcgcttccggctggagctgctgggcgcgggacctggggcggttaatttggagtggcccctggagtcagtttcctacaccatccgaggccccacccagcacgagctacagcctccaccaggagggcctggaaccctcagcctgcacttcctcaaccctcaggaagctcagcggtgggcagtcctagtccgaggtgccaccgtggaaggacagaatggcagcaagagcaactcaccaccagccttgggcccagaagcatgccctgtctccctgcccagtcccccggaagcctccacactcaagggccctccacctgaggcagatcttcctaggagccctggaaacttgacggagagagaagagctggcagggagcctggcccgggctattgcaggtggagacgagaagggggcagcccaagtggcagccgtcctggcccagcatcgtgtggccctgagtgttcagcttcaggaggcctgcttcccacctggccccatcaggctgcaggtcacacttgaagacgctgcctctgccgcatccgccgcgtcctctgcacacgttgccctgcaggtccacccccactgcactgttgcagctctccaggagcaggtgttctcagagctcggtttcccgccagccgtgcaacgctgggtcatcggacggtgcctgtgtgtgcctgagcgcagccttgcctcttacggggttcggcaggatggggaccctgctttcctctacttgctgtcagctcctcgagaagccccagcccagctggtcctgtccttcctgcaccttcatcaatgccccagaccgccctggctgtgagatgtgtagcacccagaggccctgcacttgggacccccttgctgcagcttccacctagcagccaccagaggttacaaggggagagtggcccttccctcacaagtccgacatctccaggcccccactgaactccggggacctctactgactgcttgctgggacagtcaccagggttggggggaagggccacaaaatgaaaccattaaagacccttaagagccagc

SEQ ID NO: 5669 - protein, 326 aa, Homo sapiens
MAPPAGGAAAAASDLGSAAVLLAVHAAVRPLGAGPDAEAQLRRLQLSADPERPGRFRLELLGAGPGAVNLEWPLESVSYTIRGPTQHELQPPPGGPGTLSLHFLNPQEAQRWAVLVRGATVEGQNGSKSNSPPALGPEACPVSLPSPPEASTLKGPPPEADLPRSPGNLTEREELAGSLARAIAGGDEKGAAQVAAVLAQHRVALSVQLQEACFPPGPIRLQVTLEDAASAASAASSAHVALQVHPHCTVAALQEQVFSELGFPPAVQRWVIGRCLCVPERSLASYGVRQDGDPAFLYLLSAPREAPAQLVLSFLHLHQCPRPPWL

SEQ ID NO: 5670 - DNA, 1090 bp, Homo sapiens
agacgagaagggggcagcccaagtggcagccgtcctggcccagcatcgtgtggccctgagtgttcagcttcaggaggcctgcttcccacctggccccatcaggtgaggcctggggctgcttcttcaccttgtcctcgtgaccatcccaggtcccccatccatccctgaacccacattctggcacaggctgcaggtcacacttgaagacgctgcctctgccgcatccgccgcgtcctctgcacacgttgccctgcaggtccacccccactgcactgttgcagctctccaggagcaggtgggcacagggtctggggagccctgccaggggcagaggagcctaggtgacatcacctgccctgatgctctggccacaggtgttctcagagctcggtttcccgccagccgtgcaacgctgggtcatcggacggtgcctgtgtgtgcctgagcgcagccttgcctcttacggggttcggcaggatggggaccctgctttcctctacttgctgtcagctcctcgagaagccccaggtcagtcctcgatgggggtggggtgtgggaggtggggtgcagccccacagtcctgagctccaccccctcagccacaggacctagccctcagcacccccagaagatggacggggaacttggacgcttgtttcccccatcattggggctacccccaggcccccagccagctgcctccagcctgcccagtccactccaggtgggcacgggactgggcagggagggccaggacagccatgggcattggaaagagcagggaagcaacaactgtctctcttcccccagcccagctggtcctgtccttcctgcaccttcatcaatgccccagaccgccctggctgtgagatgtgtagcacccagaggccctgcacttgggacccccttgctgcagcttccacctagcagccaccagaggttacaaggggagagtggcccttccctcacaagtccgacatctccaggcccccactgaactccggggacctctactgactgcttgctgggacagtcaccagggttggggggaagggccacaaaatgaaaccattaaagacccttaagagcc

SEQ ID NO: 5671 - protein, 121 aa, Homo sapiens
MDGELGRLFPPSLGLPPGPQPAASSLPSPLQVGTGLGREGQDSHGHWKEQGSNNCLSSPSPAGPVLPAPSSMPQTALAVRCVAPRGPALGTPLLQLPPSSHQRLQGESGPSLTSPTSPGPH

SEQ ID NO: 5672 - DNA, 2262 bp, Homo sapiens
gtggttccgggtacgcagacggcgcgggacgcagggcggacacccacctgcctggctgggttagatcaggccgcgccgggccgggtctggctgggctgggtcgctccgcgtcggtgccggtgcgcaggcgggggcgggctccgcgcagcgcgggctcttcaagatcggagggcggcgccgcggcctccgctcgggccgcactgtatccgggggaagaagctccgcggcgacgtcccgttactcccggccctgccggcccatccgggctgccaccgcgacatagcctcgcccccttccacagagcccgctctcgcgaccgacctgccgccgaccgccacagagcgctccggcgagtcagcgagccgagcgagcgagcgagcgacctccgcctcccccggccggacaacaacaagcgtccgccgggcccggccccgcgcctctgaatggcccgctccagtctccgagatcgagagctcgaatagccatcgggtgccgtacccgccactcagttctgccttctacgtctactggttatggagcctgtctgtcactcttctcgtcgtactaacccgcttacccccggcgttcattggccgtggcctctctagctccgccccctaggggggtcgaccccgtaaccagtgaggcgcgggccaacctagtgcgacgtgtgggcgtggcgggggctggggtctgcgggcgaaggtggcagcccattggaggtcccgggagcgaagtccagctgccgttaggcgctgggatagtcgcacgctggatgcatctacgtccgccgagcccctggggcgaagaggccgcgtccgccttcagttgtggccggtgcttcgccccctgacccttcgcccccaaagaccagctctaacgtgagcgcctcggccgccctgccccagcctcgtacacgccgccagcctcgcccagccggtgtccggagaccctcgggccgtgtccatttgtgggcaaagccagcggggcaggcttggccagagtgcaccactcggcgccgtcccaggcccgacgctctgggcgcgcccggaaccccaggttcgcggcccgtgtttccgaccggcggagggggctcagcggcccgatcccacggaagcgcgctcggaggggtgggacccggccggaccggagatggcgccgccagcgggcggggcggcggcggcggcctcggacttgggctccgccgcagtgctcttggctgtgcacgccgcggtgaggccgctgggcgccgggccagacgccgaggcacagctgcggaggctgcagctgagcgcggaccctgagcggcctgggcgcttccggctggagctgctgggcgcgggacctggggcggttaatttggagtggcccctggagtcagtttcctacaccatccgaggccccacccagcacgagctacagcctccaccaggagggcctggaaccctcagcctgcacttcctcaaccctcaggaagctcagcggtgggcagtcctagtccgaggtgccaccgtggaaggacagaatggcagcaagagcaactcaccaccagccttgggcccagaagcatgccctgtctccctgcccagtcccccggaagcctccacactcaagggccctccacctgaggcagatcttcctaggagccctggaaacttgacggagagagaagagctggcagggagcctggcccgggctattgcaggtggagacgagaagggggcagcccaagtggcagccgtcctggcccagcatcgtgtggccctgagtgttcagcttcaggaggcctgcttcccacctggccccatcaggtgaggcctggggctgcttcttcaccttgtcctcgtgaccatcccaggtcccccatccatccctgaacccacattctggcacaggctgcaggtcacacttgaagacgctgcctctgccgcatccgccgcgtcctctgcacacgttgccctgcaggtccacccccactgcactgttgcagctctccaggagcaggtgggcacagggtctggggagccctgccaggggcagaggagcctaggtgacatcacctgccctgatgctctggccacaggtgttctcagagctcggtttcccgccagccgtgcaacgctgggtcatcggacggtgcctgtgtgtgcctgagcgcagccttgcctcttacggggttcggcaggatggggaccctgctttcctctacttgctgtcagctcctcgagaagccccaggtcagtcctcgatgggggtggggtg

SEQ ID NO: 5673 - protein, 220 aa, Homo sapiens
MAPPAGGAAAAASDLGSAAVLLAVHAAVRPLGAGPDAEAQLRRLQLSADPERPGRFRLELLGAGPGAVNLEWPLESVSYTIRGPTQHELQPPPGGPGTLSLHFLNPQEAQRWAVLVRGATVEGQNGSKSNSPPALGPEACPVSLPSPPEASTLKGPPPEADLPRSPGNLTEREELAGSLARAIAGGDEKGAAQVAAVLAQHRVALSVQLQEACFPPGPIR

SEQ ID NO: 5674 - DNA, 1526 bp, Homo sapiens
gtgggcgtggcgggggctggggtctgcgggcgaaggtggcagcccattggaggtcccgggagcgaagtccagctgccgttaggcgctgggatagtcgcacgctggatgcatctacgtccgccgagcccctggggcgaagaggccgcgtccgccttcagttgtggccggtgcttcgccccctgacccttcgcccccaaagaccagctctaacgtgagcgcctcggccgccctgccccagcctcgtacacgccgccagcctcgcccagccggtgtccggagaccctcgggccgtgtccatttgtgggcaaagccagcggggcaggcttggccagagtgcaccactcggcgccgtcccaggcccgacgctctgggcgcgcccggaaccccaggttcgcggcccgtgtttccgaccggcggagggggctcagcggcccgatcccacggaagcgcgctcggaggggtgggacccggccggaccggagatggcgccgccagcgggcggggcggcggcggcggcctcggacttgggctccgccgcagtgctcttggctgtgcacgccgcggtgaggccgctgggcgccgggccagacgccgaggcacagctgcggaggctgcagctgagcgcggaccctgagcggcctgggcgcttccggctggagctgctgggcgcgggacctggggcggttaatttggagtggcccctggagtcagtttcctacaccatccgagtcctagtccgaggtgccaccgtggaaggacagaatggtcagtgccctgtaatggatacaattacaatttggaatagccttggccccccagtcctggttggggaagttggatccaccttccccactgctggatgtctgggaaggcttccaggagggagtaggtggagcctggagtagcttggagtacttggagtggctgctggagtcagtctcctacaccatctgaggccccagccagcacaagttgcagcctccaccaggaagccctggaacctcagcctgcacttccttaaccctcaggaaggatgagaggcaagcatgaagaggcagagcaggcagggtcaggacctgtgtgagaagacatcatcccaagagcagcaggagagtgacaggagtgggagagtgacagactcagatacctcctgcttaagacagagttctgcagtggcaagggttggtgcagatagggttggggagaaggatgtttctagagatgcttagaagatggaattagtggccgggtggggtggctcacgcctgtaattccagcactttgggaggccgaggtgggtgatcacctgatgtcaggagtttgagaccagcctggtcagcaaggtgaaaccctgtctctactaaaaatacaaaaattagccaggcgtggtggcgtgtgcctgtagtcccagctacttggggaggctgaggcaggagaatcacttgaacccggaggcagaggttgcagtgagctgagatcttgccactgcactccagcctgggtgacagagcaagactccatctcaa

SEQ ID NO: 5675 - protein, 140 aa, Homo sapiens
MAPPAGGAAAAASDLGSAAVLLAVHAAVRPLGAGPDAEAQLRRLQLSADPERPGRFRLELLGAGPGAVNLEWPLESVSYTIRVLVRGATVEGQNGQCPVMDTITIWNSLGPPVLVGEVGSTFPTAGCLGRLPGGSRWSLE

SEQ ID NO: 5676 - DNA, 1675 bp, Homo sapiens
cccctaggggggtcgaccccgtaaccagtgaggcgcgggccaacctagtgcgacgtgtgggcgtggcgggggctggggtctgcgggcgaaggtggcagcccattggaggtcccgggagcgaagtccagctgccgttaggcgctgggatagtcgcacgctggatgcatctacgtccgccgagcccctggggcgaagaggccgcgtccgccttcagttgtggccggtgcttcgccccctgacccttcgcccccaaagaccagctctaacgtgagcgcctcggccgccctgccccagcctcgtacacgccgccagcctcgcccagccggtgtccggagaccctcgggccgtgtccatttgtgggcaaagccagcggggcaggcttggccagagtgcaccactcggcgccgtcccaggcccgacgctctgggcgcgcccggaaccccaggttcgcggcccgtgtttccgaccggcggagggggctcagcggcccgatcccacggaagcgcgctcggaggggtgggacccggccggaccggagatggcgccgccagcgggcggggcggcggcggcggcctcggacttgggctccgccgcagtgctcttggctgtgcacgccgcggtgaggccgctgggcgccgggccagacgccgaggcacagctgcggaggctgcagctgagcgcggaccctgagcggcctgggcgcttccggctggagctgctgggcgcgggacctggggcggttaatttggagtggcccctggagtcagtttcctacaccatccgaggccccacccagcacgagctacagcctccaccaggagggcctggaaccctcagcctgcacttcctcaaccctcaggaagctcagcggtgggcagtcctagtccgaggtgccaccgtggaaggacagaatggtcagtgccctgtaatggatacaattacaatttggaatagccttggccccccagtcctggttggggaagttggatccaccttccccactgctggatgtctgggaaggcttccaggagggagtaggtggagcctggagtagcttggagtacttggagtggctgctggagtcagtctcctacaccatctgaggccccagccagcacaagttgcagcctccaccaggaagccctggaacctcagcctgcacttccttaaccctcaggaaggatgagaggcaagcatgaagaggcagagcaggcagggtcaggacctgtgtgagaagacatcatcccaagagcagcaggagagtgacaggagtgggagagtgacagactcagatacctcctgcttaagacagagttctgcagtggcaagggttggtgcagatagggttggggagaaggatgtttctagagatgcttagaagatggaattagtggccgggtggggtggctcacgcctgtaattccagcactttgggaggccgaggtgggtgatcacctgatgtcaggagtttgagaccagcctggtcagcaaggtgaaaccctgtctctactaaaaatacaaaaattagccaggcgtggtggcgtgtgcctgtagtcccagctacttggggaggctgaggcaggagaatcacttgaacccggaggcagaggttgcagtgagctgagatcttgccactgcactccagcctgggtgacagagcaagactccatctcaa

SEQ ID NO: 5677 - protein, 171 aa, Homo sapiens
MAPPAGGAAAAASDLGSAAVLLAVHAAVRPLGAGPDAEAQLRRLQLSADPERPGRFRLELLGAGPGAVNLEWPLESVSYTIRGPTQHELQPPPGGPGTLSLHFLNPQEAQRWAVLVRGATVEGQNGQCPVMDTITIWNSLGPPVLVGEVGSTFPTAGCLGRLPGGSRWSLE

SEQ ID NO: 5678 - DNA, 1783 bp, Homo sapiens
ggcggacacccacctgcctggctgggttagatcaggccgcgccgggccgggtctggctgggctgggtcgctccgcgtcggtgccggtgcgcaggcgggggcgggctccgcgcagcgcgggctcttcaagatcggagggcggcgccgcggcctccgctcgggccgcactgtatccgggggaagaagctccgcggcgacgtcccgttactcccggccctgccggcccatccgggctgccaccgcgacatagcctcgcccccttccacagagcccgctctcgcgaccgacctgccgccgaccgccacagagcgctccggcgagtcagcgagccgagcgagcgagcgagcgacctccgcctcccccggccggacaacaacaagcgtccgccgggcccggccccgcgcctctgaatggcccgctccagtctccgagatcgagagctcgaatagccatcgggtgccgtacccgccactcagttctgccttctacgtctactggttatggagcctgtctgtcactcttctcgtcgtactaacccgcttacccccggcgttcattggccgtggcctctctagctccgccccctaggggggtcgaccccgtaaccagtgaggcgcgggccaacctagtgcgacgtgtgggcgtggcgggggctggggtctgcgggcgaaggtggcagcccattggaggtcccgggagcgaagtccagctgccgttaggcgctgggatagtcgcacgctggatgcatctacgtccgccgagcccctggggcgaagaggccgcgtccgccttcagttgtggccggtgcttcgccccctgacccttcgcccccaaagaccagctctaacgttaatttggagtggcccctggagtcagtttcctacaccatccgaggccccacccagcacgagctacagcctccaccaggagggcctggaaccctcagcctgcacttcctcaaccctcaggaagctcagcggtgggcagtcctagtccgaggtgccaccgtggaaggacagaatggtcagtgccctgtaatggatacaattacaatttggaatagccttggccccccagtcctggttggggaagttggatccaccttccccactgctggatgtctgggaaggcttccaggagggagtaggtggagcctggagtagcttggagtacttggagtggctgctggagtcagtctcctacaccatctgaggccccagccagcacaagttgcagcctccaccaggaagccctggaacctcagcctgcacttccttaaccctcaggaaggatgagaggcaagcatgaagaggcagagcaggcagggtcaggacctgtgtgagaagacatcatcccaagagcagcaggagagtgacaggagtgggagagtgacagactcagatacctcctgcttaagacagagttctgcagtggcaagggttggtgcagatagggttggggagaaggatgtttctagagatgcttagaagatggaattagtggccgggtggggtggctcacgcctgtaattccagcactttgggaggccgaggtgggtgatcacctgatgtcaggagtttgagaccagcctggtcagcaaggtgaaaccctgtctctactaaaaatacaaaaattagccaggcgtggtggcgtgtgcctgtagtcccagctacttggggaggctgaggcaggagaatcacttgaacccggaggcagaggttgcagtgagctgagatcttgccactgcactccagcctgggtgacagagcaagactccatctcaa

SEQ ID NO: 5679 - protein, 60 aa, Homo sapiens [sequence omitted]

SEQ ID NO: 5680 - DNA, 1971 bp, Homo sapiens
gtggttccgggtacgcagacggcgcgggacgcagggcggacacccacctgcctggctgggttagatcaggccgcgccgggccgggtctggctgggctgggtcgctccgcgtcggtgccggtgcgcaggcgggggcgggctccgcgcagcgcgggctcttcaagatcggagggcggcgccgcggcctccgctcgggccgcactgtatccgggggaagaagctccgcggcgacgtcccgttactcccggccctgccggcccatccgggctgccaccgcgacatagcctcgcccccttccacagagcccgctctcgcgaccgacctgccgccgaccgccacagagcgctccggcgagtcagcgagccgagcgagcgagcgagcgacctccgcctcccccggccggacaacaacaagcgtccgccgggcccggccccgcgcctctgaatggcccgctccagtctccgagatcgagagctcgaatagccatcgggtgccgtacccgccactcagttctgccttctacgtctactggttatggagcctgtctgtcactcttctcgtcgtactaacccgcttacccccggcgttcattggccgtggcctctctagctccgccccctaggggggtcgaccccgtaaccagtgaggcgcgggccaacctagtgcgacgtgtgggcgtggcgggggctggggtctgcgggcgaaggtggcagcccattggaggtcccgggagcgaagtccagctgccgttaggcgctgggatagtcgcacgctggatgcatctacgtccgccgagcccctggggcgaagaggccgcgtccgccttcagttgtggccggtgcttcgccccctgacccttcgcccccaaagaccagctctaacgtgagcgcctcggccgccctgccccagcctcgtacacgccgccagcctcgcccagccggtgtccggagaccctcgggccgtgtccatttgtgggcaaagccagcggggcaggcttggccagagtgcaccactcggcgccgtcccaggcccgacgctctgggcgcgcccggaaccccaggttcgcggcccgtgtttccgaccggcggagggggctcagcggcccgatcccacggaagcgcgctcggaggggtgggacccggccggaccggagatggcgccgccagcgggcggggcggcggcggcggcctcggacttgggctccgccgcagtgctcttggctgtgcacgccgcggtgaggccgctgggcgccgggccagacgccgaggcacagctgcggaggctgcagctgagcgcggaccctgagcggcctgggcgcttccggctggagctgctgggcgcgggacctggggcggttaatttggagtggcccctggagtcagtttcctacaccatccgaggccccacccagcacgagctacagcctccaccaggagggcctggaaccctcagcctgcacttccttaaccctcaggaaggatgagaggcaagcatgaagaggcagagcaggcagggtcaggacctgtgtgagaagacatcatcccaagagcagcaggagagtgacaggagtgggagagtgacagactcagatacctcctgcttaagacagagttctgcagtggcaagggttggtgcagatagggttggggagaaggatgtttctagagatgcttagaagatggaattagtggccgggtggggtggctcacgcctgtaattccagcactttgggaggccgaggtgggtgatcacctgatgtcaggagtttgagaccagcctggtcagcaaggtgaaaccctgtctctactaaaaatacaaaaattagccaggcgtggtggcgtgtgcctgtagtcccagctacttggggaggctgaggcaggagaatcacttgaacccggaggcagaggttgcagtgagctgagatcttgccactgcactccagcctgggtgacagagcaagactccatctcaa

SEQ ID NO: 5681 - protein, 109 aa, Homo sapiens
MAPPAGGAAAAASDLGSAAVLLAVHAAVRPLGAGPDAEAQLRRLQLSADPERPGRFRLELLGAGPGAVNLEWPLESVSYTIRGPTQHELQPPPGGPGTLSLHFLNPQEG

SEQ ID NO: 5682 - DNA, 1794 bp, Homo sapiens
aaggcagaactgagtggcgggtacggcacccgatggctattcgagctctcgatctcggagactggagcgggccattcagaggcgcggggccgggcccggcggacgcttgttgttgtccggccgggggaggcggaggtcgctcgctcgctcgctcggctcgctgactcgccggagcgctctgtggcggtcggcggcaggtcggtcgcgagagcgggctctgtggaagggggcgaggctatgtcgcggtggcagcccggatgggccggcagggccgggagtaacgggacgtcgccgcggagcttcttcccccggatacagtgcggcccgagcggaggccgcggcgccgccctccgatcttgaagagcccgcgctgcgcggagcccgcccccgcctgcgcaccggcaccgacgcggagcgacccagcccagccagacccggcccggcgcggcctgatctaacccagccaggcaggcaatactagcccctctggagcacggagctccttccccaaagacatgaagctattggagaactcgagctttgaagccatcaactcacagctgactgtggagactggagatgcccacatcattggcaggattgagagctactcatgtaagatggcaggagacgacaaacacatgttcaagcagttctgccaggagggccagccccacgtgctggaggcactttctccaccccagacttcaggactgagccccagcagactcagcaaaagccaaggcggtgaggaggagggccccctcagtgacaagtgcagccgcaagaccctcttctacctgattgccacgctcaatgagtccttcaggcctgactatgacttcagcacagcccgcagccatgagttcagccgggagcccagccttagctgggtggtgaatgcagtcaactgcagtctgttctcagctgtgcgggaggacttcaaggatctgaaaccacagctgtggaacgcggtggacgaggagatctgcctggctgaatgtgacatctacagctataacccagacttggactcagatcccttcggggaggatggtagcctctggtccttcaactacttcttctacaacaagcggctcaagcgaatcgtcttctttagctgccgttccatcagtggctccacctacacaccctcagaggcaggcaacgagctggacatggagctgggggaggaggaggtggaggaagaaagcagaagcgggggcagtggggccgaggagaccagcaccatggaggaggacagggtcccagtgatctgtatttgatgaggaggagccgaggccccagcttcatccagcttcaaccaatgcctggacctgtccacctgagaggcccctggggcctccccagctgctggccagaccctggcgctgccacagtcctggcactgcccaaggccatacctgcctagccctttggctccatcctgtggatgcccactcacccctcagactcctgctgcccatgctgtggccggacttgtcagcagggggcctggtgggaggagcgactgccctgcccaaatgaactgccacagcagggacagctggaccgcagagtttatttttgtatttctactgggcctgcacactccagcccaaagggtctgtggccggaggccccacgagcaggccccagcagtcaccggctctggtcttgggccggccccggtgcccacctgtacccccacctcgcccatttggccgcgtgcactgagtgtcactttgctgcagctcgtttctttccaataaaagtttctgtgacttagtgtgg

SEQ ID NO: 5683 - protein, 256 aa, Homo sapiens; identical to SEQ ID NO: 779

SEQ ID NO: 5684 - DNA, 307 bp, Homo sapiens
ggcagaactgagtggcgggtacggcacccgatggctattcgagctctcgatctcggagactggagcgggccattcagaggcgcggggccgggcccggcggacgcttgttgttgtccggccgggggaggcggaggtcgctcgctcgctcgctcggctcgctgactcgccggagcgctctgtggcggtcggcggcaggtcggtcgcgagagcgggctctgtggaaggggcttcttcccccggatacagtgcggcccgagcggaggccgcggcgccgccctccgatcttgaagagcccgcgctgcgcgga

SEQ ID NO: 5685 - protein, 43 aa, Homo sapiens
MAIRALDLGDWSGPFRGAGPGPADACCCPAGGGGGRSLARSAR

SEQ ID NO: 5686 - DNA, 1652 bp, Homo sapiens
ccgccctcctaggcgtctggagaaactaggcaatttttccgggtagagtggaggaacctgtagttttcctctccccgggccagaaagtagccaaaacgaaagagcgcccgcccaggcaatactagcccctctggagcacggagctccttccccaaagacatgaagctattggagaactcgagctttgaagccatcaactcacagctgactgtggagactggagatgcccacatcattggcaggattgagagctactcatgtaagatggcaggagacgacaaacacatgttcaagcagttctgccaggagggccagccccacgtgctggaggcactttctccaccccagacttcaggactgagccccagcagactcagcaaaagccaaggcggtgaggaggagggccccctcagtgacaagtgcagccgcaagaccctcttctacctgattgccacgctcaatgagtccttcaggcctgactatgacttcagcacagcccgcagccatgagttcagccgggagcccagccttagctgggtggtgaatgcagtcaactgcagtctgttctcagctgtgcgggaggacttcaaggatctgaaaccacagctgtggaacgcggtggacgaggagatctgcctggctgaatgtgacatctacaggtgggccggcatccctgcagatggcctccaggcctccaggtttgtggggcacttggcgcctcacaccacctgtcaccctatactccccagctataacccagacttggactcagatcccttcggggaggatggtagcctctggtccttcaactacttcttctacaacaagcggctcaagcgaatcgtcttctttagctgccgttccatcagtggctccacctacacaccctcagaggcaggcaacgagctggacatggagctgggggaggaggaggtggaggaagaaagcagaagcgggggcagtggggccgaggagaccagcaccatggaggaggacaggtgtgtgatgggggccatgacccgggtccttgaagcctggagtgggtacaacagggtgggggcctcctctacttggtctaagtggtggctcctgaaggcccactgtgtgccaacctccgcccagggtcccagtgatctgtatttgatgaggaggagccgaggccccagcttcatccagcttcaaccaatgcctggacctgtccacctgagaggcccctggggcctccccagctgctggccagaccctggcgctgccacagtcctggcactgcccaaggccatacctgcctagccctttggctccatcctgtggatgcccactcacccctcagactcctgctgcccatgctgtggccggacttgtcagcagggggcctggtgggaggagcgactgccctgcccaaatgaactgccacagcagggacagctggaccgcagagtttatttttgtatttctactgggcctgcacactccagcccaaagggtctgtggccggaggccccacgagcaggccccagcagtcaccggctctggtcttgggccggccccggtgcccacctgtacccccacctcgcccatttggccgcgtgcactgagtgtcactttgctgcagctcgtttctttccaataaaagtttctgtgacttagtgtgg

SEQ ID NO: 5687 - protein, 376 aa, Homo sapiens
MKLLENSSFEAINSQLTVETGDAHIIGRIESYSCKMAGDDKHMFKQFCQEGQPHVLEALSPPQTSGLSPSRLSKSQGGEEEGPLSDKCSRKTLFYLIATLNESFRPDYDFSTARSHEFSREPSLSWVVNAVNCSLFSAVREDFKDLKPQLWNAVDEEICLAECDIYRWAGIPADGLQASRFVGHLAPHTTCHPILPSYNPDLDSDPFGEDGSLWSFNYFFYNKRLKRIVFFSCRSISGSTYTPSEAGNELDMELGEEEVEEESRSGGSGAEETSTMEEDRCVMGAMTRVLEAWSGYNRVGASSTWSKWWLLKAHCVPTSAQGPSDLYLMRRSRGPSFIQLQPMPGPVHLRGPWGLPSCWPDPGAATVLALPKAIPA

SEQ ID NO: 5688 - DNA, 1139 bp, Homo sapiens
gtgcagcctggacagaggccagactcagcttgcactttctccaccccagacttcaggactgagccccagcagactcagcaaaagccaaggcggtgaggaggagggccccctcagtgacaagtgcagccgcaagaccctcttctacctgattgccacgctcaatgagtccttcaggcctgactatgacttcagcacagcccgcagccatgagttcagccgggagcccagccttagctgggtggtgaatgcagtcaactgcagtctgttctcagctgtgcgggaggacttcaaggatctgaaaccacagctgtggaacgcggtggacgaggagatctgcctggctgaatgtgacatctacagctataacccagacttggactcagatcccttcggggaggatggtagcctctggtccttcaactacttcttctacaacaagcggctcaagcgaatcgtcttctttagctgccgttccatcagtggctccacctacacaccctcagaggcaggcaacgagctggacatggagctgggggaggaggaggtggaggaagaaagcagaagcgggggcagtggggccgaggagaccagcaccatggaggaggacagggtcccagtgatctgtatttgatgaggaggagccgaggccccagcttcatccagcttcaaccaatgcctggacctgtccacctgagaggcccctggggcctccccagctgctggccagaccctggcgctgccacagtcctggcactgcccaaggccatacctgcctagccctttggctccatcctgtggatgcccactcacccctcagactcctgctgcccatgctgtggccggacttgtcagcagggggcctggtgggaggagcgactgccctgcccaaatgaactgccacagcagggacagctggaccgcagagtttatttttgtatttctactgggcctgcacactccagcccaaagggtctgtggccggaggccccacgagcaggccccagcagtcaccggctctggtcttgggccggccccggtgcccacctgtacccccacctcgcccatttggccgcgtgcactgagtgtcactttgctgcagctcgtttctttccaataaaagtttctgtgacttagtgtgg

SEQ ID NO: 5689 - protein, 73 aa, Homo sapiens
MVASGPSTTSSTTSGSSESSSLAAVPSVAPPTHPQRQATSWTWSWGRRRWRKKAEAGAVGPRRPAPWRRTGSQ

SEQ ID NO: 5690 - DNA, 541 bp, Homo sapiens
gcagttctgccaggagggccagccccacgtgctggaggcactttctccaccccagattcatccagcttcaaccaatgcctggacctgtccacctgagaggcccctggggcctccccagctgctggccagaccctggcgctgccacagtcctggcactgcccaaggccatacctgcctagccctttggctccatcctgtggatgcccactcacccctcagactcctgctgcccatgctgtggccggacttgtcagcagggggcctggtgggaggagcgactgccctgcccaaatgaactgccacagcagggacagctggaccgcagagtttatttttgtatttctactgggcctgcacactccagcccaaagggtctgtggccggaggccccacgagcaggccccagcagtcaccggctctggtcttgggccggccccggtgcccacctgtacccccacctcgcccatttggccgcgtgcactgagtgtcactttgctgcagctcgtttctttccaataaaagtttctgtgacttagtgtgg

SEQ ID NO: 5691 - protein, 111 aa, Homo sapiens
MPTHPSDSCCPCCGRTCQQGAWWEERLPCPNELPQQGQLDRRVYFCISTGPAHSSPKGLWPEAPRAGPSSHRLWSWAGPGAHLYPHLAHLAACTECHFAAARFFPIKVSVT

SEQ ID NO: 5692 - DNA, 7119 bp, Homo sapiens
gggctctgggaccgcagttgctgaaatggaggcagaggtgtgggaggcagaaggctacaacctagttctggactcggacctgtatgatgcggatggctatgatgtcccagaccctgggctgctcaccgaaaagaatgagttgactttcacggagccgtcgcaggtcctgccctttttgaccagcagccaacagtggcaaagcctgaccccgcgcgcccgcgcccgccggctgtggctgcttctgcgcaccagcctccacgaagtcgtggaaaaggagaagagagccgagctgcgcgcggcgcgcctgacgcatgggctggaaccactgcgccgcctggaggtggcagccgggctgcgctcggtggcgcaggacccggtgggtggacgcttcgtggtgctggacggcgcgggccgcctgcacctgcacaaggaagacggctgggcacaggagacgctgctggcgcctgtccggcttacggggctggtgaccgtgctgggcccgctgggtgccgtgggccgttttgtaggctggggccccgcggggctggcaattctgaggcccaacctcagcctgctgtggctgagcgagcagggggtgggcagggccccgggttgggcgcccacctgctgcctgccggttcccgacctcaggctgctgctcgttgcggagatgaacagcagcctggcgctctggcagttccgttcaggtggtcgccgcctggtgctgcgagggtcagcactgcacccgcccccgagcccaacaggcaggctcatgcgtctggctgtggcgccggttcctccccaccacgtcctgcgctgcttcgcggcctatggctcggccgtgctcaccttcgatctgcatgcctggactctcgtagatgtgcgccgggatttgcacaaaaccaccatctcggacctggcttactgcgaggaagtagaggcaatggtgacagcttcccgggacagcaccgtgaaggtgtgggaggctgactggcagatccggatggtgttcgtgggccacacaggcccggtgacggctatgactgtgctcccgaacacgaccctggtgttgtcggcctcgcaggacgggacgctacgcacctgggacctgcaggcggcggcgcaggtgggcgaggtagcgctgggcttctggggccaggacaagctgtcccggcgcgtgggccgtctgctggcgccggtgcgcccgggctggccggtgctgtccctgtgcgcgagcagcatgcagctgtggcgcgtacgcgagctctactcgccgttggcgcaactgcccgccaaggtgctccacgtgcaggtggcgcccgcgttgcccgcgcctgcgcaccagtcgctgcctacgcgcctcgtgtgcgcgtgcgccgacggctcggtctacctcctgtcggcggccaccgggcgcatagtgagctcactgctgctggagccggaggactgcgcggcagccgtggcctactgcctgccgcgcgaggcgctgtggctgctgaccagggctgggcacctggtccgcgccaacgcggcgcgctgccccatgagcgtgctgcaccgcgtgtgcccgccgccgccccctgcgccgcagccttgctgtctgcacctgtacagccacctcacggatctcgaaggcgccttctcctcctgggagatcgtgcgccagcactggggcgagttgcgctgcagctctgtggcctgcgcctggaagaacaagaaccggtacctgccagtggtggggcacacggacggcacgctgtcggtgctggagtggctctcgtcgaagactgtcttccaaacggaggcgcacagcccgggcccggttgtcgccatcgcatccacctggaacagcattgtgtcttcgggtggggacctgacggtgaagatgtggcgcgtcttcccctatgccgaagagagcctgagcctgctgcgcaccttctcctgctgctacccggccgtggcgctctgtgcgctaggcagacgcgtcaccgcgggctttgaggacccagacagcgctacctacggcctggtgcagtttggcctgggcgacagtccgcgattagaccaccggccccaggacgaccccacggaccacatcactggcctgtgctgctgccccacgctcaaactgtatgcctgctccagcctggactgcaccgttcgcatctggactgctgagaaccgcctcctgcggctcctgcagctgaatggtgcccctcaggccctggctttctgcagcaacagtggagacctggtgctggcgctgggatcccgcctctgcctggtgtcccacaggctctacctgcctacatcctacctagttaagaagatgtgccggaaggccccagacgtggtggacgaccctccgctgccactgatgagccaggagtcactgacttccgcccaactgcagaggctcaccaacctccatggggcagccagcctcaggtcccatgcaggcctgctcagccctcctggaggccctcctttcccactctgggtgggggcctggcggtgtggggccctctggagttgatacaagcctgcctgagccctggcacacccgtttggggttggtccttgtcccagcctctgccccagcccactggcatgccacccagcatcccacctgtgcctgtccctgtttgcagcgaggccttgtctctcatccatcgtcggagggcaacatctcagcacctggtgccgaaggaggacttggacgccatagtggcccgggaccgagaccttcagcagttgaggctggggctagtggtcccagcagcccagcccccaccctcctggcagcagcgccaggaaggctttgacaattacctccgtctgatctacggctctggcctgctgggcatgcagtctggaagggggtcccagcagtggagtgccgggaccctcagagtggagagagagacccgggatgtgtgtgctgtaccccaagctgcccactgtcttgcccgggctgaggtcagcactgcagcccaaacagtgccaacagccctgtccccacaggacctgggagccctgggccagcacttctcccagtctccccgagtcacagtgccgatcccacccacccaccgtagggtgcacagcaaggcatcccagcttctggcccgctcctcactgagccactacctgggcatcagtctggatctgcagctgcagttggagcagctccgagggaggacgaccatggccctggacctgccatcctcccacttgcagtgcaggatcccactgctgccaaagagatgggacaaggaacctctctctagcctcaggggcttctttcctgccaccgtgcagccccacaagcactgcctgaggcccatctgcttccccggctatgtgcccaactccgcggtgctacagcagatgtggctaaatgcggagccaggggcaagccaggatgccctgtggttgtggcgccccaggccatcccaaacccagtggcagaggaagctgctccaatggatgggggagaagcctggggaggagggggaggaagacaagaaggaagaggaggaggagaaggaagacgaggagctggactgggccttggcttccctgagcccgcactccaaccagcagctggattcctgggaactggaggatcagagtgctgtggactggacccaggagccccggcggcgcagctgcaaggttgccaggacccaccctcatccctggcaccgtcatgggagtttgctcttggatgagcattacgggcatctgcccaagtttctgcatttcttcatctaccagacctggttcaaaaagttgttccccatcttcagcctgcaggcatacccggaggcgggcacgatcgagggcctggcctcgctgttggtggccctgctggagaagaccacgtgggtcgaccgtgtgcacatcctgcaggtgctactgagactgctgcccaacatgagcagtgatctccaaggccagctgcagggcctgctcgtacacttgctcaacctggaccagccccccagcctccaggaccagacacagaagaagttcgtgatactggcgctgcagctgctcctggcctgctccctggagtcccgggatgtggtgctggagctcatgtcctacttcctctactctcccgtgcactgccggccagagctcaagaagctgctgcacgggctgggccttcaggacccagagggcttcctattcaaggagatgatgacctgggtccagggcccagacctggactccaaggccggcctgcgcacttgctgccaccagaaactggaggacatgatccaggagcttcaggagaccccatcgcagacgtcagtggtctctggggcacccacacgcgcctccgtgataccctcgggcacctcctggtcggcctccggcatcttcgggaggctctcgcaggtctcagaggtgcctttgatggtggtctcacctgcggagccgcactctttagccccggagctccaggcccagcggatgctggcacccaagcgcagctgggggacccctcagctccgtctcagagtgctctccgagacgctgaagagcttctgcctggagcccgaggcccgcctgcaccctgccgggcctgctcagctgcccggagagccgccgccgctggaggagaccgactggtcgcactcgcagctgctggacttgggccccatcgacgcgctcaacttcttctgtgagcagctgcgggcgcagcagcggagttcgctccaggagaaggctgcgcacccacacccgccagagccctacacggtggcgccggtgcccgacatggtggtgccacctccgcgggagcactggtaccaccccatcctccggctgcaggaggccaagccgcagaggtccgcgaggtccgcgatgagactgaggggccccatgcggtcccggctctgtgcgggccgcaccctggacggccccatccggacgctgaagctgccgttgccgcgtgtggagccgcagcctttccccctggactggcctatgcccccgcgcccgctgcccccgcggctcctgcagccggccctgcagcgctactttctgccagcggacgcggaccctgacacctacagctgaccggactggtggcctcagcccgcctggctctggggcctgtcattggtatttggccaaggcctgcatcgggaataaagtccagagaatttctttctgcaggatgccgcctgctttggagggccccggggtgcgcacggcgtgtgggcgtgcggcctgaacccacagtggcggcggaaggcaggagccggaggcctggcggaggtggccatcgtgggcaccagcgttcccggaggggtggccggcctagggcagaggagacccatagcggggtaccatccgctgggcactgagcaaacgttttctgctcaagtactaggtgttgagatgcgggctgaccttagagaacgtgtcctgggccagcccacagcctggtgtggaggggagtccgggagggcctgggcggtcccaggatgagccttccgggtcgatgcaggtgagaccaggagtttgcagaccttgctttcgttacttttattctggcaaagagaagaattgacaaaggcaccaggagcttttttctgagcggcaacgcagagcatcctctgacccctttagcctgaaagtccctaggggaggggcttggtccggaagggctcggcctctgggccgggcccctctgccctgtgtggcctggcagggcgcaagacctgtgcacagagttcttggggcagctctggggggaatccccggcttttacacctgtcttttgtgttgtctgagcagtgatttccctcctgtatctgtagcctctgactttactagtttcttcttgatggctctggttagaatcgcttctccacaccttccctgtcaccccaaactgtgcggtggctcttgttatggggccaccaaatggctgctctttcccaggccggtgcttgacacagtggtgccaccatcccaagagcatgggtgcgcaggaccgtgcgggacagccaagttgctgggcccagctgaacctgcctcttcacctccaggcactaccgcatcctcccactgcagaaggccaaggttcacaggtgtgcgatgagactgaggactgagtctgtcactagaggacttgacactttttataaaaaaaatgagtaaacctagatacctcgatcagtgtctagcgatgtcaaggcccccagtttgggttcaagcctgctgggacagtcctgcagctgctgggtcacagagtggccaaggccctctgatttttggtcaggacacagaaagatagcagggggcagggggggatctgagggaccccacatgacttacaatcagacaaggtaggtcagaggatttctttatggctatctgttttgttttgttttgttttgttttgttttttgagatggagtttcagtcttgttgcccaggctggagtgcaatggcgtgatctcggctcactgcaacctctgcctcccggattcaagcaattctccttcctcagcctcctgagtagctgggattacaggcatgtgccaccacgcccagctaattttgtatttttagtagagatggggtttcatcacgttgaccaggctggtctcgaactcctgacctcaggtgatccgcctgcctcagcctctcaaagtgctgggattacaagcatgagccactgtgcccagccttctttatggctatctccaagacagcaaaggcaggggaaagtcctgccttggggagaaaaaggagggtgggaaaaggtcaaagagaaagatgctgttgtctgagtcttgcctctgaggcctaagttccccaacattataacaagggatatgggagttataagccaggaactgtggatggaaaccaatgacagatatcataatatcacacccacacatcaggcaagagacttgttccttaaaaattatctagtttagccgagcgtggtggctcacacctgtaatcccagctacttgggaggctgaggcaggagaatcacttgaacccaggaggtggaggttgcagcaagcagagatcacaccactgcactacagcctcggcaatagagcgagactctgtgtc

SEQ ID NO: 5693 - protein, 837 aa, Homo sapiens
MEAEVWEAEGYNLVLDSDLYDADGYDVPDPGLLTEKNELTFTEPSQVLPFLTSSQQWQSLTPRARARRLWLLLRTSLHEVVEKEKRAELRAARLTHGLEPLRRLEVAAGLRSVAQDPVGGRFVVLDGAGRLHLHKEDGWAQETLLAPVRLTGLVTVLGPLGAVGRFVGWGPAGLAILRPNLSLLWLSEQGVGRAPGWAPTCCLPVPDLRLLLVAEMNSSLALWQFRSGGRRLVLRGSALHPPPSPTGRLMRLAVAPVPPHHVLRCFAAYGSAVLTFDLHAWTLVDVRRDLHKTTISDLAYCEEVEAMVTASRDSTVKVWEADWQIRMVFVGHTGPVTAMTVLPNTTLVLSASQDGTLRTWDLQAAAQVGEVALGFWGQDKLSRRVGRLLAPVRPGWPVLSLCASSMQLWRVRELYSPLAQLPAKVLHVQVAPALPAPAHQSLPTRLVCACADGSVYLLSAATGRIVSSLLLEPEDCAAAVAYCLPREALWLLTRAGHLVRANAARCPMSVLHRVCPPPPPAPQPCCLHLYSHLTDLEGAFSSWEIVRQHWGELRCSSVACAWKNKNRYLPVVGHTDGTLSVLEWLSSKTVFQTEAHSPGPVVAIASTWNSIVSSGGDLTVKMWRVFPYAEESLSLLRTFSCCYPAVALCALGRRVTAGFEDPDSATYGLVQFGLGDSPRLDHRPQDDPTDHITGLCCCPTLKLYACSSLDCTVRIWTAENRLLRLLQLNGAPQALAFCSNSGDLVLALGSRLCLVSHRLYLPTSYLVKKMCRKAPDVVDDPPLPLMSQESLTSAQLQRLTNLHGAASLRSHAGLLSPPGGPPFPLWVGAWRCGALWS

SEQ ID NO: 5694 - DNA, 4718 bp, Homo sapiens
ctacctcctgtcggcggccaccgggcgcatagtgagctcactgctgctggagccggaggactgcgcggcagccgtggcctactgcctgccgcgcgaggcgctgtggctgctgaccagggctgggcacctggtccgcgccaacgcggcgcgctgccccatgagcgtgctgcaccgcgtgtgcccgccgccgccccctgcgccgcagccttgctgtctgcacctgtacagccacctcacggatctcgaaggcgccttctcctcctgggagatcgtgcgccagcactggggcgagttgcgctgcagctctgtggcctgcgcctggaagaacaagaaccggtacctgccagtggtggggcacacggacggcacgctgtcggtgctggagtggctctcgtcgaagactgtcttccaaacggaggcgcacagcccgggcccggttgtcgccatcgcatccacctggaacagcattgtgtcttcgggtcagtagctcccctgccaaaggccaggccgccacagagccccctcccctccgacaaggcccagccagattccgctgcccacaggtggggacctgacggtgaagatgtggcgcgtcttcccctatgccgaagagagcctgagcctgctgcgcaccttctcctgctgctacccggccgtggcgctctgtgcgctaggcagacgcgtcaccgcgggctttgaggacccagacagcgctacctacggcctggtgcagtttggcctgggcgacagtccgcgattagaccaccggccccaggacgaccccacggaccacatcactggtgagggggcagcatgggtgaagcccagccaccgcccagctccggttcctgaccctgaaccctgccgccaggcctgtgctgctgccccacgctcaaactgtatgcctgctccagcctggactgcaccgttcgcatctggactgctgagaaccgcctcctgcggctcctgcagctgaatggtgcccctcaggccctggctttctgcagcaacagtggagacctggtgctggcgctgggatcccgcctctgcctggtgtcccacaggctctacctgcctacatcctacctagttaagaagatgtgccggaaggccccagacgtggtggacgaccctccgctgccactgatgagccaggagtcactgacttccgcccaactgcagaggctcaccaacctccatggggcagccagcctcaggtcccatgcaggcctgctcagccctcctggaggccctcctttcccactctgggtgggggcctggcggtgtggggccctctggagttgatacaagcctgcctgagccctggcacacccgtttggggttggtccttgtcccagcctctgccccagcccactggcatgccacccagcatcccacctgtgcctgtccctgtttgcagcgaggccttgtctctcatccatcgtcggagggcaacatctcagcacctggtgccgaaggaggtggggtgggtcctccttagcccgccctgccccggctcaggccccagccgtcagccctggggcaggcctgggatccccatggttgcccgggcagcacatagcaaggctcaaggaagagcaggctgatccctgaaccctgactcaggacttggacgccatagtggcccgggaccgagaccttcagcagttgaggctggggctagtggtcccagcagcccagcccccaccctcctggcagcagcgccaggaaggctttgacaattacctccgtctgatctacggctctggcctgctgggcatgcagtctggaagggggtcccagcagtggagtgccgggaccctcagagtggagagagagacccgggatgtgtgtgctgtaccccaagctgcccactgtcttgcccgggctgaggtcagcactgcagcccaaacagtgccaacagccctgtccccacaggacctgggagccctgggccagcacttctcccagtctccccgagtcacagtgccgatcccacccacccaccgtagggtgcacagcaaggcatcccagatcccactgctgccaaagagatgggacaaggaacctctctctagcctcaggggcttctttcctgccaccgtgcagccccacaagcactgcctgaggcccatctgcttccccggctatgtgcccaactccgcggtgctacagcagatgtggctaaatgcggaggtcagcagcctcggatccccgactcagctcgcctcccagagaaagctcgaggcaaggggcagggctgggggttttgccggcaggggagggctctgctgtccttgcaacccatcaggcaccatctcttgcccctctgcagccaggggcaagccaggatgccctgtggttgtggcgccccaggccatcccaaacccagtggcagaggaagctgctccaatggatgggggagaagcctggggaggagggggaggaagacaagaaggaagaggaggaggagaaggaagacgaggagctggactgggccttggcttccctgagcccgcactccaaccagcagctggattcctgggaactggaggatcagagtgctgtggactggacccaggagccccggcggcgcagctgcaaggttgccaggacccaccctcatccctggcaccgtcatgggagtttgctcttggatgagcattacgggcatctgcccaagtttctgcatttcttcatctaccagacctggttcaaaaagttgttccccatcttcagcctgcaggttggagggaactggggatgcatgagaagcatgggttagggtgagggacaggggagaaggtaggggctggcttgggtgtgacatgggagcagggcctcagcatgctaccctgcaggcatacccggaggcgggcacgatcgagggcctggcctcgctgttggtggccctgctggagaagaccacgtgggtcgaccgtgtgcacatcctgcaggtgctactgagactgctgcccaacatgagcagtgatctccaaggccagctgcagggcctgctcgtacacttgctcaacctggaccagccccccagcctccaggtgtgccccttgtcctgcccccagttttcctccccgcccaccggccctcagcaaccacatccccaccgcctgcctcaggaccagacacagaagaagttcgtgatactggcgctgcagctgctcctggcctgctccctggagtcccgggatgtggtgctggagctcatgtcctacttcctctactctcccgtgcactgccggccagagctcaagaagctgctgcacgggctgggccttcaggacccagagggcttcctattcaaggagatgatgacctgggtccagggcccagacctggactccaaggccggcctgcgcacttgctgccaccagaaactggaggacatgatccaggagcttcaggagaccccatcgcagacgtcagtggtctctggggcacccacacgcgcctccgtgataccctcgggcacctcctggtcggcctccggcatcttcgggaggctctcgcaggtctcagaggtgcctttgatggtggtctcacctgcggagccgcactctttagccccggagctccaggcccagcggatgctggcacccaagcgcagctgggggacccctcagctccgtctcagagtgctctccgagacgctgaagagcttctgcctggagcccgaggcccgcctgcaccctgccgggcctgctcagctgcccggagagccgccgccgctggaggagaccgactggtcgcactcgcagctgctggacttgggccccatcgacgcgctcaacttcttctgtgagcagctgcgggcgcagcagcggagttcgctccaggagaaggctgcgcacccacacccgccagagccctacacggtggcgccggtgcccgacatggtggtgccacctccgcgggagcactggtaccaccccatcctccggctgcaggaggccaagccgcagaggtccgcgaggtccgcgatgagactgaggggccccatgcggtcccggctctgtgcgggccgcaccctggacggccccatccggacgctgaagctgccgttgccgcgtgtggagccgcagcctttccccctggactggcctatgcccccgcgcccgctgcccccgcggctcctgcagccggccctgcagcgctactttctgccagcggacgcggaccctgacacctacagctgaccggactggtggcctcagcccgcctggctctggggcctgtcattggtatttggccaaggcctgcatcgggaataaagtccagagaatttctttctgcaggatgccgcctgctttggagggccccggggtgcgcacggcgtgtgggcgtgcggcctgaacccacagtggcggcggaaggcaggagccggaggcctggcggaggtggccatcgtgggcaccagcgttcccggaggggtggccggcctagggcagaggagacccatagcggggtaccatccgctgggcactgagcaaacgttttctgctcaagtactaggtgttgagatgcgggctgaccttagagaacgtgtcctgggccagcccacagcctggtgtggaggggagtccgggagggcctgggcggtcccaggatgagccttccgggtcgatgcaggtgagaccaggagtttgcagaccttgctttcgttacttttattctggcaaagagaagaattgacaaaggca

SEQ ID NO: 5695 - protein, 461 aa, Homo sapiens
MGAGPQHATLQAYPEAGTIEGLASLLVALLEKTTWVDRVHILQVLLRLLPNMSSDLQGQLQGLLVHLLNLDQPPSLQVCPLSCPQFSSPPTGPQQPHPHRLPQDQTQKKFVILALQLLLACSLESRDVVLELMSYFLYSPVHCRPELKKLLHGLGLQDPEGFLFKEMMTWVQGPDLDSKAGLRTCCHQKLEDMIQELQETPSQTSVVSGAPTRASVIPSGTSWSASGIFGRLSQVSEVPLMVVSPAEPHSLAPELQAQRMLAPKRSWGTPQLRLRVLSETLKSFCLEPEARLHPAGPAQLPGEPPPLEETDWSHSQLLDLGPIDALNFFCEQLRAQQRSSLQEKAAHPHPPEPYTVAPVPDMVVPPPREHWYHPILRLQEAKPQRSARSAMRLRGPMRSRLCAGRTLDGPIRTLKLPLPRVEPQPFPLDWPMPPRPLPPRLLQPALQRYFLPADADPDTYS

SEQ ID NO: 5696 - DNA, 4906 bp, Homo sapiens
atagtgagctcactgctgctggagccggaggactgcgcggcagccgtggcctactgcctgccgcgcgaggcgctgtggctgctgaccagggctgggcacctggtccgcgccaacgcggcgcgctgccccatgagcgtgctgcaccgcgtgtgcccgccgccgccccctgcgccgcagccttgctgtctgcacctgtacagccacctcacggatctcgaaggcgccttctcctcctgggagatcgtgcgccagcactggggcgagttgcgctgcagctctgtggcctgcgcctggaagaacaagaaccggtgggtgcgggagccggcgagggtctggcgggcggaaggagcggcagggtccgcgccaacaggctcttcccactcgcaggtacctgccagtggtggggcacacggacggcacgctgtcggtgctggagtggctctcgtcgaagactgtcttccaaacggaggcgcacagcccgggcccggttgtcgccatcgcatccacctggaacagcattgtgtcttcgggtcagtagctcccctgccaaaggccaggccgccacagagccccctcccctccgacaaggcccagccagattccgctgcccacaggtggggacctgacggtgaagatgtggcgcgtcttcccctatgccgaagagagcctgagcctgctgcgcaccttctcctgctgctacccggccgtggcgctctgtgcgctaggcagacgcgtcaccgcgggctttgaggacccagacagcgctacctacggcctggtgcagtttggcctgggcgacagtccgcgattagaccaccggccccaggacgaccccacggaccacatcactggtgagggggcagcatgggtgaagcccagccaccgcccagctccggttcctgaccctgaaccctgccgccaggcctgtgctgctgccccacgctcaaactgtatgcctgctccagcctggactgcaccgttcgcatctggactgctgagaaccgcctcctgcggtaggctaggaggtggggagggctggggtctcctacctctgctcctcaccagagcccactggctggactgagtggagaaggccttgtccctgctgagcctcggctgccctgggtgcctctccaggctcctgcagctgaatggtgcccctcaggccctggctttctgcagcaacagtggagacctggtgctggcgctgggatcccgcctctgcctggtgtcccacaggctctacctgcctacatcctacctagttaaggtgtgtggtgaggacagagtgagcaaggtgggccccccttgctcaccttggggggcagacccaggttcccccagccagggatacaggctccttcccctattcagaagatgtgccggaaggccccagacgtggtggacgaccctccgctgccactgatgagccaggagtcactgacttccgcccaactgcagaggctcaccaacctccatggggcagccagcctcaggtcccatgcaggcctgctcagccctcctggaggccctcctttcccactctgggtgggggcctggcggtgtggggccctctggagttgatacaagcctgcctgagccctggcacacccgtttggggttggtccttgtcccagcctctgccccagcccactggcatgccacccagcatcccacctgtgcctgtccctgtttgcagcgaggccttgtctctcatccatcgtcggagggcaacatctcagcacctggtgccgaaggaggtggggtgggtcctccttagcccgccctgccccggctcaggccccagccgtcagccctggggcaggcctgggatccccatggttgcccgggcagcacatagcaaggctcaaggaagagcaggctgatccctgaaccctgactcaggacttggacgccatagtggcccgggaccgagaccttcagcagttgaggctggggctagtggtcccagcagcccagcccccaccctcctggcagcagcgccaggaaggctttgacaattacctccgtctgatctacggctctggcctgctgggcatgcagtctggaagggggtcccagcagtggagtgccgggaccctcagagtggagagagagacccgggatgtgtgtgctgtaccccaagctgcccactgtcttgcccgggctgaggtcagcactgcagcccaaacagtgccaacagccctgtccccacaggacctgggagccctgggccagcacttctcccagtctccccgagtcacagtgccgatcccacccacccaccgtagggtgcacagcaaggcatcccagcttctggcccgctcctcactgagccactacctgggcatcagtctggatctgcagctgcagttggagcagctccgagggaggacgaccatggccctggacctgccatcctcccacttgcagtgcaggatcccactgctgccaaagagatgggacaaggaacctctctctagcctcaggggcttctttcctgccaccgtgcagccccacaagccaggggcaagccaggatgccctgtggttgtggcgccccaggccatcccaaacccagtggcagaggaagctgctccaatggatgggggagaagcctggggaggagggggaggaagacaagaaggaagaggaggaggagaaggaagacgaggagctggactgggccttggcttccctgagcccgcactccaaccagcagctggattcctgggaactggaggatcagagtgctgtggactggacccaggagccccggcggcgcagctgcaaggttgccaggacccaccctcatccctggcaccgtcatgggagtttgctcttggatgagcattacgggcatctgcccaagtttctgcatttcttcatctaccagacctggttcaaaaagttgttccccatcttcagcctgcaggttggagggaactggggatgcatgagaagcatgggttagggtgagggacaggggagaaggtaggggctggcttgggtgtgacatgggagcagggcctcagcatgctaccctgcaggcatacccggaggcgggcacgatcgagggcctggcctcgctgttggtggccctgctggagaagaccacgtgggtcgaccgtgtgcacatcctgcaggtgctactgagactgctgcccaacatgagcagtgatctccaaggccagctgcagggcctgctcgtacacttgctcaacctggaccagccccccagcctccaggtgtgccccttgtcctgcccccagttttcctccccgcccaccggccctcagcaaccacatccccaccgcctgcctcaggaccagacacagaagaagttcgtgatactggcgctgcagctgctcctggcctgctccctggagtcccgggatgtggtgctggagctcatgtcctacttcctctactctcccgtgcactgccggccagagctcaagaagctgctgcacgggctgggccttcaggacccagagggcttcctattcaaggagatgatgacctgggtccagggcccagacctggactccaaggccggcctgcgcacttgctgccaccagaaactggaggacatgatccaggagcttcaggagaccccatcgcagacgtcagtggtctctggggcacccacacgcgcctccgtgataccctcgggcacctcctggtcggcctccggcatcttcgggaggctctcgcaggtctcagaggtgcctttgatggtggtctcacctgcggagccgcactctttagccccggagctccaggcccagcggatgctggcacccaagcgcagctgggggacccctcagctccgtctcagagtgctctccgagacgctgaagagcttctgcctggagcccgaggcccgcctgcaccctgccgggcctgctcagctgcccggagagccgccgccgctggaggagaccgactggtcgcactcgcagctgctggacttgggccccatcgacgcgctcaacttcttctgtgagcagctgcgggcgcagcagcggagttcgctccaggagaaggctgcgcacccacacccgccagagccctacacggtggcgccggtgcccgacatggtggtgccacctccgcgggagcactggtaccaccccatcctccggctgcaggaggccaagccgcagaggtccgcgaggtccgcgatgagactgaggggccccatgcggtcccggctctgtgcgggccgcaccctggacggccccatccggacgctgaagctgccgttgccgcgtgtggagccgcagcctttccccctggactggcctatgcccccgcgcccgctgcccccgcggctcctgcagccggccctgcagcgctactttctgccagcggacgcggaccctgacacctacagctgaccggactggtggcctcagcccgcctggctctggggcctgtcattggtatttggccaaggcctgcatcgggaataaagtccagagaatttctttctgcaggatgccgcctgctttggagggccccggggtgcgcacggcgtgtgggcgtgcggcctgaacccacagtggcggcggaaggcaggagccggaggcctggcggaggtggccatcgtgggcaccagcgttcccggaggggtggccggcctagggcagaggagacccatagcggggtaccatccgctgggcactgagcaaacgttttctgctcaagtactaggtgttgagatgcgggctgaccttagagaacgtgtcctgggccagcccacagcctggtgtggaggggagtccgggagggcctgggcggtcccaggatgagccttccgggtcgatgcaggtgagaccaggagtttgcagaccttgctttcgttacttttattctggcaaagagaagaattgacaaaggca

SEQ ID NO: 5697 - protein, 461 aa, Homo sapiens; identical to SEQ ID NO: 5695

SEQ ID NO: 5698 - DNA, 1044 bp, Homo sapiens
atgccacccagcatcccacctgtgcctgtccctgtttgcagcgaggccttgtctctcatccatcgtcggagggcaacatctcagcacctggtgccgaaggaggacttggacgccatagtggcccgggaccgagaccttcagcagttgaggctggggctagtggtcccagcagcccagcccccaccctcctggcagcagcgccaggaaggctttgacaattacctccgtctgatctacggctctggcctgctggacctgggagccctgggccagcacttctcccagtctccccgagtcacagtgccgatcccacccacccaccgtagggtgcacagcaaggcatcccagcttctggcccgctcctcactgagccactacctgggcatcagtctggatctgcagctgcagttggagcagctccgagggaggacgaccatggccctggacctgccatcctcccacttgcagtgcaggatcccactgctgccaaagagatgggacaaggaacctctctctagcctcaggggcttctttcctgccaccgtgcagccccacaagccctgttccagtacagctgtgtttgtggccacaggctccttgctgctctgggagctgacatcaggcaaagccagtccccccagccggttatgccacacacccctttcccccgtggaggcgctgggagggcagcactgcctgaggcccatctgcttccccggctatgtgcccaactccgcggtgctacagcagatgtggctaaatgcggaggtcagcagcctcggatccccgactcagctcgcctcccagagaaagctcgagagtgctgtggactggacccaggagccccggcggcgcagctgcaaggttgccaggacccaccctcatccctggcaccgtcatgggagtttgctcttggatgagcattacgggcatctgcccaagtttctgcatttcttcatctaccagacctggttcaaaaagttgttccccatcttcagcctgcaggttggagggaactggggatgcatgagaagcatgggttag

SEQ ID NO: 5699 - protein, 347 aa, Homo sapiens
MPPSIPPVPVPVCSEALSLIHRRRATSQHLVPKEDLDAIVARDRDLQQLRLGLVVPAAQPPPSWQQRQEGFDNYLRLIYGSGLLDLGALGQHFSQSPRVTVPIPPTHRRVHSKASQLLARSSLSHYLGISLDLQLQLEQLRGRTTMALDLPSSHLQCRIPLLPKRWDKEPLSSLRGFFPATVQPHKPCSSTAVFVATGSLLLWELTSGKASPPSRLCHTPLSPVEALGGQHCLRPICFPGYVPNSAVLQQMWLNAEVSSLGSPTQLASQRKLESAVDWTQEPRRRSCKVARTHPHPWHRHGSLLLDEHYGHLPKFLHFFIYQTWFKKLFPIFSLQVGGNWGCMRSMG

SEQ ID NO: 5700 - DNA, 3079 bp, Homo sapiens
gggacaaggaacctctctctagcctcaggggcttctttcctgccaccgtgcagccccacaaggtgagaccccctcccagctcctggagagccactcctctccaggcatcactcttgtgcctgccatctcccctttgctacaaatctttgtgtccaaatctgacccaagggccatgcccacctacaaccagagggccaggctgtagcctcccacgcacccctcacccctcacccttcaccctctgtctagccctgttccagtacagctgtgtttgtggccacaggctccttgctgctctgggagctgacatcaggcaaagccagtccccccagccggttatgccacacacccctttcccccgtggaggcgctgggagggcaggtcccctagggacttttcctggaagatcagaatccctgccctttagaggagcaaagtcaagggaacctggccctttagaatccactgtcttcccaccctcacgtacaccaggtgcccaggcaggcctcagcccctcccccagcatattcctggcactgtcacctgcccaggtgggtaattgactctttgggcctgggtgccaccatcatgctcttcattgccctttctccaagctccttccttcctccctggcccctgtgcttcttttagactttcttgtcccagggctggggccaagtcctgtaaggagcttgcagggtgtcagggcccctagaagccagcacttctccaggtttcccttctcgtttgtcagagctgatgctcactgagggcctcgcccctggtatctcagggttctcctgccatctgtgttgagagtaggggttgctagctcagccagctctcggaggcctggcaggcagagctggactggcggctgaggggctctgagaggttatacaggtgaccaagggtggtgtccaggctggggaatccaggtcctcagcattccctgctgtgcccacctccagcactgcctgaggcccatctgcttccccggctatgtgcccaactccgcggtgctacagcagatgtggctaaatgcggaggtcagcagcctcggatccccgactcagctcgcctcccagagaaagctcgaggcaaggggcagggctgggggttttgccggcaggggagggctctgctgtccttgcaacccatcaggcaccatctcttgcccctctgcagccaggggcaagccaggatgccctgtggttgtggcgccccaggccatcccaaacccagtggcagaggaagctgctccaatggatgggggagaagcctggggaggagggggaggaagacaagaaggaagaggaggaggagaaggaagacgaggagctggactgggccttggcttccctgagcccgcactccaaccagcagctggattcctgggaactggaggatcagagtgctgtggactggacccaggagccccggcggcgcagctgcaaggttgccaggacccaccctcatccctggcaccgtcatgggagtttgctcttggatgagcattacgggcatctgcccaagtttctgcatttcttcatctaccagacctggttcaaaaagttgttccccatcttcagcctgcaggttggagggaactggggatgcatgagaagcatgggttagggtgagggacaggggagaaggtaggggctggcttgggtgtgacatgggagcagggcctcagcatgctaccctgcaggcatacccggaggcgggcacgatcgagggcctggcctcgctgttggtggccctgctggagaagaccacgtgggtcgaccgtgtgcacatcctgcaggtgctactgagactgctgcccaacatgagcagtgatctccaaggccagctgcagggcctgctcgtacacttgctcaacctggaccagccccccagcctccaggaccagacacagaagaagttcgtgatactggcgctgcagctgctcctggcctgctccctggagtcccgggatgtggtgctggagctcatgtcctacttcctctactctcccgtgcactgccggccagagctcaagaagctgctgcacgggctgggccttcaggacccagagggcttcctattcaaggagatgatgacctgggtccagggcccagacctggactccaaggccggcctgcgcacttgctgccaccagaaactggaggacatgatccaggagcttcaggagaccccatcgcagacgtcagtggtctctggggcacccacacgcgcctccgtgataccctcgggcacctcctggtcggcctccggcatcttcgggaggctctcgcaggtctcagaggtgcctttgatggtggtctcacctgcggagccgcactctttagccccggagctccaggcccagcggatgctggcacccaagcgcagctgggggacccctcagctccgtctcagagtgctctccgagacgctgaagagcttctgcctggagcccgaggcccgcctgcaccctgccgggcctgctcagctgcccggagagccgccgccgctggaggagaccgactggtcgcactcgcagctgctggacttgggccccatcgacgcgctcaacttcttctgtgagcagctgcgggcgcagcagcggagttcgctccaggagaaggctgcgcacccacacccgccagagccctacacggtggcgccggtgcccgacatggtggtgccacctccgcgggagcactggtaccaccccatcctccggctgcaggaggccaagccgcagaggtccgcgaggtccgcgatgagactgaggggccccatgcggtcccggctctgtgcgggccgcaccctggacggccccatccggacgctgaagctgccgttgccgcgtgtggagccgcagcctttccccctggactggcctatgcccccgcgcccgctgcccccgcggctcctgcagccggccctgcagcgctactttctgccagcggacgcggaccctgacacctacagctgaccggactggtggcctcagcccgcctggctctggggcctgtcattggtatttggccaaggcctgcatcgggaataaagtccagagaatttc

SEQ ID NO: 5701 - protein, 435 aa, Homo sapiens
MGAGPQHATLQAYPEAGTIEGLASLLVALLEKTTWVDRVHILQVLLRLLPNMSSDLQGQLQGLLVHLLNLDQPPSLQDQTQKKFVILALQLLLACSLESRDVVLELMSYFLYSPVHCRPELKKLLHGLGLQDPEGFLFKEMMTWVQGPDLDSKAGLRTCCHQKLEDMIQELQETPSQTSVVSGAPTRASVIPSGTSWSASGIFGRLSQVSEVPLMVVSPAEPHSLAPELQAQRMLAPKRSWGTPQLRLRVLSETLKSFCLEPEARLHPAGPAQLPGEPPPLEETDWSHSQLLDLGPIDALNFFCEQLRAQQRSSLQEKAAHPHPPEPYTVAPVPDMVVPPPREHWYHPILRLQEAKPQRSARSAMRLRGPMRSRLCAGRTLDGPIRTLKLPLPRVEPQPFPLDWPMPPRPLPPRLLQPALQRYFLPADADPDTYS

SEQ ID NO: 5702 - DNA, 743 bp, Homo sapiens
gggccacacagcggacccctaagcggaccgctggcaccggtcgggtggcagcagagtgtcgctcgacatgggggaggccggggctggcgctggcgcctcgggagggccggaggcaagcccggaggcagaggtggtgaagctgctgcccttcctggcgccgggcgcgcgggcggacctgcaggcggcggcggtgcggcacgtgctggcgctgactggctgcggacccggccgcgcgctgttggcggggcaggcggcgctgctgcaggcgctgatggagctggcgccggcctctgccccggcccgggacgccgcccgcgcgctcgtgaacttggccgccgaccccggcctgcacgagacattgctggcggccgaccccgggctgccagcgcgcctgatgggccgcgcgttggacccgcagtggccctgggccgaggaggcggccgccgcgctagccaacctcagtcgcgagccggcgccgtgtgcagcgctcatggcggcgctggcggccgcggagccggcagactcgggcctggagcggctggtgcgcgcgctgtgcacgcccggctacaacgcccgcgcgcccctgcactacctagcgccgctgctctccaacctcagccaacgccctgcggcgcgggccttcctactggaccccgacaggacatcacgagtggttgcttggacctgaggtggacattctcccctttttgctcctgcccttggctgggcctgaggatttctcc

SEQ ID NO: 5703 - protein, 206 aa, Homo sapiens
MGEAGAGAGASGGPEASPEAEVVKLLPFLAPGARADLQAAAVRHVLALTGCGPGRALLAGQAALLQALMELAPASAPARDAARALVNLAADPGLHETLLAADPGLPARLMGRALDPQWPWAEEAAAALANLSREPAPCAALMAALAAAEPADSGLERLVRALCTPGYNARAPLHYLAPLLSNLSQRPAARAFLLDPDRTSRVVAWT

SEQ ID NO: 5704 - DNA, 2408 bp, Homo sapiens
gggccacacagcggacccctaagcggaccgctggcaccggtcgggtggcagcagagtgtcgctcgacatgggggaggccggggctggcgctggcgcctcgggagggccggaggcaagcccggaggcagaggtggtgaagctgctgcccttcctggcgccgggcgcgcgggcggacctgcaggcggcggcggtgcggcacgtgctggcgctgactggctgcggacccggccgcgcgctgttggcggggcaggcggcgctgctgcaggcgctgatggagctggcgccggcctctgccccggcccgggacgccgcccgcgcgctcgtgaacttggccgccgaccccggcctgcacgagacattgctggcggccgaccccgggctgccagcgcgcctgatgggccgcgcgttggacccgcagtggccctgggccgaggaggcggccgccgcgctagccaacctcagtcgcgagccggcgccgtgtgcagcgctcatggcggcgctggcggccgcggagccggcagactcgggcctggagcggctggtgcgcgcgctgtgcacgcccggctacaacgcccgcgcgcccctgcactacctagcgccgctgctctccaacctcagccaacgccctgcggcgcgggccttcctactggaccccgacaggtgcgtggtccagcggctgctgccccttacccagtaccccgactcctctgtacgcaggggcggggtggtggggacgctgcggaattgctgcttcgagcaccgacatcacgagtggttgcttggacctgaggtggacattctcccctttttgctcctgcccttggctgggcctgaggatttctccgaggaagagatggaacggctgcctgtcgacttgcagtacctgccaccagacaagcagcgagaacctgatgcagacatccgcaagatgcttgttgaagccatcatgctgctgacagccacagcaccaggtcggcagcaggtgcgggaccagggagcctacctgatccttcgagagctgcacagctgggagccggagcccgacgtgcggacggcttgtgagaagctcatccaggtgcttattggggacgagcctgaacgtggcatggaaaacctgctggaggtgcaggtgcctgaggatgtggagcagcagctgcagcagctggattgcagggagcaggagcagttggagcgggagctggccccagagccatgggtggagagggccacacccacctgaggcccctgcagccggacaccagctccagggtcccctttgccaggctttctcagaccaggccttcctgcagctgtctgcaggccccctgggtccccttgttcagagactgtgctcttctgagaagcagagctacgcttaggctccagtaaggattggaggcactttccagccctgtgcagtgttgctaccagcaagaatgaaggttgtgcagagcagtactgtgaggtaggcaccgtgactcggctgcctgtgcagaaggtggaggtggcaggcggatggccagggagccatgagaagactcttcctgggcacggcgtggggactggacagaaaaccactgcaagccccaaggagccagctgaagcctcccaatccccagggcactgcagagtctgggcagaggtgggcgcataggtacaagtgctgctttgtcagcctcactccctgcagctctcagctccctgttccctgagacctggcctcaaagggctgacccagccatacgtagatcctggggtctttctaggactgtgcctccctgcttgacctatgctccaggaccctgccctcaacccttgtcagctccctaagtcttcctgtttcccagtctcagattgagtgggtgctctcattggcctctctagctaggccgtctccctggtcagcttccttgagcctgggccactcctccctggccttcttacctctgccaagagcctccagatgtgcctgcagcctagtccctgcccaagcttctcccccagccaccctctgcccctgtggtagagcccactataggcccaggcgccttacgtgcttctcccctggacctatgtgcatccctcacctgccagttatgtggctgccaagccccacaggctgtcatggtggctcttgccacacttcccttcctgagctgacctgacctcactgccacctcttgcattgggatcctgagggctggcccctgctcactgatgggccctcccaggcccgtcaagccctggtgaaggagcttagcttgtcttcttggcaattcacaatgcctcactccacaccctaaaactggagcgtcccctatggtctcctgctgtggcttgggtgccgggcgtctcccgcctccaggatctcctctcacctgcccccattaaagctctgccactcatgc

SEQ ID NO: 5705 - protein, 390 aa, Homo sapiens; identical to SEQ ID NO: 781

SEQ ID NO: 5706 - DNA, 2263 bp, Homo sapiens
gggccacacagcggacccctaagcggaccgctggcaccggtcgggtggcagcagagtgtcgctcgacatgggggaggccggggctggcgctggcgcctcgggagggccggaggcaagcccggaggcagaggtggtgaagctgctgcccttcctggcgccgggcgcgcgggcggacctgcaggcggcggcggtgcggcacgtgctggcgctgactggctgcggacccggccgcgcgctgttggcggggcagactcgggcctggagcggctggtgcgcgcgctgtgcacgcccggctacaacgcccgcgcgcccctgcactacctagcgccgctgctctccaacctcagccaacgccctgcggcgcgggccttcctactggaccccgacaggtgcgtggtccagcggctgctgccccttacccagtaccccgactcctctgtacgcaggggcggggtggtggggacgctgcggaattgctgcttcgagcaccgacatcacgagtggttgcttggacctgaggtggacattctcccctttttgctcctgcccttggctgggcctgaggatttctccgaggaagagatggaacggctgcctgtcgacttgcagtacctgccaccagacaagcagcgagaacctgatgcagacatccgcaagatgcttgttgaagccatcatgctgctgacagccacagcaccaggtcggcagcaggtgcgggaccagggagcctacctgatccttcgagagctgcacagctgggagccggagcccgacgtgcggacggcttgtgagaagctcatccaggtgcttattggggacgagcctgaacgtggcatggaaaacctgctggaggtgcaggtgcctgaggatgtggagcagcagctgcagcagctggattgcagggagcaggagcagttggagcgggagctggccccagagccatgggtggagagggccacacccacctgaggcccctgcagccggacaccagctccagggtcccctttgccaggctttctcagaccaggccttcctgcagctgtctgcaggccccctgggtccccttgttcagagactgtgctcttctgagaagcagagctacgcttaggctccagtaaggattggaggcactttccagccctgtgcagtgttgctaccagcaagaatgaaggttgtgcagagcagtactgtgaggtaggcaccgtgactcggctgcctgtgcagaaggtggaggtggcaggcggatggccagggagccatgagaagactcttcctgggcacggcgtggggactggacagaaaaccactgcaagccccaaggagccagctgaagcctcccaatccccagggcactgcagagtctgggcagaggtgggcgcataggtacaagtgctgctttgtcagcctcactccctgcagctctcagctccctgttccctgagacctggcctcaaagggctgacccagccatacgtagatcctggggtctttctaggactgtgcctccctgcttgacctatgctccaggaccctgccctcaacccttgtcagctccctaagtcttcctgtttcccagtctcagattgagtgggtgctctcattggcctctctagctaggccgtctccctggtcagcttccttgagcctgggccactcctccctggccttcttacctctgccaagagcctccagatgtgcctgcagcctagtccctgcccaagcttctcccccagccaccctctgcccctgtggtagagcccactataggcccaggcgccttacgtgcttctcccctggacctatgtgcatccctcacctgccagttatgtggctgccaagccccacaggctgtcatggtggctcttgccacacttcccttcctgagctgacctgacctcactgccacctcttgcattgggatcctgagggctggcccctgctcactgatgggccctcccaggcccgtcaagccctggtgaaggagcttagcttgtcttcttggcaattcacaatgcctcactccacaccctaaaactggagcgtcccctatggtctcctgctgtggcttgggtgccgggcgtctcccgcctccaggatctcctctcacctgcccccattaaagctctgccactcatgcaggcatgtgtggaccatgttttcccctggccagagcccccacctgccactggaggccagttgccctcttagcactcagacatcagcactgtcttcacagaataaatgctttatctggccttgcccc

SEQ ID NO: 5707 - protein, 128 aa, Homo sapiens
MERLPVDLQYLPPDKQREPDADIRKMLVEAIMLLTATAPGRQQVRDQGAYLILRELHSWEPEPDVRTACEKLIQVLIGDEPERGMENLLEVQVPEDVEQQLQQLDCREQEQLERELAPEPWVERATPT

SEQ ID NO: 5708 - DNA, 1746 bp, Homo sapiens
aacgtgagtggctagtgtggagcctcagagttggccggagaggagggaggccagtggagggagagagaggtgtccaggccacaggctcctgaaactttgcagcagtgagttgctgagcacaggtgggacttacacaggcagagcctggctcagctgcccagcccagggacacagtggctcccacacactcacccctagggctgcctgtcgacttgcagtacctgccaccagacaagcagcgagaacctgatgcagacatccgcaagatgcttgttgaagccatcatgctgctgacagccacagcaccaggtcggcagcaggtgcgggaccagggagcctacctgatccttcgagagctgcacagctgggagccggagcccgacgtgcggacggcttgtgagaagctcatccaggtgcttattggggacgagcctgaacgtggcatggaaaacctgctggaggtgcaggtgcctgaggatgtggagcagcagctgcagcagctggattgcagggagcaggagcagttggagcgggagctggccccagagccatgggtggagagggccacacccacctgaggcccctgcagccggacaccagctccagggtcccctttgccaggctttctcagaccaggccttcctgcagctgtctgcaggccccctgggtccccttgttcagagactgtgctcttctgagaagcagagctacgcttaggctccagtaaggattggaggcactttccagccctgtgcagtgttgctaccagcaagaatgaaggttgtgcagagcagtactgtgaggtaggcaccgtgactcggctgcctgtgcagaaggtggaggtggcaggcggatggccagggagccatgagaagactcttcctgggcacggcgtggggactggacagaaaaccactgcaagccccaaggagccagctgaagcctcccaatccccagggcactgcagagtctgggcagaggtgggcgcataggtacaagtgctgctttgtcagcctcactccctgcagctctcagctccctgttccctgagacctggcctcaaagggctgacccagccatacgtagatcctggggtctttctaggactgtgcctccctgcttgacctatgctccaggaccctgccctcaacccttgtcagctccctaagtcttcctgtttcccagtctcagattgagtgggtgctctcattggcctctctagctaggccgtctccctggtcagcttccttgagcctgggccactcctccctggccttcttacctctgccaagagcctccagatgtgcctgcagcctagtccctgcccaagcttctcccccagccaccctctgcccctgtggtagagcccactataggcccaggcgccttacgtgcttctcccctggacctatgtgcatccctcacctgccagttatgtggctgccaagccccacaggctgtcatggtggctcttgccacacttcccttcctgagctgacctgacctcactgccacctcttgcattgggatcctgagggctggcccctgctcactgatgggccctcccaggcccgtcaagccctggtgaaggagcttagcttgtcttcttggcaattcacaatgcctcactccacaccctaaaactggagcgtcccctatggtctcctgctgtggcttgggtgccgggcgtctcccgcctccaggatctcctctcacctgcccccattaaagctctgccactcatgc

SEQ ID NO: 5709 - protein, 103 aa, Homo sapiens
MLVEAIMLLTATAPGRQQVRDQGAYLILRELHSWEPEPDVRTACEKLIQVLIGDEPERGMENLLEVQVPEDVEQQLQQLDCREQEQLERELAPEPWVERATPT

SEQ ID NO: 5710 - DNA, 1872 bp, Homo sapiens
aacgtgagtggctagtgtggagcctcagagttggccggagaggagggaggccagtggagggagagagaggtgtccaggccacaggctcctgaaactttgcagcagtgagttgctgagcacaggtgggacttacacaggcagagcctggctcagctgcccagcccagggacacagtggctcccacacactcacccctagggctgcctgtcgacttgcagtacctgccaccagacaagcagcgagaacctgatgcagacatccgcaagatgcttgttgaagccatcatgctgctgacagccacagcaccaggtcggcagcaggtgcgggaccagggagcctacctgatccttcgagagctgcacagctgggagccggagcccgacgtgcggacggcttgtgagaagctcatccaggtgcttattggggacgagcctgaacgtggcatggaaaacctgctggaggtgcaggtgcctgaggatgtggagcagcagctgcagcagctggattgcagggagcaggagcagttggagcgggagctggccccagagccatgggtggagagggccacacccacctgaggcccctgcagccggacaccagctccagggtcccctttgccaggctttctcagaccaggccttcctgcagctgtctgcaggccccctgggtccccttgttcagagactgtgctcttctgagaagcagagctacgcttaggctccagtaaggattggaggcactttccagccctgtgcagtgttgctaccagcaagaatgaaggttgtgcagagcagtactgtgaggtaggcaccgtgactcggctgcctgtgcagaaggtggaggtggcaggcggatggccagggagccatgagaagactcttcctgggcacggcgtggggactggacagaaaaccactgcaagccccaaggagccagctgaagcctcccaatccccagggcactgcagagtctgggcagaggtgggcgcataggtacaagtgctgctttgtcagcctcactccctgcagctctcagctccctgttccctgagacctggcctcaaagggctgacccagccatacgtagatcctggggtctttctaggactgtgcctccctgcttgacctatgctccaggaccctgccctcaacccttgtcagctccctaagtcttcctgtttcccagtctcagattgagtgggtgctctcattggcctctctagctaggccgtctccctggtcagcttccttgagcctgggccactcctccctggccttcttacctctgccaagagcctccagatgtgcctgcagcctagtccctgcccaagcttctcccccagccaccctctgcccctgtggtagagcccactataggcccaggcgccttacgtgcttctcccctggacctatgtgcatccctcacctgccagttatgtggctgccaagccccacaggctgtcatggtggctcttgccacacttcccttcctgagctgacctgacctcactgccacctcttgcattgggatcctgagggctggcccctgctcactgatgggccctcccaggcccgtcaagccctggtgaaggagcttagcttgtcttcttggcaattcacaatgcctcactccacaccctaaaactggagcgtcccctatggtctcctgctgtggcttgggtgccgggcgtctcccgcctccaggatctcctctcacctgcccccattaaagctctgccactcatgcaggcatgtgtggaccatgttttcccctggccagagcccccacctgccactggaggccagttgccctcttagcactcagacatcagcactgtcttcacagaataaatgctttatctggccttgcccc

SEQ ID NO: 5711 - protein, 103 aa, Homo sapiens; identical to SEQ ID NO: 5709

SEQ ID NO: 5712 - DNA, 2068 bp, Homo sapiens
ccactccgggcccctgctgggcgggaaggcggcgccccggccgaggtggcggcggctcctcaggacggaagctcctgttttcttgtcagccgccagctgagggccattcgcagcttctccaggccacctgcattccttgtctcagagcctccctcctgcatcctccaagccagcagttgtgggatgggagaagaagttgtccatgttcacactgggtgaaggaagctgaaaccacagacatgactgagtcctccatgaagaagctggcctccaccctgctggacgccatcaccgataaggaccccctggtgcaggagcaggtctgcagtgccctgtgctccctcggggaggcgcggccggtggagacgctccgtgcctgcgaggagtatctgcggcagcatgacaagctggcacacccataccgagcagcggtcctgagggccatggagagggtcctgagcagtcgcgccagtgagctggacaaggacacagccagcaccatcatcctcctggcctccagcgagatgaccaagacgaaggacctggtctgggactggcagcaggcggcgagtggcgtcctggtggccgtgggaagacagttcatcagcaaggtgatggaggagctgctgcgcaggctgcaccctgggaccctgccacactgcgccgtgctgcacaccctcgccagcctctcggtggccaacgcgttcggcgtagtccccttcctgccatccgtcctgagctccctgctgcccgtgctgggcgtggccaagcaggacacggtgcgcgtggccttctgctccgctctgcagcgcttcagcgagggtgccctggagtacctagccaacctggaccgagccccagaccccacggtcaggaaggacgcctttgccaccgacatcttcagcgcctacgatgttctcttccatcagtggctgcagagtcgagaagccaagctccgtcttgccgtggtggaggctctggggcctatgagccatctgctgcccagtgagaggctggaagagcagctgcccaagctcctccctgggattctcgccctctacaagaagcacgcagagaccttctacttgtccaagagcctgggccagatcctcgaggcagctgtgagtgtgggcagccgcacactggagacccagctggatgccctcttggctgcactgcactcccaggtaggaggcgggcgtcagggggcgggtccaggttctgcacacccttccgtgggaagttgctggacaaggggtgcagaaagcaagttggggtggatggctcagccacgtggggctgaggactgggcattccctgaaggtcactcgggtgacttcttagcgatgtggcgatgctcttgccctgcccagtagtggcacatgcaggtgacatagcagcccccaggatggaggtggcaggagtgggtgcccaggcccagtgcaggcccagtacaggtggtcccagagaaaggtcagcgcagctgaagtgccagctgggggagactgccctgagtttctggggactgagctcagaggagcagaggagaggccctgggctgcaggacgggggtcttgaaggccctgctggagaggaagtgatgtggggaggaggctgagcagctggggcagctgggacccctccccaggtcgggtgaatgaggctgagaacgactgagggatgcaggtgccgggtcacccgtgaccttggcactgggggtcatctgtccatgggactttctggatgagagaggagaggggcagggagctagagagggtggtgtggtgaagtctgcaaggaaactttctgaaaagaagtgtggaggtgggtttactgcttggctctgcccctcacctggcccactccagctgggccccactctccaccgcctggatggtcctggctgcatcccagaaacaaaggggaagaggggacggcagccacagagctagtaaacataatgtaagtgctgtgaacagttacatggtaacaaactgttaaaactgtatgaaatggttaggttcctagaaagattaaaatgtcaacattggtacgaaaagcaacagag

SEQ ID NO: 5713 - protein, 378 aa, Homo sapiens
MTESSMKKLASTLLDAITDKDPLVQEQVCSALCSLGEARPVETLRACEEYLRQHDKLAHPYRAAVLRAMERVLSSRASELDKDTASTIILLASSEMTKTKDLVWDWQQAASGVLVAVGRQFISKVMEELLRRLHPGTLPHCAVLHTLASLSVANAFGVVPFLPSVLSSLLPVLGVAKQDTVRVAFCSALQRFSEGALEYLANLDRAPDPTVRKDAFATDIFSAYDVLFHQWLQSREAKLRLAVVEALGPMSHLLPSERLEEQLPKLLPGILALYKKHAETFYLSKSLGQILEAAVSVGSRTLETQLDALLAALHSQVGGGRQGAGPGSAHPSVGSCWTRGAESKLGWMAQPRGAEDWAFPEGHSGDFLAMWRCSCPAQ

SEQ ID NO: 5714 - DNA, 1852 bp, Homo sapiens
ccactccgggcccctgctgggcgggaaggcggcgccccggccgaggtggcggcggctcctcaggacggaagctcctgttttcttgtcagccgccagctgagggccattcgcagcttctccaggccacctgcattccttgtctcagagcctccctcctgcatcctccaagccagcagttgtgggatgggagaagaagttgtccatgttcacactgggtgaaggaagctgaaaccacagacatgactgagtcctccatgaagaagctggcctccaccctgctggacgccatcaccgataaggaccccctggtgcaggagcaggtctgcagtgccctgtgctccctcggggaggcgcggccggtggagacgctccgtgcctgcgaggagtatctgcggcagcatgacaagctggcacacccataccgagcagcggtcctgagggccatggagagggtcctgagcagtcgcgccagtgagctggacaaggacacagccagcaccatcatcctcctggcctccagcgagatgaccaagacgaaggacctggtctgggactggcagcaggcggcgagtggcgtcctggtggccgtgggaagacagttcatcagcaaggtgatggaggagctgctgcgcaggctgcaccctgggaccctgccacactgcgccgtgctgcacaccctcgccagcctctcggtggccaacgcgttcggcgtagtccccttcctgccatccgtcctgagctccctgctgcccgtgctgggcgtggccaagcaggacacggtgcgcgtggccttctgctccgctctgcagcgcttcagcgagggtgccctggagtacctagccaacctggaccgagccccagaccccacggtcaggaaggacgcctttgccaccgacatcttcagcgcctacgatgttctcttccatcagtggctgcagagtcgagaagccaagctccgtcttgccgtggtggaggctctggggcctatgagccatctgctgcccagtgagaggctggaagagcagctgcccaagctcctccctgggattctcgccctctacaagaagcacgcagagaccttctacttgtccaagagcctgggccagatcctcgaggcagctgtgagtgtgggcagccgcacactggagacccagctggatgccctcttggctgcactgcactcccagatctgtgtgcctgtggagtcctcaagccccctggtgatgagtaaccagaaggaggtgctgcgctgcttcactgtgctggcctgcagctcgcctgaccgcctactggccttcctgctgcccaggctggacaccagcaatgagaggacccgcgtgggcaccctgcaggtggtcagacatgtcatcaactcagctggcagcactaacaccagaataacactgatgttgccatcagcagtcacacgactgaaacatgaggactgccctgcacgtgctgctccgcagcctgctgatctaacggccgcgcccgcgtctgttgcttgagtcaccacggctgttacatcccgtgctctcccttctctgccttcttggtgttggttctgcgggcgactgcccatgtggccctcagccccatcctctgttcatggctctctgccactcttgttgtccaaagctctttctctgtaggttccgtgggaagagctcatgggaacatgatcttcgacctcatgcttgctgatcatagtttattgtgccttttatcgttgatggttttgctggttacaggattcttggctgacatttccttgagtgtcttaagttattccatattcttctggcagagagttgccagatttagcaaaaacaaataaacaggatgccccgaa

SEQ ID NO: 5715 - protein, 422 aa, Homo sapiens
MTESSMKKLASTLLDAITDKDPLVQEQVCSALCSLGEARPVETLRACEEYLRQHDKLAHPYRAAVLRAMERVLSSRASELDKDTASTIILLASSEMTKTKDLVWDWQQAASGVLVAVGRQFISKVMEELLRRLHPGTLPHCAVLHTLASLSVANAFGVVPFLPSVLSSLLPVLGVAKQDTVRVAFCSALQRFSEGALEYLANLDRAPDPTVRKDAFATDIFSAYDVLFHQWLQSREAKLRLAVVEALGPMSHLLPSERLEEQLPKLLPGILALYKKHAETFYLSKSLGQILEAAVSVGSRTLETQLDALLAALHSQICVPVESSSPLVMSNQKEVLRCFTVLACSSPDRLLAFLLPRLDTSNERTRVGTLQVVRHVINSAGSTNTRITLMLPSAVTRLKHEDCPARAAPQPADLTAAPASVA

SEQ ID NO: 5716 - DNA, 5436 bp, Homo sapiens
ccactccgggcccctgctgggcgggaaggcggcgccccggccgaggtggcggcggctcctcaggacggaagctcctgttttcttgtcagccgccagctgagggccattcgcagcttctccaggccacctgcattccttgtctcagagcctccctcctgcatcctccaagccagcagttgtgggatgggagaagaagttgtccatgttcacactgggtgaaggaagctgaaaccacagacatgactgagtcctccatgaagaagctggcctccaccctgctggacgccatcaccgataaggaccccctggtgcaggagcaggtctgcagtgccctgtgctccctcggggaggcgcggccggtggagacgctccgtgcctgcgaggagtatctgcggcagcatgacaagctggcacacccataccgagcagcggtcctgagggccatggagagggtcctgagcagtcgcgccagtgagctggacaaggacacagccagcaccatcatcctcctggcctccagcgagatgaccaagacgaaggacctggtctgggactggcagcaggcggcgagtggcgtcctggtggccgtgggaagacagttcatcagcaaggtgatggaggagctgctgcgcaggctgcaccctgggaccctgccacactgcgccgtgctgcacaccctcgccagcctctcggtggccaacgcgttcggcgtagtccccttcctgccatccgtcctgagctccctgctgcccgtgctgggcgtggccaagcaggacacggtgcgcgtggccttctgctccgctctgcagcgcttcagcgagggtgccctggagtacctagccaacctggaccgagccccagaccccacggtcaggaaggacgcctttgccaccgacatcttcagcgcctacgatgttctcttccatcagtggctgcagagtcgagaagccaagctccgtcttgccgtggtggaggctctggggcctatgagccatctgctgcccagtgagaggctggaagagcagctgcccaagctcctccctgggattctcgccctctacaagaagcacgcagagaccttctacttgtccaagagcctgggccagatcctcgaggcagctgtgagtgtgggcagccgcacactggagacccagctggatgccctcttggctgcactgcactcccagatctgtgtgcctgtggagtcctcaagccccctggtgatgagtaaccagaaggaggtgctgcgctgcttcactgtgctggcctgcagctcgcctgaccgcctactggccttcctgctgcccaggctggacaccagcaatgagaggacccgcgtgggcaccctgcaggtggtcagacatgtcatcaactcagctgctgctcagatggaagataaaaagccctttatcctgtcttccatgaggcttcctctcctggacaccaacagcaaggtgaagcgggcagtggtgcaggtgattagcgccatggcccaccacggctacctggagcagcctggaggtgaggcgatgatcgagtacatcgtgcagcagtgcgcgctgccccccgagcaggagcctgagaagccaggccccggcagcaaggaccccaaggccgacagcgtgcgggccatcagcgtgcgcaccctctacctggtcagcaccaccgtggacaggatgagtcacgtcctctggccatacctgctccagttcctcacccctgtgcgcttcactggggccctgactccgctctgcaggagcctcgtgcatctggcgcagaagaggcaggaggccggggccgacgccttcctcatccagtacgacgcccatgcgagcctcccgtctccctatgctgtaaccggaagactgttggttgtgtcttccagcccctacctaggggacggacgtggggcagcggcgctgcgcctcctcagtgttctgcacccaaacattcaccctttgctgggtcagcattgggaaacgactgtcccgctgctgctggggtacctggatgagcacacagaagagaccctgccacaggaggagtgggaggagaagctgttgatgttcctgcgagacaccctggccatcatttctgacaacgcgtggatctgccagctgagcctggagctgtgcaggcagctgccctgctacgatgaggcaccccaggagaagaacttcctgtacaaatgcataggcaccaccctgggtgctgcttcaagtaaggaggtggtgaggaagcaccttcaagagctgctggagacggccagataccaggaggaggcagaacgcgagggcctcgcctgctgcttcgggatctgtgccatctcccacctcgaggacacgctggcccagctggaggacttcgtgaggtcagaggtcttcagaaaatccattggcattctcaacatttttaagattcaggtggtgccgtgcacggctgggtcacacctctgctgtcactgactggctctggcccttcttctgggaggatttcaggagtttctgagccgaggattcccgtcggggagtgtaattgtgtaactgaagtcccgctggttcctctggcctctcaggatcgaagtgagaacgaagtggagaaggtgaagagtgctctgatcctgtgctatgggcacgtggcggcccgggccccccgggagctggtgctggccaaggtagagtcagacatcctccggaacatctgccagcacttcagcaccaaggacccagccctgaagctgtgccttgtccagagtgtgtgcatggtcagccgcgccatctgcagcagcacccaggctggctccttccacttcacccggaaagcagagctggtggcacagatgatggagttcatcagggcagagcccccggactccttgaggacacctattcggaagaaagccatgctcacctgcacttacttggtctccgtggagccagcgctggacgagcaggcccgggcggatgtgatccatggctgcctgcacagcatcatggccctgctgcctgagcccaaggaggaggacggaggctgccagaagtccctgtatctggagacactgcacgcccttgaggatctgctgacgagcctcctgcagcggaacatgaccccccaaggcctgcagatcatgattgagcacctgagcccatggatcaagtccccaagaggtcacgagcgggcgcgggccctgggcctgagcgccctcctgctgcgctacttcctggagcacctgcgtgtcagcgccctggtgcccttccacaacctgggccttctcatcggcctcttctccccacggtgtgcggacctgtggcctgccacccgccaggaggccgtggactgtgtctactccctgctgtacctccagctcggctatgaggattattgccaagcgcctccccccagaccagctcatcagcctcttgctaaccatgtttgaggccctgggagaccccgaaaagaactgctcccgagcagctaccgtcatgatcaactgcctgctgcaggagcggggcggtgtgctccaggagaaggtgcccgagatcgtgagcgtcctgcgctccaagcttcaggaggcccagggagagcacgtcctgccggccgcccagcacagcgtgtacctcctggccacccagcactgcgcagccgtggtgtccagcctcctgggcagccccttgcccttggacagccacacctgcatgctgtggcgggcgctggcggtggagcctcgcctagctgcccaggtcctggggctgctgctggagaagatgagtagggacgtccctttcaaggagagccgggccttcctgctgggccgcaccccagaccgcgtggccacgctgctgcctctctcggctacctgtgcactgtttgaggtcatgtccacgcctgcagcggggcccgcggtgctcgagctctacccccagctgtttgtggtgcttctgctgcgcgtcagctgcaccgtgggtgtccagctgccccggaacctgcaggcccaggaaaggaggggtgccagtccagccctagccaccaggaacctggaaccctgcagctctgcagtggacaccctgcggtccatgctactccgcagcggcagcgaggatgtggtacagcgcatggacctggagggaggctgggaactgctcaggacctcggcggggcatgaggagggggccaccaggttggccagggccatggctgagcacgcagggccccgactccccctggtgctgaagacgctggcatgcacacacagcagtgcgtatgagaaccagagggtgaccaccaccgccttcctggccgagctgctgaacagcaacgtggccaacgacctcatgctcttggactcgctgctggagagcctggcggctcgccagaaggacacatgcgccagcgtgcggaggctggtgctccgcggcctggccaacctggcctccggctgccctgacaaggtgcgaacccacggcccccagctcctcacagccatgattggcgggctggacgacggggacaaccctcacagcccagtggccctggaggccatgctgggccttgcgaggctggtgcacctggtggagtcctgggacctgcgctcagggctgctgcacgtggccatccgcatccggcctttcttcgacagtgagaagatggagttccggacggcatctatccgcctctttgggcaccttaacaaggtctgccacggagactgtgaggacgtcttcctggaccaggtggtgggcgggctggcgcccctgctgctgcacctgcaggaccctcaggccaccgtggccagcgcctgcaggtttgccctgcgcatgtgtggccccaatctggcatgtgaggagctctcagctgctttccagaaacacctgcaggagggccgagccctgcacttcggggagttcctcaacaccacctgcaagcacctgatgcaccatttcccagacctgctgggccgtctcctgaccacctgcctgttctacttcaagagcagctgggagaacgtccgagctgctgcacccctgttcaccggtaagcaccaccccctgccccacccccacgccgcccggcagccccgcctgatgcccccacttcacagggttcctggtgctgcactcggagcccaggcagcagccgcaggtggacctggaccagctcattgcggcgctccagatcctgctgaaggacccggcccccgaggtgcggacgagggctgctgaggccctgggccgcctggtgaagctcgcctaaggctccggccagcacccccagcgaggagtatgcacccagacctgtgcctgagctccaagacagggcctcctgaggaccacagcctgggcacacgactggaggggcctggccccagaacaggcactgctggggaccaaacccaagcccttcagtgagggatgtgcccaataaactcatctgctccca

SEQ ID NO: 5717 - protein, 741 aa, Homo sapiens
MTESSMKKLASTLLDAITDKDPLVQEQVCSALCSLGEARPVETLRACEEYLRQHDKLAHPYRAAVLRAMERVLSSRASELDKDTASTIILLASSEMTKTKDLVWDWQQAASGVLVAVGRQFISKVMEELLRRLHPGTLPHCAVLHTLASLSVANAFGVVPFLPSVLSSLLPVLGVAKQDTVRVAFCSALQRFSEGALEYLANLDRAPDPTVRKDAFATDIFSAYDVLFHQWLQSREAKLRLAVVEALGPMSHLLPSERLEEQLPKLLPGILALYKKHAETFYLSKSLGQILEAAVSVGSRTLETQLDALLAALHSQICVPVESSSPLVMSNQKEVLRCFTVLACSSPDRLLAFLLPRLDTSNERTRVGTLQVVRHVINSAAAQMEDKKPFILSSMRLPLLDTNSKVKRAVVQVISAMAHHGYLEQPGGEAMIEYIVQQCALPPEQEPEKPGPGSKDPKADSVRAISVRTLYLVSTTVDRMSHVLWPYLLQFLTPVRFTGALTPLCRSLVHLAQKRQEAGADAFLIQYDAHASLPSPYAVTGRLLVVSSSPYLGDGRGAAALRLLSVLHPNIHPLLGQHWETTVPLLLGYLDEHTEETLPQEEWEEKLLMFLRDTLAIISDNAWICQLSLELCRQLPCYDEAPQEKNFLYKCIGTTLGAASSKEVVRKHLQELLETARYQEEAEREGLACCFGICAISHLEDTLAQLEDFVRSEVFRKSIGILNIFKIQVVPCTAGSHLCCH

SEQ ID NO: 5718 - DNA, 5364 bp, Homo sapiens
ccactccgggcccctgctgggcgggaaggcggcgccccggccgaggtggcggcggctcctcaggacggaagctcctgttttcttgtcagccgccagctgagggccattcgcagcttctccaggccacctgcattccttgtctcagagcctccctcctgcatcctccaagccagcagttgtgggatgggagaagaagttgtccatgttcacactgggtgaaggaagctgaaaccacagacatgactgagtcctccatgaagaagctggcctccaccctgctggacgccatcaccgataaggaccccctggtgcaggagcaggtctgcagtgccctgtgctccctcggggaggcgcggccggtggagacgctccgtgcctgcgaggagtatctgcggcagcatgacaagctggcacacccataccgagcagcggtcctgagggccatggagagggtcctgagcagtcgcgccagtgagctggacaaggacacagccagcaccatcatcctcctggcctccagcgagatgaccaagacgaaggacctggtctgggactggcagcaggcggcgagtggcgtcctggtggccgtgggaagacagttcatcagcaaggtgatggaggagctgctgcgcaggctgcaccctgggaccctgccacactgcgccgtgctgcacaccctcgccagcctctcggtggccaacgcgttcggcgtagtccccttcctgccatccgtcctgagctccctgctgcccgtgctgggcgtggccaagcaggacacggtgcgcgtggccttctgctccgctctgcagcgcttcagcgagggtgccctggagtacctagccaacctggaccgagccccagaccccacggtcaggaaggacgcctttgccaccgacatcttcagcgcctacgatgttctcttccatcagtggctgcagagtcgagaagccaagctccgtcttgccgtggtggaggctctggggcctatgagccatctgctgcccagtgagaggctggaagagcagctgcccaagctcctccctgggattctcgccctctacaagaagcacgcagagaccttctacttgtccaagagcctgggccagatcctcgaggcagctgtgagtgtgggcagccgcacactggagacccagctggatgccctcttggctgcactgcactcccagatctgtgtgcctgtggagtcctcaagccccctggtgatgagtaaccagaaggaggtgctgcgctgcttcactgtgctggcctgcagctcgcctgaccgcctactggccttcctgctgcccaggctggacaccagcaatgagaggacccgcgtgggcaccctgcaggtggtcagacatgtcatcaactcagctgctgctcagatggaagataaaaagccctttatcctgtcttccatgaggcttcctctcctggacaccaacagcaaggtgaagcgggcagtggtgcaggtgattagcgccatggcccaccacggctacctggagcagcctggaggtgaggcgatgatcgagtacatcgtgcagcagtgcgcgctgccccccgagcaggagcctgagaagccaggccccggcagcaaggaccccaaggccgacagcgtgcgggccatcagcgtgcgcaccctctacctggtcagcaccaccgtggacaggatgagtcacgtcctctggccatacctgctccagttcctcacccctgtgcgcttcactggggccctgactccgctctgcaggagcctcgtgcatctggcgcagaagaggcaggaggccggggccgacgccttcctcatccagtacgacgcccatgcgagcctcccgtctccctatgctgtaaccggaagactgttggttgtgtcttccagcccctacctaggggacggacgtggggcagcggcgctgcgcctcctcagtgttctgcacccaaacattcaccctttgctgggtcagcattgggaaacgactgtcccgctgctgctggggtacctggatgagcacacagaagagaccctgccacaggaggagtgggaggagaagctgttgatgttcctgcgagacaccctggccatcatttctgacaacgcgtggatctgccagctgagcctggagctgtgcaggcagctgccctgctacgatgaggcaccccaggagaagaacttcctgtacaaatgcataggcaccaccctgggtgctgcttcaagtaaggaggtggtgaggaagcaccttcaagagctgctggagacggccagataccaggaggaggcagaacgcgagggcctcgcctgctgcttcgggatctgtgccatctcccacctcgaggacacgctggcccagctggaggacttcgtgaggtcagaggtcttcagaaaatccattggcattctcaacatttttaaggatcgaagtgagaacgaagtggagaaggtgaagagtgctctgatcctgtgctatgggcacgtggcggcccgggccccccgggagctggtgctggccaaggtagagtcagacatcctccggaacatctgccagcacttcagcaccaaggttctaggaataaaggtagaaaccaaggacccagccctgaagctgtgccttgtccagagtgtgtgcatggtcagccgcgccatctgcagcagcacccaggctggctccttccacttcacccggaaagcagagctggtggcacagatgatggagttcatcagggcagagcccccggactccttgaggacacctattcggaagaaagccatgctcacctgcacttacttggtctccgtggagccagcgctggacgagcaggcccgggcggatgtgatccatggctgcctgcacagcatcatggccctgctgcctgagcccaaggaggaggacggaggctgccagaagtccctgtatctggagacactgcacgcccttgaggatctgctgacgagcctcctgcagcggaacatgaccccccaaggcctgcagatcatgattgagcacctgagcccatggatcaagtccccaagaggtcacgagcgggcgcgggccctgggcctgagcgccctcctgctgcgctacttcctggagcacctgcgtgtcagcgccctggtgcccttccacaacctgggccttctcatcggcctcttctccccacggtgtgcggacctgtggcctgccacccgccaggaggccgtggactgtgtctactccctgctgtacctccagctcggctatgagggcttctcccgggactaccgcgatgacgtggcggagcggctcctcagcctcaaggacggcctcgtgcaccctgaccccgccattctcttccacacctgccacagtgtaggccagattattgccaagcgcctccccccagaccagctcatcagcctcttgctaaccatgtttgaggccctgggagaccccgaaaagaactgctcccgagcagctaccgtcatgatcaactgcctgctgcaggagcggggcggtgtgctccaggagaaggtgcccgagatcgtgagcgtcctgcgctccaagcttcaggaggcccagggagagcacgtcctgccggccgcccagcacagcgtgtacctcctggccacccagcactgcgcagccgtggtgtccagcctcctgggcagccccttgcccttggacagccacacctgcatgctgtggcgggcgctggcggtggagcctcgcctagctgcccaggtcctggggctgctgctggagaagatgagtagggacgtccctttcaaggagagccgggccttcctgctgggccgcaccccagaccgcgtggccacgctgctgcctctctcggctacctgtgcactgtttgaggtcatgtccacgcctgcagcggggcccgcggtgctcgagctctacccccagctgtttgtggtgcttctgctgcgcgtcagctgcaccgtgggtgtccagctgccccggaacctgcaggcccaggaaaggaggggtgccagtccagccctagccaccaggaacctggaaccctgcagctctgcagtggacaccctgcggtccatgctactccgcagcggcagcgaggatgtggtacagcgcatggacctggagggaggctgggaactgctcaggacctcggcggggcatgaggagggggccaccaggttggccagggccatggctgagcacgcagggccccgactccccctggtgctgaagacgctggcatgcacacacagcagtgcgtatgagaaccagagggtgaccaccaccgccttcctggccgagctgctgaacagcaacgtggccaacgacctcatgctcttggactcgctgctggagagcctggcggctcgccagaaggacacatgcgccagcgtgcggaggctggtgctccgcggcctggccaacctggcctccggctgccctgacaaggtgcgaacccacggcccccagctcctcacagccatgattggcgggctggacgacggggacaaccctcacagcccagtggccctggaggccatgctgggccttgcgaggctggtgcacctggtggagtcctgggacctgcgctcagggctgctgcacgtggccatccgcatccggcctttcttcgacagtgagaagatggagttccggacggcatctatccgcctctttgggcaccttaacaaggtctgccacggagactgtgaggacgtcttcctggaccaggtggtgggcgggctggcgcccctgctgctgcacctgcaggaccctcaggccaccgtggccagcgcctgcaggtttgccctgcgcatgtgtggccccaatctggcatgtgaggagctctcagctgctttccagaaacacctgcaggagggccgagccctgcacttcggggagttcctcaacaccacctgcaagcacctgatgcaccatttcccagacctgctgggccgtctcctgaccacctgcctgttctacttcaagagcagctgggagaacgtccgagctgctgcacccctgttcaccgggttcctggtgctgcactcggagcccaggcagcagccgcaggtggacctggaccagctcattgcggcgctccagatcctgctgaaggacccggcccccgaggtgcggacgagggctgctgaggccctgggccgcctggtgaagctcgcctaaggctccggccagcacccccagcgaggagtatgcacccagacctgtgcctgagctccaagacagggcctcctgaggaccacagcctgggcacacgactggaggggcctggccccagaacaggcactgctggggaccaaacccaagcccttcagtgagggatgtgcccaataaactcatctgctcccagcgagtgactgac

SEQ ID NO: 5719 - protein, 1641 aa, Homo sapiens
MTESSMKKLASTLLDAITDKDPLVQEQVCSALCSLGEARPVETLRACEEYLRQHDKLAHPYRAAVLRAMERVLSSRASELDKDTASTIILLASSEMTKTKDLVWDWQQAASGVLVAVGRQFISKVMEELLRRLHPGTLPHCAVLHTLASLSVANAFGVVPFLPSVLSSLLPVLGVAKQDTVRVAFCSALQRFSEGALEYLANLDRAPDPTVRKDAFATDIFSAYDVLFHQWLQSREAKLRLAVVEALGPMSHLLPSERLEEQLPKLLPGILALYKKHAETFYLSKSLGQILEAAVSVGSRTLETQLDALLAALHSQICVPVESSSPLVMSNQKEVLRCFTVLACSSPDRLLAFLLPRLDTSNERTRVGTLQVVRHVINSAAAQMEDKKPFILSSMRLPLLDTNSKVKRAVVQVISAMAHHGYLEQPGGEAMIEYIVQQCALPPEQEPEKPGPGSKDPKADSVRAISVRTLYLVSTTVDRMSHVLWPYLLQFLTPVRFTGALTPLCRSLVHLAQKRQEAGADAFLIQYDAHASLPSPYAVTGRLLVVSSSPYLGDGRGAAALRLLSVLHPNIHPLLGQHWETTVPLLLGYLDEHTEETLPQEEWEEKLLMFLRDTLAIISDNAWICQLSLELCRQLPCYDEAPQEKNFLYKCIGTTLGAASSKEVVRKHLQELLETARYQEEAEREGLACCFGICAISHLEDTLAQLEDFVRSEVFRKSIGILNIFKDRSENEVEKVKSALILCYGHVAARAPRELVLAKVESDILRNICQHFSTKVLGIKVETKDPALKLCLVQSVCMVSRAICSSTQAGSFHFTRKAELVAQMMEFIRAEPPDSLRTPIRKKAMLTCTYLVSVEPALDEQARADVIHGCLHSIMALLPEPKEEDGGCQKSLYLETLHALEDLLTSLLQRNMTPQGLQIMIEHLSPWIKSPRGHERARALGLSALLLRYFLEHLRVSALVPFHNLGLLIGLFSPRCADLWPATRQEAVDCVYSLLYLQLGYEGFSRDYRDDVAERLLSLKDGLVHPDPAILFHTCHSVGQIIAKRLPPDQLISLLLTMFEALGDPEKNCSRAATVMINCLLQERGGVLQEKVPEIVSVLRSKLQEAQGEHVLPAAQHSVYLLATQHCAAVVSSLLGSPLPLDSHTCMLWRALAVEPRLAAQVLGLLLEKMSRDVPFKESRAFLLGRTPDRVATLLPLSATCALFEVMSTPAAGPAVLELYPQLFVVLLLRVSCTVGVQLPRNLQAQERRGASPALATRNLEPCSSAVDTLRSMLLRSGSEDVVQRMDLEGGWELLRTSAGHEEGATRLARAMAEHAGPRLPLVLKTLACTHSSAYENQRVTTTAFLAELLNSNVANDLMLLDSLLESLAARQKDTCASVRRLVLRGLANLASGCPDKVRTHGPQLLTAMIGGLDDGDNPHSPVALEAMLGLARLVHLVESWDLRSGLLHVAIRIRPFFDSEKMEFRTASIRLFGHLNKVCHGDCEDVFLDQVVGGLAPLLLHLQDPQATVASACRFALRMCGPNLACEELSAAFQKHLQEGRALHFGEFLNTTCKHLMHHFPDLLGRLLTTCLFYFKSSWENVRAAAPLFTGFLVLHSEPRQQPQVDLDQLIAALQILLKDPAPEVRTRAAEALGRLVKLA

SEQ ID NO: 5720 - DNA, 6275 bp, Homo sapiens
ccactccgggcccctgctgggcgggaaggcggcgccccggccgaggtggcggcggctcctcaggacggaagctcctgttttcttgtcagccgccagctgagggccattcgcagcttctccaggccacctgcattccttgtctcagagcctccctcctgcatcctccaagccagcagttgtgggatgggagaagaagttgtccatgttcacactgggtgaaggaagctgaaaccacagacatgactgagtcctccatgaagaagctggcctccaccctgctggacgccatcaccgataaggaccccctggtgcaggagcaggtctgcagtgccctgtgctccctcggggaggcgcggccggtggagacgctccgtgcctgcgaggagtatctgcggcagcatgacaagctggcacacccataccgagcagcggtcctgagggccatggagagggtcctgagcagtcgcgccagtgagctggacaaggacacagccagcaccatcatcctcctggcctccagcgagatgaccaagacgaaggacctggtctgggactggcagcaggcggcgagtggcgtcctggtggccgtgggaagacagttcatcagcaaggtgatggaggagctgctgcgcaggctgcaccctgggaccctgccacactgcgccgtgctgcacaccctcgccagcctctcggtggccaacgcgttcggcgtagtccccttcctgccatccgtcctgagctccctgctgcccgtgctgggcgtggccaagcaggacacggtgcgcgtggccttctgctccgctctgcagcgcttcagcgagggtgccctggagtacctagccaacctggaccgagccccagaccccacggtcaggaaggacgcctttgccaccgacatcttcagcgcctacgatgttctcttccatcagtggctgcagagtcgagaagccaagctccgtcttgccgtggtggaggctctggggcctatgagccatctgctgcccagtgagaggctggaagagcagctgcccaagctcctccctgggattctcgccctctacaagaagcacgcagagaccttctacttgtccaagagcctgggccagatcctcgaggcagctgtgagtgtgggcagccgcacactggagacccagctggatgccctcttggctgcactgcactcccagatctgtgtgcctgtggagtcctcaagccccctggtgatgagtaaccagaaggaggtgctgcgctgcttcactgtgctggcctgcagctcgcctgaccgcctactggccttcctgctgcccaggctggacaccagcaatgagaggacccgcgtgggcaccctgcaggtggtcagacatgtcatcaactcagctgctgctcagatggaagataaaaagccctttatcctgtcttccatgaggcttcctctcctggacaccaacagcaaggtgaagcgggcagtggtgcaggtgattagcgccatggcccaccacggctacctggagcagcctggaggtgaggcgatgatcgagtacatcgtgcagcagtgcgcgctgccccccgagcaggagcctgagaagccaggccccggcagcaaggaccccaaggccgacagcgtgcgggccatcagcgtgcgcaccctctacctggtcagcaccaccgtggacaggatgagtcacgtcctctggccatacctgctccagttcctcacccctgtgcgcttcactggggccctgactccgctctgcaggagcctcgtgcatctggcgcagaagaggcaggaggccggggccgacgccttcctcatccagtacgacgcccatgcgagcctcccgtctccctatgctgtaaccggaagactgttggttgtgtcttccagcccctacctaggggacggacgtggggcagcggcgctgcgcctcctcagtgttctgcacccaaacattcaccctttgctgggtcagcattgggaaacgactgtcccgctgctgctggggtacctggatgagcacacagaagagaccctgccacaggaggagtgggaggagaagctgttgatgttcctgcgagacaccctggccatcatttctgacaacgcgtggatctgccagctgagcctggagctgtgcaggcagctgccctgctacgatgaggcaccccaggagaagaacttcctgtacaaatgcataggcaccaccctgggtgctgcttcaagtaaggaggtggtgaggaagcaccttcaagagctgctggagacggccagataccaggaggaggcagaacgcgagggcctcgcctgctgcttcgggatctgtgccatctcccacctcgaggacacgctggcccagctggaggacttcgtgaggtcagaggtcttcagaaaatccattggcattctcaacatttttaagattcaggtggtgccgtgcacggctgggtcacacctctgctgtcactgactggctctggcccttcttctgggaggatttcaggagtttctgagccgaggattcccgtcggggagtgtaattgtgtaactgaagtcccgctggttcctctggcctctcaggatcgaagtgagaacgaagtggagaaggtgaagagtgctctgatcctgtgctatgggcacgtggcggcccgggccccccgggagctggtgctggccaaggtagagtcagacatcctccggaacatctgccagcacttcagcaccaaggacccagccctgaagctgtgccttgtccagagtgtgtgcatggtcagccgcgccatctgcagcagcacccaggctggctccttccacttcacccggaaagcagagctggtggcacagatgatggagttcatcagggcagagcccccggactccttgaggacacctattcggaagaaagccatgctcacctgcacttacttggtctccgtggagccagcgctggacgagcaggcccgggcggatgtgatccatggctgcctgcacagcatcatggccctgctgcctgagcccaaggaggaggacggaggctgccagaagtccctgtatctggagacactgcacgcccttgaggatctgctgacgagcctcctgcagcggaacatgaccccccaaggcctgcagatcatgattgagcacctgagcccatggatcaagtccccaagaggtcacgagcgggcgcgggccctgggcctgagcgccctcctgctgcgctacttcctggagcacctgcgtgtcagcgccctggtgcccttccacaacctgggccttctcatcggcctcttctccccacggtgtgcggacctgtggcctgccacccgccaggaggccgtggactgtgtctactccctgctgtacctccagctcggctatgaggattattgccaagcgcctccccccagaccagctcatcagcctcttgctaaccatgtttgaggccctgggagaccccgaaaagaactgctcccgagcagctaccgtcatgatcaactgcctgctgcaggagcggggcggtgtgctccaggagaaggtgcccgagatcgtgagcgtcctgcgctccaagcttcaggaggcccagggagagcacgtcctgccggccgcccagcacagcgtgtacctcctggccacccagcactgcgcagccgtggtgtccagcctcctgggcagccccttgcccttggacagccacacctgcatgctgtggcgggcgctggcggtggagcctcgcctagctgcccaggtcctggggctgctgctggagaagatgagtagggacgtccctttcaaggagagccgggccttcctgctgggccgcaccccagaccgcgtggccacgctgctgcctctctcggctacctgtgcactgtttgaggtcatgtccacgcctgcagcggggcccgcggtgctcgagctctacccccagctgtttgtggtgcttctgctgcgcgtcagctgcaccgtgggtgtccagctgccccggaacctgcaggcccaggaaaggaggggtgccagtccagccctagccaccaggaacctggaaccctgcagctctgcagtggacaccctgcggtccatgctactccgcagcggcagcgaggatgtggtacagcgcatggacctggagggaggctgggaactgctcaggacctcggcggggcatgaggagggggccaccaggttggccagggccatggctgagcacgcagggccccgactccccctggtgctgaagacgctggcatgcacacacagcagtgcgtatgagaaccagagggtgaccaccaccgccttcctggccgagctgctgaacagcaacgtggccaacgacctcatgctcttggactcgctgctggagagcctggcggctcgccagaaggacacatgcgccagcgtgcggaggctggtgctccgcggcctggccaacctggcctccggctgccctgacaaggtgcgaacccacggcccccagctcctcacagccatgattggcgggctggacgacggggacaaccctcacagcccagtggccctggaggccatgctgggccttgcgaggctggtgcacctggtggagtcctgggacctgcgctcagggctgctgcacgtggccatccgcatccggcctttcttcgacagtgagaagatggagttccggacggcatctatccgcctctttgggcaccttaacaaggtctgccacggagactgtgaggacgtcttcctggaccaggtggtgggcgggctggcgcccctgctgctgcacctgcaggaccctcaggccaccgtggccagcgcctgcaggtttgccctgcgcatgtgtggccccaatctggcatgtgaggagctctcagctgctttccagaaacacctgcaggagggccgagccctgcacttcggggagttcctcaacaccacctgcaagcacctgatgcaccatttcccagacctgctgggccgtctcctgaccacctgcctgttctacttcaagagcagctgggagaacgtccgagctgctgcacccctgttcaccggtaagcaccaccccctgccccacccccacgccgcccggcagccccgcctgatgcccccacttcacagggttcctggtgctgcactcggagcccaggcagcagccgcaggtggacctggaccagctcattgcggcgctccagatcctgctgaaggacccggcccccgaggtgcggacgagggctgctgaggccctgggccgcctggtgaagctcgcctaaggctccggccagcacccccagcgaggagtatgcacccagacctgtgcctgagctccaagacagggcctcctgaggaccacagcctgggcacacgactggaggggcctggccccagaacaggcactgctggggaccaaacccaagcccttcagtgagggatgtgcccaataaactcatctgctcccagcgagtgactgacagggtgcgatgctgagcctcttaggggatgggccagagggtgccctggactggctgtgttgtccccactgtttttgcaaaattgagtgaggggaaggctcggcgctgtggtgggggcggctttgttggcaaccccaattcaagaaggtgggagcaccaggcagcacagggtaaaggctctgttgacttcagcacgaccaccccagccccaggcaggcagaacagctaggtgaagaggcggacagtcccgtctgcccccgaggagaagacccacggctgggtggggtggaagatgacgtccagcactcccagatctcgggtcagcacgtgtcccttcagcaccttgacgggcaccagcaaggggttctgcagaaggtcactgtggggacgaggagggctcagggcacggccagacaccactgccctggggagggggccaggcagggtcagcactcacttgtacaccatgccatggcagacgatgacactgccgtcgtccgagcctgacgcaaagagtgggtaccgcgggtggaaggccacagcccgcagagccttcttgtggtgtctggggggagggaaccaggttgaaggcaggctcgggctgaagggaggggctctgctggccgcctccacccccagctttcctcacctcagcatcctgtatggcttggtggaaagatccaggtcaaaccacaccagcttgctatcgtagctcccacagatgacgttgtcacctagggccaaaggctgtgatgcaggtgttcccgctctcacctgcagggtgcactgccctgcccgtcacctacacccctcacctgcagggtgca

SEQ ID NO: 5721 - protein, 741 aa, Homo sapiens; identical to SEQ ID NO: 5717

SEQ ID NO: 5722 - DNA, 1730 bp, Homo sapiens
actccgggcccctgctgggcgggaaggcggcgccccggccgaggtggcggcggctcctcagatgggagaagaagttgtccatgttcacactgggtgaaggaagctgaaaccacagacatgactgagtcctccatgaagaagctggcctccaccctgctggacgccatcaccgataaggaccccctggtgcaggagcaggtctgcagtgccctgtgctccctcggggaggcgcggccggtggagacgctccgtgcctgcgaggagtatctgcggcagcatgacaagctggcacacccataccgagcagcggtcctgagggccatggagagggtcctgagcagtcgcgccagtgagctggacaaggacacagccagcaccatcatcctcctggcctccagcgagatgaccaagacgaaggacctggtctgggactggcagcaggcggcgagtggcgtcctggtggccgtgggaagacagttcatcagcaaggtgatggaggagctgctgcgcaggctgcaccctgggaccctgccacactgcgccgtgctgcacaccctcgccagcctctcggtggccaacgcgttcggcgtagtccccttcctgccatccgtcctgagctccctgctgcccgtgctgggcgtggccaagcaggacacggtgcgcgtggccttctgctccgctctgcagcgcttcagcgagggtgccctggagtacctagccaacctggaccgagccccagaccccacggtcaggaaggacgcctttgccaccgacatcttcagcgcctacgatgttctcttccatcagtggctgcagagtcgagaagccaagctccgtcttgccgtggtggaggctctggggcctatgagccatctgctgcccagtgagaggctggaagagcagctgcccaagctcctccctgggattctcgccctctacaagaagcacgcagagaccttctacttgtccaagagcctgggccagatcctcgaggcagctgtgagtgtgggcagccgcacactggagacccagctggatgccctcttggctgcactgcactcccagatctgtgtgcctgtggagtcctcaagccccctggtgatgagtaaccagaaggaggtgctgcgctgcttcactgtgctggcctgcagctcgcctgaccgcctactggccttcctgctgcccaggctggacaccagcaatgagaggacccgcgtgggcaccctgcaggtggtcagacatgtcatcaactcagctggcagcactaacaccagaataacactgatgttgccatcagcagtcacacgactgaaacatgaggactgccctgcacgtgctgctccgcagcctgctgatctaacggccgcgcccgcgtctgttgcttgagtcaccacggctgttacatcccgtgctctcccttctctgccttcttggtgttggttctgcgggcgactgcccatgtggccctcagccccatcctctgttcatggctctctgccactcttgttgtccaaagctctttctctgtaggttccgtgggaagagctcatgggaacatgatcttcgacctcatgcttgctgatcatagtttattgtgccttttatcgttgatggttttgctggttacaggattcttggctgacatttccttgagtgtcttaagttattccatattcttctggcagagagttgccagatttagcaaaaacaaataaacaggatgccccgaa

SEQ ID NO: 5723 - protein, 422 aa, Homo sapiens; identical to SEQ ID NO: 5715

SEQ ID NO: 5724 - DNA, 5314 bp, Homo sapiens
actccgggcccctgctgggcgggaaggcggcgccccggccgaggtggcggcggctcctcagatgggagaagaagttgtccatgttcacactgggtgaaggaagctgaaaccacagacatgactgagtcctccatgaagaagctggcctccaccctgctggacgccatcaccgataaggaccccctggtgcaggagcaggtctgcagtgccctgtgctccctcggggaggcgcggccggtggagacgctccgtgcctgcgaggagtatctgcggcagcatgacaagctggcacacccataccgagcagcggtcctgagggccatggagagggtcctgagcagtcgcgccagtgagctggacaaggacacagccagcaccatcatcctcctggcctccagcgagatgaccaagacgaaggacctggtctgggactggcagcaggcggcgagtggcgtcctggtggccgtgggaagacagttcatcagcaaggtgatggaggagctgctgcgcaggctgcaccctgggaccctgccacactgcgccgtgctgcacaccctcgccagcctctcggtggccaacgcgttcggcgtagtccccttcctgccatccgtcctgagctccctgctgcccgtgctgggcgtggccaagcaggacacggtgcgcgtggccttctgctccgctctgcagcgcttcagcgagggtgccctggagtacctagccaacctggaccgagccccagaccccacggtcaggaaggacgcctttgccaccgacatcttcagcgcctacgatgttctcttccatcagtggctgcagagtcgagaagccaagctccgtcttgccgtggtggaggctctggggcctatgagccatctgctgcccagtgagaggctggaagagcagctgcccaagctcctccctgggattctcgccctctacaagaagcacgcagagaccttctacttgtccaagagcctgggccagatcctcgaggcagctgtgagtgtgggcagccgcacactggagacccagctggatgccctcttggctgcactgcactcccagatctgtgtgcctgtggagtcctcaagccccctggtgatgagtaaccagaaggaggtgctgcgctgcttcactgtgctggcctgcagctcgcctgaccgcctactggccttcctgctgcccaggctggacaccagcaatgagaggacccgcgtgggcaccctgcaggtggtcagacatgtcatcaactcagctgctgctcagatggaagataaaaagccctttatcctgtcttccatgaggcttcctctcctggacaccaacagcaaggtgaagcgggcagtggtgcaggtgattagcgccatggcccaccacggctacctggagcagcctggaggtgaggcgatgatcgagtacatcgtgcagcagtgcgcgctgccccccgagcaggagcctgagaagccaggccccggcagcaaggaccccaaggccgacagcgtgcgggccatcagcgtgcgcaccctctacctggtcagcaccaccgtggacaggatgagtcacgtcctctggccatacctgctccagttcctcacccctgtgcgcttcactggggccctgactccgctctgcaggagcctcgtgcatctggcgcagaagaggcaggaggccggggccgacgccttcctcatccagtacgacgcccatgcgagcctcccgtctccctatgctgtaaccggaagactgttggttgtgtcttccagcccctacctaggggacggacgtggggcagcggcgctgcgcctcctcagtgttctgcacccaaacattcaccctttgctgggtcagcattgggaaacgactgtcccgctgctgctggggtacctggatgagcacacagaagagaccctgccacaggaggagtgggaggagaagctgttgatgttcctgcgagacaccctggccatcatttctgacaacgcgtggatctgccagctgagcctggagctgtgcaggcagctgccctgctacgatgaggcaccccaggagaagaacttcctgtacaaatgcataggcaccaccctgggtgctgcttcaagtaaggaggtggtgaggaagcaccttcaagagctgctggagacggccagataccaggaggaggcagaacgcgagggcctcgcctgctgcttcgggatctgtgccatctcccacctcgaggacacgctggcccagctggaggacttcgtgaggtcagaggtcttcagaaaatccattggcattctcaacatttttaagattcaggtggtgccgtgcacggctgggtcacacctctgctgtcactgactggctctggcccttcttctgggaggatttcaggagtttctgagccgaggattcccgtcggggagtgtaattgtgtaactgaagtcccgctggttcctctggcctctcaggatcgaagtgagaacgaagtggagaaggtgaagagtgctctgatcctgtgctatgggcacgtggcggcccgggccccccgggagctggtgctggccaaggtagagtcagacatcctccggaacatctgccagcacttcagcaccaaggacccagccctgaagctgtgccttgtccagagtgtgtgcatggtcagccgcgccatctgcagcagcacccaggctggctccttccacttcacccggaaagcagagctggtggcacagatgatggagttcatcagggcagagcccccggactccttgaggacacctattcggaagaaagccatgctcacctgcacttacttggtctccgtggagccagcgctggacgagcaggcccgggcggatgtgatccatggctgcctgcacagcatcatggccctgctgcctgagcccaaggaggaggacggaggctgccagaagtccctgtatctggagacactgcacgcccttgaggatctgctgacgagcctcctgcagcggaacatgaccccccaaggcctgcagatcatgattgagcacctgagcccatggatcaagtccccaagaggtcacgagcgggcgcgggccctgggcctgagcgccctcctgctgcgctacttcctggagcacctgcgtgtcagcgccctggtgcccttccacaacctgggccttctcatcggcctcttctccccacggtgtgcggacctgtggcctgccacccgccaggaggccgtggactgtgtctactccctgctgtacctccagctcggctatgaggattattgccaagcgcctccccccagaccagctcatcagcctcttgctaaccatgtttgaggccctgggagaccccgaaaagaactgctcccgagcagctaccgtcatgatcaactgcctgctgcaggagcggggcggtgtgctccaggagaaggtgcccgagatcgtgagcgtcctgcgctccaagcttcaggaggcccagggagagcacgtcctgccggccgcccagcacagcgtgtacctcctggccacccagcactgcgcagccgtggtgtccagcctcctgggcagccccttgcccttggacagccacacctgcatgctgtggcgggcgctggcggtggagcctcgcctagctgcccaggtcctggggctgctgctggagaagatgagtagggacgtccctttcaaggagagccgggccttcctgctgggccgcaccccagaccgcgtggccacgctgctgcctctctcggctacctgtgcactgtttgaggtcatgtccacgcctgcagcggggcccgcggtgctcgagctctacccccagctgtttgtggtgcttctgctgcgcgtcagctgcaccgtgggtgtccagctgccccggaacctgcaggcccaggaaaggaggggtgccagtccagccctagccaccaggaacctggaaccctgcagctctgcagtggacaccctgcggtccatgctactccgcagcggcagcgaggatgtggtacagcgcatggacctggagggaggctgggaactgctcaggacctcggcggggcatgaggagggggccaccaggttggccagggccatggctgagcacgcagggccccgactccccctggtgctgaagacgctggcatgcacacacagcagtgcgtatgagaaccagagggtgaccaccaccgccttcctggccgagctgctgaacagcaacgtggccaacgacctcatgctcttggactcgctgctggagagcctggcggctcgccagaaggacacatgcgccagcgtgcggaggctggtgctccgcggcctggccaacctggcctccggctgccctgacaaggtgcgaacccacggcccccagctcctcacagccatgattggcgggctggacgacggggacaaccctcacagcccagtggccctggaggccatgctgggccttgcgaggctggtgcacctggtggagtcctgggacctgcgctcagggctgctgcacgtggccatccgcatccggcctttcttcgacagtgagaagatggagttccggacggcatctatccgcctctttgggcaccttaacaaggtctgccacggagactgtgaggacgtcttcctggaccaggtggtgggcgggctggcgcccctgctgctgcacctgcaggaccctcaggccaccgtggccagcgcctgcaggtttgccctgcgcatgtgtggccccaatctggcatgtgaggagctctcagctgctttccagaaacacctgcaggagggccgagccctgcacttcggggagttcctcaacaccacctgcaagcacctgatgcaccatttcccagacctgctgggccgtctcctgaccacctgcctgttctacttcaagagcagctgggagaacgtccgagctgctgcacccctgttcaccggtaagcaccaccccctgccccacccccacgccgcccggcagccccgcctgatgcccccacttcacagggttcctggtgctgcactcggagcccaggcagcagccgcaggtggacctggaccagctcattgcggcgctccagatcctgctgaaggacccggcccccgaggtgcggacgagggctgctgaggccctgggccgcctggtgaagctcgcctaaggctccggccagcacccccagcgaggagtatgcacccagacctgtgcctgagctccaagacagggcctcctgaggaccacagcctgggcacacgactggaggggcctggccccagaacaggcactgctggggaccaaacccaagcccttcagtgagggatgtgcccaataaactcatctgctccca

SEQ ID NO: 5725 - protein, 741 aa, Homo sapiens; identical to SEQ ID NO: 5717

SEQ ID NO: 5726 - DNA, 6153 bp, Homo sapiens
actccgggcccctgctgggcgggaaggcggcgccccggccgaggtggcggcggctcctcagatgggagaagaagttgtccatgttcacactgggtgaaggaagctgaaaccacagacatgactgagtcctccatgaagaagctggcctccaccctgctggacgccatcaccgataaggaccccctggtgcaggagcaggtctgcagtgccctgtgctccctcggggaggcgcggccggtggagacgctccgtgcctgcgaggagtatctgcggcagcatgacaagctggcacacccataccgagcagcggtcctgagggccatggagagggtcctgagcagtcgcgccagtgagctggacaaggacacagccagcaccatcatcctcctggcctccagcgagatgaccaagacgaaggacctggtctgggactggcagcaggcggcgagtggcgtcctggtggccgtgggaagacagttcatcagcaaggtgatggaggagctgctgcgcaggctgcaccctgggaccctgccacactgcgccgtgctgcacaccctcgccagcctctcggtggccaacgcgttcggcgtagtccccttcctgccatccgtcctgagctccctgctgcccgtgctgggcgtggccaagcaggacacggtgcgcgtggccttctgctccgctctgcagcgcttcagcgagggtgccctggagtacctagccaacctggaccgagccccagaccccacggtcaggaaggacgcctttgccaccgacatcttcagcgcctacgatgttctcttccatcagtggctgcagagtcgagaagccaagctccgtcttgccgtggtggaggctctggggcctatgagccatctgctgcccagtgagaggctggaagagcagctgcccaagctcctccctgggattctcgccctctacaagaagcacgcagagaccttctacttgtccaagagcctgggccagatcctcgaggcagctgtgagtgtgggcagccgcacactggagacccagctggatgccctcttggctgcactgcactcccagatctgtgtgcctgtggagtcctcaagccccctggtgatgagtaaccagaaggaggtgctgcgctgcttcactgtgctggcctgcagctcgcctgaccgcctactggccttcctgctgcccaggctggacaccagcaatgagaggacccgcgtgggcaccctgcaggtggtcagacatgtcatcaactcagctgctgctcagatggaagataaaaagccctttatcctgtcttccatgaggcttcctctcctggacaccaacagcaaggtgaagcgggcagtggtgcaggtgattagcgccatggcccaccacggctacctggagcagcctggaggtgaggcgatgatcgagtacatcgtgcagcagtgcgcgctgccccccgagcaggagcctgagaagccaggccccggcagcaaggaccccaaggccgacagcgtgcgggccatcagcgtgcgcaccctctacctggtcagcaccaccgtggacaggatgagtcacgtcctctggccatacctgctccagttcctcacccctgtgcgcttcactggggccctgactccgctctgcaggagcctcgtgcatctggcgcagaagaggcaggaggccggggccgacgccttcctcatccagtacgacgcccatgcgagcctcccgtctccctatgctgtaaccggaagactgttggttgtgtcttccagcccctacctaggggacggacgtggggcagcggcgctgcgcctcctcagtgttctgcacccaaacattcaccctttgctgggtcagcattgggaaacgactgtcccgctgctgctggggtacctggatgagcacacagaagagaccctgccacaggaggagtgggaggagaagctgttgatgttcctgcgagacaccctggccatcatttctgacaacgcgtggatctgccagctgagcctggagctgtgcaggcagctgccctgctacgatgaggcaccccaggagaagaacttcctgtacaaatgcataggcaccaccctgggtgctgcttcaagtaaggaggtggtgaggaagcaccttcaagagctgctggagacggccagataccaggaggaggcagaacgcgagggcctcgcctgctgcttcgggatctgtgccatctcccacctcgaggacacgctggcccagctggaggacttcgtgaggtcagaggtcttcagaaaatccattggcattctcaacatttttaagattcaggtggtgccgtgcacggctgggtcacacctctgctgtcactgactggctctggcccttcttctgggaggatttcaggagtttctgagccgaggattcccgtcggggagtgtaattgtgtaactgaagtcccgctggttcctctggcctctcaggatcgaagtgagaacgaagtggagaaggtgaagagtgctctgatcctgtgctatgggcacgtggcggcccgggccccccgggagctggtgctggccaaggtagagtcagacatcctccggaacatctgccagcacttcagcaccaaggacccagccctgaagctgtgccttgtccagagtgtgtgcatggtcagccgcgccatctgcagcagcacccaggctggctccttccacttcacccggaaagcagagctggtggcacagatgatggagttcatcagggcagagcccccggactccttgaggacacctattcggaagaaagccatgctcacctgcacttacttggtctccgtggagccagcgctggacgagcaggcccgggcggatgtgatccatggctgcctgcacagcatcatggccctgctgcctgagcccaaggaggaggacggaggctgccagaagtccctgtatctggagacactgcacgcccttgaggatctgctgacgagcctcctgcagcggaacatgaccccccaaggcctgcagatcatgattgagcacctgagcccatggatcaagtccccaagaggtcacgagcgggcgcgggccctgggcctgagcgccctcctgctgcgctacttcctggagcacctgcgtgtcagcgccctggtgcccttccacaacctgggccttctcatcggcctcttctccccacggtgtgcggacctgtggcctgccacccgccaggaggccgtggactgtgtctactccctgctgtacctccagctcggctatgaggattattgccaagcgcctccccccagaccagctcatcagcctcttgctaaccatgtttgaggccctgggagaccccgaaaagaactgctcccgagcagctaccgtcatgatcaactgcctgctgcaggagcggggcggtgtgctccaggagaaggtgcccgagatcgtgagcgtcctgcgctccaagcttcaggaggcccagggagagcacgtcctgccggccgcccagcacagcgtgtacctcctggccacccagcactgcgcagccgtggtgtccagcctcctgggcagccccttgcccttggacagccacacctgcatgctgtggcgggcgctggcggtggagcctcgcctagctgcccaggtcctggggctgctgctggagaagatgagtagggacgtccctttcaaggagagccgggccttcctgctgggccgcaccccagaccgcgtggccacgctgctgcctctctcggctacctgtgcactgtttgaggtcatgtccacgcctgcagcggggcccgcggtgctcgagctctacccccagctgtttgtggtgcttctgctgcgcgtcagctgcaccgtgggtgtccagctgccccggaacctgcaggcccaggaaaggaggggtgccagtccagccctagccaccaggaacctggaaccctgcagctctgcagtggacaccctgcggtccatgctactccgcagcggcagcgaggatgtggtacagcgcatggacctggagggaggctgggaactgctcaggacctcggcggggcatgaggagggggccaccaggttggccagggccatggctgagcacgcagggccccgactccccctggtgctgaagacgctggcatgcacacacagcagtgcgtatgagaaccagagggtgaccaccaccgccttcctggccgagctgctgaacagcaacgtggccaacgacctcatgctcttggactcgctgctggagagcctggcggctcgccagaaggacacatgcgccagcgtgcggaggctggtgctccgcggcctggccaacctggcctccggctgccctgacaaggtgcgaacccacggcccccagctcctcacagccatgattggcgggctggacgacggggacaaccctcacagcccagtggccctggaggccatgctgggccttgcgaggctggtgcacctggtggagtcctgggacctgcgctcagggctgctgcacgtggccatccgcatccggcctttcttcgacagtgagaagatggagttccggacggcatctatccgcctctttgggcaccttaacaaggtctgccacggagactgtgaggacgtcttcctggaccaggtggtgggcgggctggcgcccctgctgctgcacctgcaggaccctcaggccaccgtggccagcgcctgcaggtttgccctgcgcatgtgtggccccaatctggcatgtgaggagctctcagctgctttccagaaacacctgcaggagggccgagccctgcacttcggggagttcctcaacaccacctgcaagcacctgatgcaccatttcccagacctgctgggccgtctcctgaccacctgcctgttctacttcaagagcagctgggagaacgtccgagctgctgcacccctgttcaccggtaagcaccaccccctgccccacccccacgccgcccggcagccccgcctgatgcccccacttcacagggttcctggtgctgcactcggagcccaggcagcagccgcaggtggacctggaccagctcattgcggcgctccagatcctgctgaaggacccggcccccgaggtgcggacgagggctgctgaggccctgggccgcctggtgaagctcgcctaaggctccggccagcacccccagcgaggagtatgcacccagacctgtgcctgagctccaagacagggcctcctgaggaccacagcctgggcacacgactggaggggcctggccccagaacaggcactgctggggaccaaacccaagcccttcagtgagggatgtgcccaataaactcatctgctcccagcgagtgactgacagggtgcgatgctgagcctcttaggggatgggccagagggtgccctggactggctgtgttgtccccactgtttttgcaaaattgagtgaggggaaggctcggcgctgtggtgggggcggctttgttggcaaccccaattcaagaaggtgggagcaccaggcagcacagggtaaaggctctgttgacttcagcacgaccaccccagccccaggcaggcagaacagctaggtgaagaggcggacagtcccgtctgcccccgaggagaagacccacggctgggtggggtggaagatgacgtccagcactcccagatctcgggtcagcacgtgtcccttcagcaccttgacgggcaccagcaaggggttctgcagaaggtcactgtggggacgaggagggctcagggcacggccagacaccactgccctggggagggggccaggcagggtcagcactcacttgtacaccatgccatggcagacgatgacactgccgtcgtccgagcctgacgcaaagagtgggtaccgcgggtggaaggccacagcccgcagagccttcttgtggtgtctggggggagggaaccaggttgaaggcaggctcgggctgaagggaggggctctgctggccgcctccacccccagctttcctcacctcagcatcctgtatggcttggtggaaagatccaggtcaaaccacaccagcttgctatcgtagctcccacagatgacgttgtcacctagggccaaaggctgtgatgcaggtgttcccgctctcacctgcagggtgcactgccctgcccgtcacctacacccctcacctgcagggtgca

SEQ ID NO: 5727 - protein, 741 aa, Homo sapiens; identical to SEQ ID NO: 5717

SEQ ID NO: 5728 - DNA, 218 bp, Homo sapiens
cattcgcagcttctccaggccacctgcattccttgtctcagagcctccctcctgcatcctccaagccagcagttgtgggatgggagaagaagttgtccatgttcacactgggtgaaggaagctgaaaccacagacatgactgagtcctccatgaagagtgagtgcatggggattgggagtggccgggtgtgaggcctctcttgcctctgggtggtcag

SEQ ID NO: 5729 - DNA, 1635 bp, Homo sapiens
caaccagcgaacattaggttaaaacagagatcctggcacacccataccgagcagcggtcctgagggccatggagagggtcctgagcagtcgcgccagtgagctggacaaggacacagccagcaccatcatcctcctggcctccagcgagatgaccaagacgaaggacctggtctgggactggcagcaggcggcgagtggcgtcctggtggccgtgggaagacagttcatcagcaaggtgatggaggagctgctgcgcaggctgcaccctgggaccctgccacactgcgccgtgctgcacaccctcgccagcctctcggtggccaacgcgttcggcgtagtccccttcctgccatccgtcctgagctccctgctgcccgtgctgggcgtggccaagcaggacacggtgcgcgtggccttctgctccgctctgcagcgcttcagcgagggtgccctggagtacctagccaacctggaccgagccccagaccccacggtcaggaaggacgcctttgccaccgacatcttcagcgcctacgatgttctcttccatcagtggctgcagagtcgagaagccaagctccgtcttgccgtggtggaggctctggggcctatgagccatctgctgcccagtgagaggctggaagagcagctgcccaagctcctccctgggattctcgccctctacaagaagcacgcagagaccttctacttgtccaagagcctgggccagatcctcgaggcagctgtgagtgtgggcagccgcacactggagacccagctggatgccctcttggctgcactgcactcccagatctgtgtgcctgtggagtcctcaagccccctggtgatgagtaaccagaaggaggtgctgcgctgcttcactgtgctggcctgcagctcgcctgaccgcctactggccttcctgctgcccaggctggacaccagcaatgagaggacccgcgtgggcaccctgcaggtggtcagacatgtcatcaactcagctggtgagtgcctccatgctagcctggccgccacccctggccatgtccaggatggagcaggtcctggcagattgtgtccctctaagtgaaagcaccatcctgctttgaattctctagaaagatttccctacttactattttgcaaaattctaaactttttgaaaagttgcaagggtggtacctttctacccttcgccatatgatggtggctcacacttgctttgacagctggctgcagacaccatgcgtggccacactccccaggtgaccatgcctctgagggttcccagagcctaagacagccatccctgagcccactgctctagctcattctgggatctattcaaagacacactttggtttagtttggttgtctcttagacttgtttgcccaagaggagcctttttactctttttaagagatgaggagaccaattgtttcgtagaatgtccctcaatttacatatgtgtgacggtttcttcgcaattagactaaaaaaattcacgtttccttgttttaaggctaattttttttttttttagtggtcttgctctgtcgccaggctggagttgcagtgagctgagatggctaaaccgcactcaagcctggacaacagagtgagactccgtctc

SEQ ID NO: 5730 - protein, 340 aa, Homo sapiens
MERVLSSRASELDKDTASTIILLASSEMTKTKDLVWDWQQAASGVLVAVGRQFISKVMEELLRRLHPGTLPHCAVLHTLASLSVANAFGVVPFLPSVLSSLLPVLGVAKQDTVRVAFCSALQRFSEGALEYLANLDRAPDPTVRKDAFATDIFSAYDVLFHQWLQSREAKLRLAVVEALGPMSHLLPSERLEEQLPKLLPGILALYKKHAETFYLSKSLGQILEAAVSVGSRTLETQLDALLAALHSQICVPVESSSPLVMSNQKEVLRCFTVLACSSPDRLLAFLLPRLDTSNERTRVGTLQVVRHVINSAGECLHASLAATPGHVQDGAGPGRLCPSK

SEQ ID NO: 5731 - DNA, 5061 bp, Homo sapiens
caaccagcgaacattaggttaaaacagagatcctggcacacccataccgagcagcggtcctgagggccatggagagggtcctgagcagtcgcgccagtgagctggacaaggacacagccagcaccatcatcctcctggcctccagcgagatgaccaagacgaaggacctggtctgggactggcagcaggcggcgagtggcgtcctggtggccgtgggaagacagttcatcagcaaggtgatggaggagctgctgcgcaggctgcaccctgggaccctgccacactgcgccgtgctgcacaccctcgccagcctctcggtggccaacgcgttcggcgtagtccccttcctgccatccgtcctgagctccctgctgcccgtgctgggcgtggccaagcaggacacggtgcgcgtggccttctgctccgctctgcagcgcttcagcgagggtgccctggagtacctagccaacctggaccgagccccagaccccacggtcaggaaggacgcctttgccaccgacatcttcagcgcctacgatgttctcttccatcagtggctgcagagtcgagaagccaagctccgtcttgccgtggtggaggctctggggcctatgagccatctgctgcccagtgagaggctggaagagcagctgcccaagctcctccctgggattctcgccctctacaagaagcacgcagagaccttctacttgtccaagagcctgggccagatcctcgaggcagctgtgagtgtgggcagccgcacactggagacccagctggatgccctcttggctgcactgcactcccagatctgtgtgcctgtggagtcctcaagccccctggtgatgagtaaccagaaggaggtgctgcgctgcttcactgtgctggcctgcagctcgcctgaccgcctactggccttcctgctgcccaggctggacaccagcaatgagaggacccgcgtgggcaccctgcaggtggtcagacatgtcatcaactcagctgctgctcagatggaagataaaaagccctttatcctgtcttccatgaggcttcctctcctggacaccaacagcaaggtgaagcgggcagtggtgcaggtgattagcgccatggcccaccacggctacctggagcagcctggaggtgaggcgatgatcgagtacatcgtgcagcagtgcgcgctgccccccgagcaggagcctgagaagccaggccccggcagcaaggaccccaaggccgacagcgtgcgggccatcagcgtgcgcaccctctacctggtcagcaccaccgtggacaggatgagtcacgtcctctggccatacctgctccagttcctcacccctgtgcgcttcactggggccctgactccgctctgcaggagcctcgtgcatctggcgcagaagaggcaggaggccggggccgacgccttcctcatccagtacgacgcccatgcgagcctcccgtctccctatgctgtaaccggaagactgttggttgtgtcttccagcccctacctaggggacggacgtggggcagcggcgctgcgcctcctcagtgttctgcacccaaacattcaccctttgctgggtcagcattgggaaacgactgtcccgctgctgctggggtacctggatgagcacacagaagagaccctgccacaggaggagtgggaggagaagctgttgatgttcctgcgagacaccctggccatcatttctgacaacgcgtggatctgccagctgagcctggagctgtgcaggcagctgccctgctacgatgaggcaccccaggagaagaacttcctgtacaaatgcataggcaccaccctgggtgctgcttcaagtaaggaggtggtgaggaagcaccttcaagagctgctggagacggccagataccaggaggaggcagaacgcgagggcctcgcctgctgcttcgggatctgtgccatctcccacctcgaggacacgctggcccagctggaggacttcgtgaggtcagaggtcttcagaaaatccattggcattctcaacatttttaagattcaggtggtgccgtgcacggctgggtcacacctctgctgtcactgactggctctggcccttcttctgggaggatttcaggagtttctgagccgaggattcccgtcggggagtgtaattgtgtaactgaagtcccgctggttcctctggcctctcaggatcgaagtgagaacgaagtggagaaggtgaagagtgctctgatcctgtgctatgggcacgtggcggcccgggccccccgggagctggtgctggccaaggtagagtcagacatcctccggaacatctgccagcacttcagcaccaaggacccagccctgaagctgtgccttgtccagagtgtgtgcatggtcagccgcgccatctgcagcagcacccaggctggctccttccacttcacccggaaagcagagctggtggcacagatgatggagttcatcagggcagagcccccggactccttgaggacacctattcggaagaaagccatgctcacctgcacttacttggtctccgtggagccagcgctggacgagcaggcccgggcggatgtgatccatggctgcctgcacagcatcatggccctgctgcctgagcccaaggaggaggacggaggctgccagaagtccctgtatctggagacactgcacgcccttgaggatctgctgacgagcctcctgcagcggaacatgaccccccaaggcctgcagatcatgattgagcacctgagcccatggatcaagtccccaagaggtcacgagcgggcgcgggccctgggcctgagcgccctcctgctgcgctacttcctggagcacctgcgtgtcagcgccctggtgcccttccacaacctgggccttctcatcggcctcttctccccacggtgtgcggacctgtggcctgccacccgccaggaggccgtggactgtgtctactccctgctgtacctccagctcggctatgaggattattgccaagcgcctccccccagaccagctcatcagcctcttgctaaccatgtttgaggccctgggagaccccgaaaagaactgctcccgagcagctaccgtcatgatcaactgcctgctgcaggagcggggcggtgtgctccaggagaaggtgcccgagatcgtgagcgtcctgcgctccaagcttcaggaggcccagggagagcacgtcctgccggccgcccagcacagcgtgtacctcctggccacccagcactgcgcagccgtggtgtccagcctcctgggcagccccttgcccttggacagccacacctgcatgctgtggcgggcgctggcggtggagcctcgcctagctgcccaggtcctggggctgctgctggagaagatgagtagggacgtccctttcaaggagagccgggccttcctgctgggccgcaccccagaccgcgtggccacgctgctgcctctctcggctacctgtgcactgtttgaggtcatgtccacgcctgcagcggggcccgcggtgctcgagctctacccccagctgtttgtggtgcttctgctgcgcgtcagctgcaccgtgggtgtccagctgccccggaacctgcaggcccaggaaaggaggggtgccagtccagccctagccaccaggaacctggaaccctgcagctctgcagtggacaccctgcggtccatgctactccgcagcggcagcgaggatgtggtacagcgcatggacctggagggaggctgggaactgctcaggacctcggcggggcatgaggagggggccaccaggttggccagggccatggctgagcacgcagggccccgactccccctggtgctgaagacgctggcatgcacacacagcagtgcgtatgagaaccagagggtgaccaccaccgccttcctggccgagctgctgaacagcaacgtggccaacgacctcatgctcttggactcgctgctggagagcctggcggctcgccagaaggacacatgcgccagcgtgcggaggctggtgctccgcggcctggccaacctggcctccggctgccctgacaaggtgcgaacccacggcccccagctcctcacagccatgattggcgggctggacgacggggacaaccctcacagcccagtggccctggaggccatgctgggccttgcgaggctggtgcacctggtggagtcctgggacctgcgctcagggctgctgcacgtggccatccgcatccggcctttcttcgacagtgagaagatggagttccggacggcatctatccgcctctttgggcaccttaacaaggtctgccacggagactgtgaggacgtcttcctggaccaggtggtgggcgggctggcgcccctgctgctgcacctgcaggaccctcaggccaccgtggccagcgcctgcaggtttgccctgcgcatgtgtggccccaatctggcatgtgaggagctctcagctgctttccagaaacacctgcaggagggccgagccctgcacttcggggagttcctcaacaccacctgcaagcacctgatgcaccatttcccagacctgctgggccgtctcctgaccacctgcctgttctacttcaagagcagctgggagaacgtccgagctgctgcacccctgttcaccggtaagcaccaccccctgccccacccccacgccgcccggcagccccgcctgatgcccccacttcacagggttcctggtgctgcactcggagcccaggcagcagccgcaggtggacctggaccagctcattgcggcgctccagatcctgctgaaggacccggcccccgaggtgcggacgagggctgctgaggccctgggccgcctggtgaagctcgcctaaggctccggccagcacccccagcgaggagtatgcacccagacctgtgcctgagctccaagacagggcctcctgaggaccacagcctgggcacacgactggaggggcctggccccagaacaggcactgctggggaccaaacccaagcccttcagtgagggatgtgcccaataaactcatctgctccca

SEQ ID NO: 5732 - protein, 673 aa, Homo sapiens
MERVLSSRASELDKDTASTIILLASSEMTKTKDLVWDWQQAASGVLVAVGRQFISKVMEELLRRLHPGTLPHCAVLHTLASLSVANAFGVVPFLPSVLSSLLPVLGVAKQDTVRVAFCSALQRFSEGALEYLANLDRAPDPTVRKDAFATDIFSAYDVLFHQWLQSREAKLRLAVVEALGPMSHLLPSERLEEQLPKLLPGILALYKKHAETFYLSKSLGQILEAAVSVGSRTLETQLDALLAALHSQICVPVESSSPLVMSNQKEVLRCFTVLACSSPDRLLAFLLPRLDTSNERTRVGTLQVVRHVINSAAAQMEDKKPFILSSMRLPLLDTNSKVKRAVVQVISAMAHHGYLEQPGGEAMIEYIVQQCALPPEQEPEKPGPGSKDPKADSVRAISVRTLYLVSTTVDRMSHVLWPYLLQFLTPVRFTGALTPLCRSLVHLAQKRQEAGADAFLIQYDAHASLPSPYAVTGRLLVVSSSPYLGDGRGAAALRLLSVLHPNIHPLLGQHWETTVPLLLGYLDEHTEETLPQEEWEEKLLMFLRDTLAIISDNAWICQLSLELCRQLPCYDEAPQEKNFLYKCIGTTLGAASSKEVVRKHLQELLETARYQEEAEREGLACCFGICAISHLEDTLAQLEDFVRSEVFRKSIGILNIFKIQVVPCTAGSHLCCH

SEQ ID NO: 5733 - DNA, 5900 bp, Homo sapiens
caaccagcgaacattaggttaaaacagagatcctggcacacccataccgagcagcggtcctgagggccatggagagggtcctgagcagtcgcgccagtgagctggacaaggacacagccagcaccatcatcctcctggcctccagcgagatgaccaagacgaaggacctggtctgggactggcagcaggcggcgagtggcgtcctggtggccgtgggaagacagttcatcagcaaggtgatggaggagctgctgcgcaggctgcaccctgggaccctgccacactgcgccgtgctgcacaccctcgccagcctctcggtggccaacgcgttcggcgtagtccccttcctgccatccgtcctgagctccctgctgcccgtgctgggcgtggccaagcaggacacggtgcgcgtggccttctgctccgctctgcagcgcttcagcgagggtgccctggagtacctagccaacctggaccgagccccagaccccacggtcaggaaggacgcctttgccaccgacatcttcagcgcctacgatgttctcttccatcagtggctgcagagtcgagaagccaagctccgtcttgccgtggtggaggctctggggcctatgagccatctgctgcccagtgagaggctggaagagcagctgcccaagctcctccctgggattctcgccctctacaagaagcacgcagagaccttctacttgtccaagagcctgggccagatcctcgaggcagctgtgagtgtgggcagccgcacactggagacccagctggatgccctcttggctgcactgcactcccagatctgtgtgcctgtggagtcctcaagccccctggtgatgagtaaccagaaggaggtgctgcgctgcttcactgtgctggcctgcagctcgcctgaccgcctactggccttcctgctgcccaggctggacaccagcaatgagaggacccgcgtgggcaccctgcaggtggtcagacatgtcatcaactcagctgctgctcagatggaagataaaaagccctttatcctgtcttccatgaggcttcctctcctggacaccaacagcaaggtgaagcgggcagtggtgcaggtgattagcgccatggcccaccacggctacctggagcagcctggaggtgaggcgatgatcgagtacatcgtgcagcagtgcgcgctgccccccgagcaggagcctgagaagccaggccccggcagcaaggaccccaaggccgacagcgtgcgggccatcagcgtgcgcaccctctacctggtcagcaccaccgtggacaggatgagtcacgtcctctggccatacctgctccagttcctcacccctgtgcgcttcactggggccctgactccgctctgcaggagcctcgtgcatctggcgcagaagaggcaggaggccggggccgacgccttcctcatccagtacgacgcccatgcgagcctcccgtctccctatgctgtaaccggaagactgttggttgtgtcttccagcccctacctaggggacggacgtggggcagcggcgctgcgcctcctcagtgttctgcacccaaacattcaccctttgctgggtcagcattgggaaacgactgtcccgctgctgctggggtacctggatgagcacacagaagagaccctgccacaggaggagtgggaggagaagctgttgatgttcctgcgagacaccctggccatcatttctgacaacgcgtggatctgccagctgagcctggagctgtgcaggcagctgccctgctacgatgaggcaccccaggagaagaacttcctgtacaaatgcataggcaccaccctgggtgctgcttcaagtaaggaggtggtgaggaagcaccttcaagagctgctggagacggccagataccaggaggaggcagaacgcgagggcctcgcctgctgcttcgggatctgtgccatctcccacctcgaggacacgctggcccagctggaggacttcgtgaggtcagaggtcttcagaaaatccattggcattctcaacatttttaagattcaggtggtgccgtgcacggctgggtcacacctctgctgtcactgactggctctggcccttcttctgggaggatttcaggagtttctgagccgaggattcccgtcggggagtgtaattgtgtaactgaagtcccgctggttcctctggcctctcaggatcgaagtgagaacgaagtggagaaggtgaagagtgctctgatcctgtgctatgggcacgtggcggcccgggccccccgggagctggtgctggccaaggtagagtcagacatcctccggaacatctgccagcacttcagcaccaaggacccagccctgaagctgtgccttgtccagagtgtgtgcatggtcagccgcgccatctgcagcagcacccaggctggctccttccacttcacccggaaagcagagctggtggcacagatgatggagttcatcagggcagagcccccggactccttgaggacacctattcggaagaaagccatgctcacctgcacttacttggtctccgtggagccagcgctggacgagcaggcccgggcggatgtgatccatggctgcctgcacagcatcatggccctgctgcctgagcccaaggaggaggacggaggctgccagaagtccctgtatctggagacactgcacgcccttgaggatctgctgacgagcctcctgcagcggaacatgaccccccaaggcctgcagatcatgattgagcacctgagcccatggatcaagtccccaagaggtcacgagcgggcgcgggccctgggcctgagcgccctcctgctgcgctacttcctggagcacctgcgtgtcagcgccctggtgcccttccacaacctgggccttctcatcggcctcttctccccacggtgtgcggacctgtggcctgccacccgccaggaggccgtggactgtgtctactccctgctgtacctccagctcggctatgaggattattgccaagcgcctccccccagaccagctcatcagcctcttgctaaccatgtttgaggccctgggagaccccgaaaagaactgctcccgagcagctaccgtcatgatcaactgcctgctgcaggagcggggcggtgtgctccaggagaaggtgcccgagatcgtgagcgtcctgcgctccaagcttcaggaggcccagggagagcacgtcctgccggccgcccagcacagcgtgtacctcctggccacccagcactgcgcagccgtggtgtccagcctcctgggcagccccttgcccttggacagccacacctgcatgctgtggcgggcgctggcggtggagcctcgcctagctgcccaggtcctggggctgctgctggagaagatgagtagggacgtccctttcaaggagagccgggccttcctgctgggccgcaccccagaccgcgtggccacgctgctgcctctctcggctacctgtgcactgtttgaggtcatgtccacgcctgcagcggggcccgcggtgctcgagctctacccccagctgtttgtggtgcttctgctgcgcgtcagctgcaccgtgggtgtccagctgccccggaacctgcaggcccaggaaaggaggggtgccagtccagccctagccaccaggaacctggaaccctgcagctctgcagtggacaccctgcggtccatgctactccgcagcggcagcgaggatgtggtacagcgcatggacctggagggaggctgggaactgctcaggacctcggcggggcatgaggagggggccaccaggttggccagggccatggctgagcacgcagggccccgactccccctggtgctgaagacgctggcatgcacacacagcagtgcgtatgagaaccagagggtgaccaccaccgccttcctggccgagctgctgaacagcaacgtggccaacgacctcatgctcttggactcgctgctggagagcctggcggctcgccagaaggacacatgcgccagcgtgcggaggctggtgctccgcggcctggccaacctggcctccggctgccctgacaaggtgcgaacccacggcccccagctcctcacagccatgattggcgggctggacgacggggacaaccctcacagcccagtggccctggaggccatgctgggccttgcgaggctggtgcacctggtggagtcctgggacctgcgctcagggctgctgcacgtggccatccgcatccggcctttcttcgacagtgagaagatggagttccggacggcatctatccgcctctttgggcaccttaacaaggtctgccacggagactgtgaggacgtcttcctggaccaggtggtgggcgggctggcgcccctgctgctgcacctgcaggaccctcaggccaccgtggccagcgcctgcaggtttgccctgcgcatgtgtggccccaatctggcatgtgaggagctctcagctgctttccagaaacacctgcaggagggccgagccctgcacttcggggagttcctcaacaccacctgcaagcacctgatgcaccatttcccagacctgctgggccgtctcctgaccacctgcctgttctacttcaagagcagctgggagaacgtccgagctgctgcacccctgttcaccggtaagcaccaccccctgccccacccccacgccgcccggcagccccgcctgatgcccccacttcacagggttcctggtgctgcactcggagcccaggcagcagccgcaggtggacctggaccagctcattgcggcgctccagatcctgctgaaggacccggcccccgaggtgcggacgagggctgctgaggccctgggccgcctggtgaagctcgcctaaggctccggccagcacccccagcgaggagtatgcacccagacctgtgcctgagctccaagacagggcctcctgaggaccacagcctgggcacacgactggaggggcctggccccagaacaggcactgctggggaccaaacccaagcccttcagtgagggatgtgcccaataaactcatctgctcccagcgagtgactgacagggtgcgatgctgagcctcttaggggatgggccagagggtgccctggactggctgtgttgtccccactgtttttgcaaaattgagtgaggggaaggctcggcgctgtggtgggggcggctttgttggcaaccccaattcaagaaggtgggagcaccaggcagcacagggtaaaggctctgttgacttcagcacgaccaccccagccccaggcaggcagaacagctaggtgaagaggcggacagtcccgtctgcccccgaggagaagacccacggctgggtggggtggaagatgacgtccagcactcccagatctcgggtcagcacgtgtcccttcagcaccttgacgggcaccagcaaggggttctgcagaaggtcactgtggggacgaggagggctcagggcacggccagacaccactgccctggggagggggccaggcagggtcagcactcacttgtacaccatgccatggcagacgatgacactgccgtcgtccgagcctgacgcaaagagtgggtaccgcgggtggaaggccacagcccgcagagccttcttgtggtgtctggggggagggaaccaggttgaaggcaggctcgggctgaagggaggggctctgctggccgcctccacccccagctttcctcacctcagcatcctgtatggcttggtggaaagatccaggtcaaaccacaccagcttgctatcgtagctcccacagatgacgttgtcacctagggccaaaggctgtgatgcaggtgttcccgctctcacctgcagggtgcactgccctgcccgtcacctacacccctcacctgcagggtgca

SEQ ID NO: 5734 - protein, 673 aa, Homo sapiens; identical to SEQ ID NO: 5732

SEQ ID NO: 5735 - DNA, 5206 bp, Homo sapiens
ccaagactttcacgaagctcccaatccttcctactattgtttctcctccaaacgaccttgtcacgctttccttcaaatgtcctgcgtggctgtcttcactgagccggtagcacttctcctatgtgggcccacctccacctgccgtggcggccatagctgtcagagtggatgaggggactggcacacccataccgagcagcggtcctgagggccatggagagggtcctgagcagtcgcgccagtgagctggacaaggacacagccagcaccatcatcctcctggcctccagcgagatgaccaagacgaaggacctggtctgggactggcagcaggcggcgagtggcgtcctggtggccgtgggaagacagttcatcagcaaggtgatggaggagctgctgcgcaggctgcaccctgggaccctgccacactgcgccgtgctgcacaccctcgccagcctctcggtggccaacgcgttcggcgtagtccccttcctgccatccgtcctgagctccctgctgcccgtgctgggcgtggccaagcaggacacggtgcgcgtggccttctgctccgctctgcagcgcttcagcgagggtgccctggagtacctagccaacctggaccgagccccagaccccacggtcaggaaggacgcctttgccaccgacatcttcagcgcctacgatgttctcttccatcagtggctgcagagtcgagaagccaagctccgtcttgccgtggtggaggctctggggcctatgagccatctgctgcccagtgagaggctggaagagcagctgcccaagctcctccctgggattctcgccctctacaagaagcacgcagagaccttctacttgtccaagagcctgggccagatcctcgaggcagctgtgagtgtgggcagccgcacactggagacccagctggatgccctcttggctgcactgcactcccagatctgtgtgcctgtggagtcctcaagccccctggtgatgagtaaccagaaggaggtgctgcgctgcttcactgtgctggcctgcagctcgcctgaccgcctactggccttcctgctgcccaggctggacaccagcaatgagaggacccgcgtgggcaccctgcaggtggtcagacatgtcatcaactcagctgctgctcagatggaagataaaaagccctttatcctgtcttccatgaggcttcctctcctggacaccaacagcaaggtgaagcgggcagtggtgcaggtgattagcgccatggcccaccacggctacctggagcagcctggaggtgaggcgatgatcgagtacatcgtgcagcagtgcgcgctgccccccgagcaggagcctgagaagccaggccccggcagcaaggaccccaaggccgacagcgtgcgggccatcagcgtgcgcaccctctacctggtcagcaccaccgtggacaggatgagtcacgtcctctggccatacctgctccagttcctcacccctgtgcgcttcactggggccctgactccgctctgcaggagcctcgtgcatctggcgcagaagaggcaggaggccggggccgacgccttcctcatccagtacgacgcccatgcgagcctcccgtctccctatgctgtaaccggaagactgttggttgtgtcttccagcccctacctaggggacggacgtggggcagcggcgctgcgcctcctcagtgttctgcacccaaacattcaccctttgctgggtcagcattgggaaacgactgtcccgctgctgctggggtacctggatgagcacacagaagagaccctgccacaggaggagtgggaggagaagctgttgatgttcctgcgagacaccctggccatcatttctgacaacgcgtggatctgccagctgagcctggagctgtgcaggcagctgccctgctacgatgaggcaccccaggagaagaacttcctgtacaaatgcataggcaccaccctgggtgctgcttcaagtaaggaggtggtgaggaagcaccttcaagagctgctggagacggccagataccaggaggaggcagaacgcgagggcctcgcctgctgcttcgggatctgtgccatctcccacctcgaggacacgctggcccagctggaggacttcgtgaggtcagaggtcttcagaaaatccattggcattctcaacatttttaagattcaggtggtgccgtgcacggctgggtcacacctctgctgtcactgactggctctggcccttcttctgggaggatttcaggagtttctgagccgaggattcccgtcggggagtgtaattgtgtaactgaagtcccgctggttcctctggcctctcaggatcgaagtgagaacgaagtggagaaggtgaagagtgctctgatcctgtgctatgggcacgtggcggcccgggccccccgggagctggtgctggccaaggtagagtcagacatcctccggaacatctgccagcacttcagcaccaaggacccagccctgaagctgtgccttgtccagagtgtgtgcatggtcagccgcgccatctgcagcagcacccaggctggctccttccacttcacccggaaagcagagctggtggcacagatgatggagttcatcagggcagagcccccggactccttgaggacacctattcggaagaaagccatgctcacctgcacttacttggtctccgtggagccagcgctggacgagcaggcccgggcggatgtgatccatggctgcctgcacagcatcatggccctgctgcctgagcccaaggaggaggacggaggctgccagaagtccctgtatctggagacactgcacgcccttgaggatctgctgacgagcctcctgcagcggaacatgaccccccaaggcctgcagatcatgattgagcacctgagcccatggatcaagtccccaagaggtcacgagcgggcgcgggccctgggcctgagcgccctcctgctgcgctacttcctggagcacctgcgtgtcagcgccctggtgcccttccacaacctgggccttctcatcggcctcttctccccacggtgtgcggacctgtggcctgccacccgccaggaggccgtggactgtgtctactccctgctgtacctccagctcggctatgaggattattgccaagcgcctccccccagaccagctcatcagcctcttgctaaccatgtttgaggccctgggagaccccgaaaagaactgctcccgagcagctaccgtcatgatcaactgcctgctgcaggagcggggcggtgtgctccaggagaaggtgcccgagatcgtgagcgtcctgcgctccaagcttcaggaggcccagggagagcacgtcctgccggccgcccagcacagcgtgtacctcctggccacccagcactgcgcagccgtggtgtccagcctcctgggcagccccttgcccttggacagccacacctgcatgctgtggcgggcgctggcggtggagcctcgcctagctgcccaggtcctggggctgctgctggagaagatgagtagggacgtccctttcaaggagagccgggccttcctgctgggccgcaccccagaccgcgtggccacgctgctgcctctctcggctacctgtgcactgtttgaggtcatgtccacgcctgcagcggggcccgcggtgctcgagctctacccccagctgtttgtggtgcttctgctgcgcgtcagctgcaccgtgggtgtccagctgccccggaacctgcaggcccaggaaaggaggggtgccagtccagccctagccaccaggaacctggaaccctgcagctctgcagtggacaccctgcggtccatgctactccgcagcggcagcgaggatgtggtacagcgcatggacctggagggaggctgggaactgctcaggacctcggcggggcatgaggagggggccaccaggttggccagggccatggctgagcacgcagggccccgactccccctggtgctgaagacgctggcatgcacacacagcagtgcgtatgagaaccagagggtgaccaccaccgccttcctggccgagctgctgaacagcaacgtggccaacgacctcatgctcttggactcgctgctggagagcctggcggctcgccagaaggacacatgcgccagcgtgcggaggctggtgctccgcggcctggccaacctggcctccggctgccctgacaaggtgcgaacccacggcccccagctcctcacagccatgattggcgggctggacgacggggacaaccctcacagcccagtggccctggaggccatgctgggccttgcgaggctggtgcacctggtggagtcctgggacctgcgctcagggctgctgcacgtggccatccgcatccggcctttcttcgacagtgagaagatggagttccggacggcatctatccgcctctttgggcaccttaacaaggtctgccacggagactgtgaggacgtcttcctggaccaggtggtgggcgggctggcgcccctgctgctgcacctgcaggaccctcaggccaccgtggccagcgcctgcaggtttgccctgcgcatgtgtggccccaatctggcatgtgaggagctctcagctgctttccagaaacacctgcaggagggccgagccctgcacttcggggagttcctcaacaccacctgcaagcacctgatgcaccatttcccagacctgctgggccgtctcctgaccacctgcctgttctacttcaagagcagctgggagaacgtccgagctgctgcacccctgttcaccggtaagcaccaccccctgccccacccccacgccgcccggcagccccgcctgatgcccccacttcacagggttcctggtgctgcactcggagcccaggcagcagccgcaggtggacctggaccagctcattgcggcgctccagatcctgctgaaggacccggcccccgaggtgcggacgagggctgctgaggccctgggccgcctggtgaagctcgcctaaggctccggccagcacccccagcgaggagtatgcacccagacctgtgcctgagctccaagacagggcctcctgaggaccacagcctgggcacacgactggaggggcctggccccagaacaggcactgctggggaccaaacccaagcccttcagtgagggatgtgcccaataaactcatctgctccca

SEQ ID NO: 5736 - protein, 688 aa, Homo sapiens
MRGLAHPYRAAVLRAMERVLSSRASELDKDTASTIILLASSEMTKTKDLVWDWQQAASGVLVAVGRQFISKVMEELLRRLHPGTLPHCAVLHTLASLSVANAFGVVPFLPSVLSSLLPVLGVAKQDTVRVAFCSALQRFSEGALEYLANLDRAPDPTVRKDAFATDIFSAYDVLFHQWLQSREAKLRLAVVEALGPMSHLLPSERLEEQLPKLLPGILALYKKHAETFYLSKSLGQILEAAVSVGSRTLETQLDALLAALHSQICVPVESSSPLVMSNQKEVLRCFTVLACSSPDRLLAFLLPRLDTSNERTRVGTLQVVRHVINSAAAQMEDKKPFILSSMRLPLLDTNSKVKRAVVQVISAMAHHGYLEQPGGEAMIEYIVQQCALPPEQEPEKPGPGSKDPKADSVRAISVRTLYLVSTTVDRMSHVLWPYLLQFLTPVRFTGALTPLCRSLVHLAQKRQEAGADAFLIQYDAHASLPSPYAVTGRLLVVSSSPYLGDGRGAAALRLLSVLHPNIHPLLGQHWETTVPLLLGYLDEHTEETLPQEEWEEKLLMFLRDTLAIISDNAWICQLSLELCRQLPCYDEAPQEKNFLYKCIGTTLGAASSKEVVRKHLQELLETARYQEEAEREGLACCFGICAISHLEDTLAQLEDFVRSEVFRKSIGILNIFKIQVVPCTAGSHLCCH

SEQ ID NO: 5737 - DNA, 6045 bp, Homo sapiens
ccaagactttcacgaagctcccaatccttcctactattgtttctcctccaaacgaccttgtcacgctttccttcaaatgtcctgcgtggctgtcttcactgagccggtagcacttctcctatgtgggcccacctccacctgccgtggcggccatagctgtcagagtggatgaggggactggcacacccataccgagcagcggtcctgagggccatggagagggtcctgagcagtcgcgccagtgagctggacaaggacacagccagcaccatcatcctcctggcctccagcgagatgaccaagacgaaggacctggtctgggactggcagcaggcggcgagtggcgtcctggtggccgtgggaagacagttcatcagcaaggtgatggaggagctgctgcgcaggctgcaccctgggaccctgccacactgcgccgtgctgcacaccctcgccagcctctcggtggccaacgcgttcggcgtagtccccttcctgccatccgtcctgagctccctgctgcccgtgctgggcgtggccaagcaggacacggtgcgcgtggccttctgctccgctctgcagcgcttcagcgagggtgccctggagtacctagccaacctggaccgagccccagaccccacggtcaggaaggacgcctttgccaccgacatcttcagcgcctacgatgttctcttccatcagtggctgcagagtcgagaagccaagctccgtcttgccgtggtggaggctctggggcctatgagccatctgctgcccagtgagaggctggaagagcagctgcccaagctcctccctgggattctcgccctctacaagaagcacgcagagaccttctacttgtccaagagcctgggccagatcctcgaggcagctgtgagtgtgggcagccgcacactggagacccagctggatgccctcttggctgcactgcactcccagatctgtgtgcctgtggagtcctcaagccccctggtgatgagtaaccagaaggaggtgctgcgctgcttcactgtgctggcctgcagctcgcctgaccgcctactggccttcctgctgcccaggctggacaccagcaatgagaggacccgcgtgggcaccctgcaggtggtcagacatgtcatcaactcagctgctgctcagatggaagataaaaagccctttatcctgtcttccatgaggcttcctctcctggacaccaacagcaaggtgaagcgggcagtggtgcaggtgattagcgccatggcccaccacggctacctggagcagcctggaggtgaggcgatgatcgagtacatcgtgcagcagtgcgcgctgccccccgagcaggagcctgagaagccaggccccggcagcaaggaccccaaggccgacagcgtgcgggccatcagcgtgcgcaccctctacctggtcagcaccaccgtggacaggatgagtcacgtcctctggccatacctgctccagttcctcacccctgtgcgcttcactggggccctgactccgctctgcaggagcctcgtgcatctggcgcagaagaggcaggaggccggggccgacgccttcctcatccagtacgacgcccatgcgagcctcccgtctccctatgctgtaaccggaagactgttggttgtgtcttccagcccctacctaggggacggacgtggggcagcggcgctgcgcctcctcagtgttctgcacccaaacattcaccctttgctgggtcagcattgggaaacgactgtcccgctgctgctggggtacctggatgagcacacagaagagaccctgccacaggaggagtgggaggagaagctgttgatgttcctgcgagacaccctggccatcatttctgacaacgcgtggatctgccagctgagcctggagctgtgcaggcagctgccctgctacgatgaggcaccccaggagaagaacttcctgtacaaatgcataggcaccaccctgggtgctgcttcaagtaaggaggtggtgaggaagcaccttcaagagctgctggagacggccagataccaggaggaggcagaacgcgagggcctcgcctgctgcttcgggatctgtgccatctcccacctcgaggacacgctggcccagctggaggacttcgtgaggtcagaggtcttcagaaaatccattggcattctcaacatttttaagattcaggtggtgccgtgcacggctgggtcacacctctgctgtcactgactggctctggcccttcttctgggaggatttcaggagtttctgagccgaggattcccgtcggggagtgtaattgtgtaactgaagtcccgctggttcctctggcctctcaggatcgaagtgagaacgaagtggagaaggtgaagagtgctctgatcctgtgctatgggcacgtggcggcccgggccccccgggagctggtgctggccaaggtagagtcagacatcctccggaacatctgccagcacttcagcaccaaggacccagccctgaagctgtgccttgtccagagtgtgtgcatggtcagccgcgccatctgcagcagcacccaggctggctccttccacttcacccggaaagcagagctggtggcacagatgatggagttcatcagggcagagcccccggactccttgaggacacctattcggaagaaagccatgctcacctgcacttacttggtctccgtggagccagcgctggacgagcaggcccgggcggatgtgatccatggctgcctgcacagcatcatggccctgctgcctgagcccaaggaggaggacggaggctgccagaagtccctgtatctggagacactgcacgcccttgaggatctgctgacgagcctcctgcagcggaacatgaccccccaaggcctgcagatcatgattgagcacctgagcccatggatcaagtccccaagaggtcacgagcgggcgcgggccctgggcctgagcgccctcctgctgcgctacttcctggagcacctgcgtgtcagcgccctggtgcccttccacaacctgggccttctcatcggcctcttctccccacggtgtgcggacctgtggcctgccacccgccaggaggccgtggactgtgtctactccctgctgtacctccagctcggctatgaggattattgccaagcgcctccccccagaccagctcatcagcctcttgctaaccatgtttgaggccctgggagaccccgaaaagaactgctcccgagcagctaccgtcatgatcaactgcctgctgcaggagcggggcggtgtgctccaggagaaggtgcccgagatcgtgagcgtcctgcgctccaagcttcaggaggcccagggagagcacgtcctgccggccgcccagcacagcgtgtacctcctggccacccagcactgcgcagccgtggtgtccagcctcctgggcagccccttgcccttggacagccacacctgcatgctgtggcgggcgctggcggtggagcctcgcctagctgcccaggtcctggggctgctgctggagaagatgagtagggacgtccctttcaaggagagccgggccttcctgctgggccgcaccccagaccgcgtggccacgctgctgcctctctcggctacctgtgcactgtttgaggtcatgtccacgcctgcagcggggcccgcggtgctcgagctctacccccagctgtttgtggtgcttctgctgcgcgtcagctgcaccgtgggtgtccagctgccccggaacctgcaggcccaggaaaggaggggtgccagtccagccctagccaccaggaacctggaaccctgcagctctgcagtggacaccctgcggtccatgctactccgcagcggcagcgaggatgtggtacagcgcatggacctggagggaggctgggaactgctcaggacctcggcggggcatgaggagggggccaccaggttggccagggccatggctgagcacgcagggccccgactccccctggtgctgaagacgctggcatgcacacacagcagtgcgtatgagaaccagagggtgaccaccaccgccttcctggccgagctgctgaacagcaacgtggccaacgacctcatgctcttggactcgctgctggagagcctggcggctcgccagaaggacacatgcgccagcgtgcggaggctggtgctccgcggcctggccaacctggcctccggctgccctgacaaggtgcgaacccacggcccccagctcctcacagccatgattggcgggctggacgacggggacaaccctcacagcccagtggccctggaggccatgctgggccttgcgaggctggtgcacctggtggagtcctgggacctgcgctcagggctgctgcacgtggccatccgcatccggcctttcttcgacagtgagaagatggagttccggacggcatctatccgcctctttgggcaccttaacaaggtctgccacggagactgtgaggacgtcttcctggaccaggtggtgggcgggctggcgcccctgctgctgcacctgcaggaccctcaggccaccgtggccagcgcctgcaggtttgccctgcgcatgtgtggccccaatctggcatgtgaggagctctcagctgctttccagaaacacctgcaggagggccgagccctgcacttcggggagttcctcaacaccacctgcaagcacctgatgcaccatttcccagacctgctgggccgtctcctgaccacctgcctgttctacttcaagagcagctgggagaacgtccgagctgctgcacccctgttcaccggtaagcaccaccccctgccccacccccacgccgcccggcagccccgcctgatgcccccacttcacagggttcctggtgctgcactcggagcccaggcagcagccgcaggtggacctggaccagctcattgcggcgctccagatcctgctgaaggacccggcccccgaggtgcggacgagggctgctgaggccctgggccgcctggtgaagctcgcctaaggctccggccagcacccccagcgaggagtatgcacccagacctgtgcctgagctccaagacagggcctcctgaggaccacagcctgggcacacgactggaggggcctggccccagaacaggcactgctggggaccaaacccaagcccttcagtgagggatgtgcccaataaactcatctgctcccagcgagtgactgacagggtgcgatgctgagcctcttaggggatgggccagagggtgccctggactggctgtgttgtccccactgtttttgcaaaattgagtgaggggaaggctcggcgctgtggtgggggcggctttgttggcaaccccaattcaagaaggtgggagcaccaggcagcacagggtaaaggctctgttgacttcagcacgaccaccccagccccaggcaggcagaacagctaggtgaagaggcggacagtcccgtctgcccccgaggagaagacccacggctgggtggggtggaagatgacgtccagcactcccagatctcgggtcagcacgtgtcccttcagcaccttgacgggcaccagcaaggggttctgcagaaggtcactgtggggacgaggagggctcagggcacggccagacaccactgccctggggagggggccaggcagggtcagcactcacttgtacaccatgccatggcagacgatgacactgccgtcgtccgagcctgacgcaaagagtgggtaccgcgggtggaaggccacagcccgcagagccttcttgtggtgtctggggggagggaaccaggttgaaggcaggctcgggctgaagggaggggctctgctggccgcctccacccccagctttcctcacctcagcatcctgtatggcttggtggaaagatccaggtcaaaccacaccagcttgctatcgtagctcccacagatgacgttgtcacctagggccaaaggctgtgatgcaggtgttcccgctctcacctgcagggtgcactgccctgcccgtcacctacacccctcacctgcagggtgca

SEQ ID NO: 5738 - protein, 688 aa, Homo sapiens; identical to SEQ ID NO: 5736

SEQ ID NO: 5739 - DNA, 1348 bp, Homo sapiens
aggatcgaagtgagaacgaagtggagaaggtgaagagtgctctgatcctgtgctatgggcacgtggcggcccgggccccccgggagctggtgctggccaaggtagagtcagacatcctccggaacatctgccagcacttcagcaccaaggacccagccctgaagctgtgccttgtccagagtgtgtgcatggtcagccgcgccatctgcagcagcacccaggctggctccttccacttcacccggaaagcagagctggtggcacagatgatggagttcatcagggcagagcccccggactccttgaggacacctattcggaagaaagccatgctcacctgcacttacttggtctccgtggagccagcgctggacgagcaggcccgggcggatgtgatccatggctgcctgcacagcatcatggccctgctgcctgagcccaaggaggaggacggaggctgccagaagtccctgtatctggagacactgcacgcccttgaggatctgctgacgagcctcctgcagcggaacatgaccccccaaggcctgcagatcatgattgagcacctgagcccatggatcaagtccccaagaggtcacgagcgggcgcgggccctgggcctgagcgccctcctgctgcgctacttcctggagcacctgcgtgtcagctggcgcccaagtagataccaggtttccatctgagcccaggatcctgtgcaagggccctggtgcccttccacaacctgggccttctcatcggcctcttctccccacggtgtgcggacctgtggcctgccacccgccaggaggccgtggactgtgtctactccctgctgtacctccagctcggctatgagggcttctcccgggactaccgcgatgacgtggcggagcggctcctcagcctcaaggacggcctcgtgcaccctgaccccgccattctcttccacacctgccacagtgtaggccagattattgccaagcgcctccccccagaccagctcatcagcctcttgctaaccatgtttgaggccctgggagaccccgaaaagaactgctcccgagcagctaccgtcatgatcaactgcctgctgcaggagcggggcggtgtgctccaggagaaggtgcccgagatcgtgagcgtcctgcgctccaagcttcaggaggcccagggagagcacgtcctgccggccgcccagcacagcgtgtacctcctggccacccagcactgcgcagccgtggtgtccagcctcctgggcagccccttgcccttggacaggtacccagctcagactccaggcttaggggtccctctggaatgatgctccccctggaatgatgctccccga

SEQ ID NO: 5740 - protein, 170 aa, Homo sapiens
MVSRAICSSTQAGSFHFTRKAELVAQMMEFIRAEPPDSLRTPIRKKAMLTCTYLVSVEPALDEQARADVIHGCLHSIMALLPEPKEEDGGCQKSLYLETLHALEDLLTSLLQRNMTPQGLQIMIEHLSPWIKSPRGHERARALGLSALLLRYFLEHLRVSWRPSRYQVSI

SEQ ID NO: 5741 - DNA, 2700 bp, Homo sapiens
aggatcgaagtgagaacgaagtggagaaggtgaagagtgctctgatcctgtgctatgggcacgtggcggcccgggccccccgggagctggtgctggccaaggtagagtcagacatcctccggaacatctgccagcacttcagcaccaaggacccagccctgaagctgtgccttgtccagagtgtgtgcatggtcagccgcgccatctgcagcagcacccaggctggctccttccacttcacccggaaagcagagctggtggcacagatgatggagttcatcagggcagagcccccggactccttgaggacacctattcggaagaaagccatgctcacctgcacttacttggtctccgtggagccagcgctggacgagcaggcccgggcggatgtgatccatggctgcctgcacagcatcatggccctgctgcctgagcccaaggaggaggacggaggctgccagaagtccctgtatctggagacactgcacgcccttgaggatctgctgacgagcctcctgcagcggaacatgaccccccaaggcctgcagatcatgattgagcacctgagcccatggatcaagtccccaagaggtcacgagcgggcgcgggccctgggcctgagcgccctcctgctgcgctacttcctggagcacctgcgtgtcagctggcgcccaagtagataccaggtttccatctgagcccaggatcctgtgcaagggccctggtgcccttccacaacctgggccttctcatcggcctcttctccccacggtgtgcggacctgtggcctgccacccgccaggaggccgtggactgtgtctactccctgctgtacctccagctcggctatgagggcttctcccgggactaccgcgatgacgtggcggagcggctcctcagcctcaaggacggcctcgtgcaccctgaccccgccattctcttccacacctgccacagtgtaggccagctggtcaaggtgctttgtctactgccatctgaagggaggatgaccctgggcaccgcgtcccctccccgacccatgcctgcctggtctactctgaggctcagctcacaacacaagcttgaattattgccaagcgcctccccccagaccagctcatcagcctcttgctaaccatgtttgaggccctgggagaccccgaaaagaactgctcccgagcagctaccgtcatgatcaactgcctgctgcaggagcggggcggtgtgctccaggagaaggtgcccgagatcgtgagcgtcctgcgctccaagcttcaggaggcccagggagagcacgtcctgccggccgcccagcacagcgtgtacctcctggccacccagcactgcgcagccgtggtgtccagcctcctgggcagccccttgcccttggacagccacacctgcatgctgtggcgggcgctggcggtggagcctcgcctagctgcccaggtcctggggctgctgctggagaagatgagtagggacgtccctttcaaggagagccgggccttcctgctgggccgcaccccagaccgcgtggccacgctgctgcctctctcggctacctgtgcactgtttgaggtcatgtccacgcctgcagcggggcccgcggtgctcgagctctacccccagctgtttgtggtgcttctgctgcgcgtcagctgcaccgtgggtgtccagctgccccggaacctgcaggcccaggaaaggaggggtgccagtccagccctagccaccaggaacctggaaccctgcagctctgcagtggacaccctgcggtccatgctactccgcagcggcagcgaggatgtggtacagcgcatggacctggagggaggctgggaactgctcaggacctcggcggggcatgaggagggggccaccaggttggccagggccatggctgagcacgcagggccccgactccccctggtgctgaagacgctggcatgcacacacagcagtgcgtatgagaaccagagggtgaccaccaccgccttcctggccgagctgctgaacagcaacgtggccaacgacctcatgctcttggactcgctgctggagagcctggcggctcgccagaaggacacatgcgccagcgtgcggaggctggtgctccgcggcctggccaacctggcctccggctgccctgacaaggtgcgaacccacggcccccagctcctcacagccatgattggcgggctggacgacggggacaaccctcacagcccagtggccctggaggccatgctgggccttgcgaggctggtgcacctggtggagtcctgggacctgcgctcagggctgctgcacgtggccatccgcatccggcctttcttcgacagtgtgaccgtggagagcgcggacctgcagggctgctgctttgctgggcctggcagcccccacccgtaaggcccccacccgtcggggtgtttcctggcccgggtcaggcaagggcacccatcaatggcagggggctaggcaggcaggcctgcaggggcacagcctgtgaggagacgtatgctgcatgtccttcccaggagaagatggagttccggacggcatctatccgcctctttgggcaccttaacaaggtctgccacggagactgtgaggacgtcttcctggaccaggtggtgggcgggctggcgcccctgctgctgcacctgcaggaccctcaggccaccgtggccagcg

SEQ ID NO: 5742 - protein, 424 aa, Homo sapiens
MFEALGDPEKNCSRAATVMINCLLQERGGVLQEKVPEIVSVLRSKLQEAQGEHVLPAAQHSVYLLATQHCAAVVSSLLGSPLPLDSHTCMLWRALAVEPRLAAQVLGLLLEKMSRDVPFKESRAFLLGRTPDRVATLLPLSATCALFEVMSTPAAGPAVLELYPQLFVVLLLRVSCTVGVQLPRNLQAQERRGASPALATRNLEPCSSAVDTLRSMLLRSGSEDVVQRMDLEGGWELLRTSAGHEEGATRLARAMAEHAGPRLPLVLKTLACTHSSAYENQRVTTTAFLAELLNSNVANDLMLLDSLLESLAARQKDTCASVRRLVLRGLANLASGCPDKVRTHGPQLLTAMIGGLDDGDNPHSPVALEAMLGLARLVHLVESWDLRSGLLHVAIRIRPFFDSVTVESADLQGCCFAGPGSPHP

SEQ ID NO: 5743 - DNA, 2922 bp, Homo sapiens
aggatcgaagtgagaacgaagtggagaaggtgaagagtgctctgatcctgtgctatgggcacgtggcggcccgggccccccgggagctggtgctggccaaggtagagtcagacatcctccggaacatctgccagcacttcagcaccaaggacccagccctgaagctgtgccttgtccagagtgtgtgcatggtcagccgcgccatctgcagcagcacccaggctggctccttccacttcacccggaaagcagagctggtggcacagatgatggagttcatcagggcagagcccccggactccttgaggacacctattcggaagaaagccatgctcacctgcacttacttggtctccgtggagccagcgctggacgagcaggcccgggcggatgtgatccatggctgcctgcacagcatcatggccctgctgcctgagcccaaggaggaggacggaggctgccagaagtccctgtatctggagacactgcacgcccttgaggatctgctgacgagcctcctgcagcggaacatgaccccccaaggcctgcagatcatgattgagcacctgagcccatggatcaagtccccaagaggtcacgagcgggcgcgggccctgggcctgagcgccctcctgctgcgctacttcctggagcacctgcgtgtcagcgccctggtgcccttccacaacctgggccttctcatcggcctcttctccccacggtgtgcggacctgtggcctgccacccgccaggaggccgtggactgtgtctactccctgctgtacctccagctcggctatgagggcttctcccgggactaccgcgatgacgtggcggagcggctcctcagcctcaaggacggcctcgtgcaccctgaccccgccattctcttccacacctgccacagtgtaggccagattattgccaagcgcctccccccagaccagctcatcagcctcttgctaaccatgtttgaggccctgggagaccccgaaaagaactgctcccgagcagctaccgtcatgatcaactgcctgctgcaggagcggggcggtgtgctccaggagaaggtgcccgagatcgtgagcgtcctgcgctccaagcttcaggaggcccagggagagcacgtcctgccggccgcccagcacagcgtgtacctcctggccacccagcactgcgcagccgtggtgtccagcctcctgggcagccccttgcccttggacagccacacctgcatgctgtggcgggcgctggcggtggagcctcgcctagctgcccaggtcctggggctgctgctggagaagatgagtagggacgtccctttcaaggagagccgggccttcctgctgggccgcaccccagaccgcgtggccacgctgctgcctctctcggctacctgtgcactgtttgaggtcatgtccacgcctgcagcggggcccgcggtgctcgagctctacccccagctgtttgtggtgcttctgctgcgcgtcagctgcaccgtgggtgtccagctgccccggaacctgcaggcccaggaaaggaggggtgccagtccagccctagccaccaggaacctggaaccctgcagctctgcagtggacaccctgcggtccatgctactccgcagcggcagcgaggatgtggtacagcgcatggacctggagggaggctgggaactgctcaggacctcggcggggcatgaggagggggccaccaggttggccagggccatggctgagcacgcagggccccgactccccctggtgctgaagacgctggcatgcacacacagcagtgcgtatgagaaccagagggtgaccaccaccgccttcctggccgagctgctgaacagcaacgtggccaacgacctcatgctcttggactcgctgctggagagcctggcggctcgccagaaggacacatgcgccagcgtgcggaggctggtgctccgcggcctggccaacctggcctccggctgccctgacaaggtgcgaacccacggcccccagctcctcacagccatgattggcgggctggacgacggggacaaccctcacagcccagtggccctggaggccatgctgggccttgcgaggctggtgcacctggtggagtcctgggacctgcgctcagggctgctgcacgtggccatccgcatccggcctttcttcgacagtgagaagatggagttccggacggcatctatccgcctctttgggcaccttaacaaggtctgccacggagactgtgaggacgtcttcctggaccaggtggtgggcgggctggcgcccctgctgctgcacctgcaggaccctcaggccaccgtggccagcgcctgcaggtttgccctgcgcatgtgtggccccaatctggcatgtgaggagctctcagctgctttccagaaacacctgcaggagggccgagccctgcacttcggggagttcctcaacaccacctgcaagcacctgatgcaccatttcccagacctgctgggccgtctcctgaccacctgcctgttctacttcaagagcagctgggagaacgtccgagctgctgcacccctgttcaccgggttcctggtgctgcactcggagcccaggcagcagccgcaggtggacctggaccagctcattgcggcgctccagatcctgctgaaggacccggcccccgaggtgcggacgagggctgctgaggccctgggccgcctggtgaagctcgcctaaggctccggccagcacccccagcgaggagtatgcacccagacctgtgcctgagctccaagacagggcctcctgaggaccacagcctgggcacacgactggaggggcctggccccagaacaggcactgctggggaccaaacccaagcccttcagtgagggatgtgcccaataaactcatctgctcccagcgagtgactgac

SEQ ID NO: 5744 - protein, 844 aa, Homo sapiens
MVSRAICSSTQAGSFHFTRKAELVAQMMEFIRAEPPDSLRTPIRKKAMLTCTYLVSVEPALDEQARADVIHGCLHSIMALLPEPKEEDGGCQKSLYLETLHALEDLLTSLLQRNMTPQGLQIMIEHLSPWIKSPRGHERARALGLSALLLRYFLEHLRVSALVPFHNLGLLIGLFSPRCADLWPATRQEAVDCVYSLLYLQLGYEGFSRDYRDDVAERLLSLKDGLVHPDPAILFHTCHSVGQIIAKRLPPDQLISLLLTMFEALGDPEKNCSRAATVMINCLLQERGGVLQEKVPEIVSVLRSKLQEAQGEHVLPAAQHSVYLLATQHCAAVVSSLLGSPLPLDSHTCMLWRALAVEPRLAAQVLGLLLEKMSRDVPFKESRAFLLGRTPDRVATLLPLSATCALFEVMSTPAAGPAVLELYPQLFVVLLLRVSCTVGVQLPRNLQAQERRGASPALATRNLEPCSSAVDTLRSMLLRSGSEDVVQRMDLEGGWELLRTSAGHEEGATRLARAMAEHAGPRLPLVLKTLACTHSSAYENQRVTTTAFLAELLNSNVANDLMLLDSLLESLAARQKDTCASVRRLVLRGLANLASGCPDKVRTHGPQLLTAMIGGLDDGDNPHSPVALEAMLGLARLVHLVESWDLRSGLLHVAIRIRPFFDSEKMEFRTASIRLFGHLNKVCHGDCEDVFLDQVVGGLAPLLLHLQDPQATVASACRFALRMCGPNLACEELSAAFQKHLQEGRALHFGEFLNTTCKHLMHHFPDLLGRLLTTCLFYFKSSWENVRAAAPLFTGFLVLHSEPRQQPQVDLDQLIAALQILLKDPAPEVRTRAAEALGRLVKLA

SEQ ID NO: 5745 - DNA, 3094 bp, Homo sapiens
aggatcgaagtgagaacgaagtggagaaggtgaagagtgctctgatcctgtgctatgggcacgtggcggcccgggccccccgggagctggtgctggccaaggtagagtcagacatcctccggaacatctgccagcacttcagcaccaaggacccagccctgaagctgtgccttgtccagagtgtgtgcatggtcagccgcgccatctgcagcagcacccaggctggctccttccacttcacccggaaagcagagctggtggcacagatgatggagttcatcagggcagagcccccggactccttgaggacacctattcggaagaaagccatgctcacctgcacttacttggtctccgtggagccagcgctggacgagcaggcccgggcggatgtgatccatggctgcctgcacagcatcatggccctgctgcctgagcccaaggaggaggacggaggctgccagaagtccctgtatctggagacactgcacgcccttgaggatctgctgacgagcctcctgcagcggaacatgaccccccaaggcctgcagatcatgattgagcacctgagcccatggatcaagtccccaagaggtcacgagcgggcgcgggccctgggcctgagcgccctcctgctgcgctacttcctggagcacctgcgtgtcagctggcgcccaagtagataccaggtttccatctgagcccaggatcctgtgcaagggccctggtgcccttccacaacctgggccttctcatcggcctcttctccccacggtgtgcggacctgtggcctgccacccgccaggaggccgtggactgtgtctactccctgctgtacctccagctcggctatgagggcttctcccgggactaccgcgatgacgtggcggagcggctcctcagcctcaaggacggcctcgtgcaccctgaccccgccattctcttccacacctgccacagtgtaggccagctggtcaaggtgctttgtctactgccatctgaagggaggatgaccctgggcaccgcgtcccctccccgacccatgcctgcctggtctactctgaggctcagctcacaacacaagcttgaattattgccaagcgcctccccccagaccagctcatcagcctcttgctaaccatgtttgaggccctgggagaccccgaaaagaactgctcccgagcagctaccgtcatgatcaactgcctgctgcaggagcggggcggtgtgctccaggagaaggtgcccgagatcgtgagcgtcctgcgctccaagcttcaggaggcccagggagagcacgtcctgccggccgcccagcacagcgtgtacctcctggccacccagcactgcgcagccgtggtgtccagcctcctgggcagccccttgcccttggacagccacacctgcatgctgtggcgggcgctggcggtggagcctcgcctagctgcccaggtcctggggctgctgctggagaagatgagtagggacgtccctttcaaggagagccgggccttcctgctgggccgcaccccagaccgcgtggccacgctgctgcctctctcggctacctgtgcactgtttgaggtcatgtccacgcctgcagcggggcccgcggtgctcgagctctacccccagctgtttgtggtgcttctgctgcgcgtcagctgcaccgtgggtgtccagctgccccggaacctgcaggcccaggaaaggaggggtgccagtccagccctagccaccaggaacctggaaccctgcagctctgcagtggacaccctgcggtccatgctactccgcagcggcagcgaggatgtggtacagcgcatggacctggagggaggctgggaactgctcaggacctcggcggggcatgaggagggggccaccaggttggccagggccatggctgagcacgcagggccccgactccccctggtgctgaagacgctggcatgcacacacagcagtgcgtatgagaaccagagggtgaccaccaccgccttcctggccgagctgctgaacagcaacgtggccaacgacctcatgctcttggactcgctgctggagagcctggcggctcgccagaaggacacatgcgccagcgtgcggaggctggtgctccgcggcctggccaacctggcctccggctgccctgacaaggtgcgaacccacggcccccagctcctcacagccatgattggcgggctggacgacggggacaaccctcacagcccagtggccctggaggccatgctgggccttgcgaggctggtgcacctggtggagtcctgggacctgcgctcagggctgctgcacgtggccatccgcatccggcctttcttcgacagtgagaagatggagttccggacggcatctatccgcctctttgggcaccttaacaaggtctgccacggagactgtgaggacgtcttcctggaccaggtggtgggcgggctggcgcccctgctgctgcacctgcaggaccctcaggccaccgtggccagcgcctgcaggtttgccctgcgcatgtgtggccccaatctggcatgtgaggagctctcagctgctttccagaaacacctgcaggagggccgagccctgcacttcggggagttcctcaacaccacctgcaagcacctgatgcaccatttcccagacctgctgggccgtctcctgaccacctgcctgttctacttcaagagcagctgggagaacgtccgagctgctgcacccctgttcaccgggttcctggtgctgcactcggagcccaggcagcagccgcaggtggacctggaccagctcattgcggcgctccagatcctgctgaaggacccggcccccgaggtgcggacgagggctgctgaggccctgggccgcctggtgaagctcgcctaaggctccggccagcacccccagcgaggagtatgcacccagacctgtgcctgagctccaagacagggcctcctgaggaccacagcctgggcacacgactggaggggcctggccccagaacaggcactgctggggaccaaacccaagcccttcagtgagggatgtgcccaataaactcatctgctcccagcgagtgactgac

SEQ ID NO: 5746 - protein, 584 aa, Homo sapiens
MFEALGDPEKNCSRAATVMINCLLQERGGVLQEKVPEIVSVLRSKLQEAQGEHVLPAAQHSVYLLATQHCAAVVSSLLGSPLPLDSHTCMLWRALAVEPRLAAQVLGLLLEKMSRDVPFKESRAFLLGRTPDRVATLLPLSATCALFEVMSTPAAGPAVLELYPQLFVVLLLRVSCTVGVQLPRNLQAQERRGASPALATRNLEPCSSAVDTLRSMLLRSGSEDVVQRMDLEGGWELLRTSAGHEEGATRLARAMAEHAGPRLPLVLKTLACTHSSAYENQRVTTTAFLAELLNSNVANDLMLLDSLLESLAARQKDTCASVRRLVLRGLANLASGCPDKVRTHGPQLLTAMIGGLDDGDNPHSPVALEAMLGLARLVHLVESWDLRSGLLHVAIRIRPFFDSEKMEFRTASIRLFGHLNKVCHGDCEDVFLDQVVGGLAPLLLHLQDPQATVASACRFALRMCGPNLACEELSAAFQKHLQEGRALHFGEFLNTTCKHLMHHFPDLLGRLLTTCLFYFKSSWENVRAAAPLFTGFLVLHSEPRQQPQVDLDQLIAALQILLKDPAPEVRTRAAEALGRLVKLA

SEQ ID NO: 5747 - DNA, 3920 bp, Homo sapiens
aggatcgaagtgagaacgaagtggagaaggtgaagagtgctctgatcctgtgctatgggcacgtggcggcccgggccccccgggagctggtgctggccaaggtagagtcagacatcctccggaacatctgccagcacttcagcaccaaggacccagccctgaagctgtgccttgtccagagtgtgtgcatggtcagccgcgccatctgcagcagcacccaggctggctccttccacttcacccggaaagcagagctggtggcacagatgatggagttcatcagggcagagcccccggactccttgaggacacctattcggaagaaagccatgctcacctgcacttacttggtctccgtggagccagcgctggacgagcaggcccgggcggatgtgatccatggctgcctgcacagcatcatggccctgctgcctgagcccaaggaggaggacggaggctgccagaagtccctgtatctggagacactgcacgcccttgaggatctgctgacgagcctcctgcagcggaacatgaccccccaaggcctgcagatcatgattgagcacctgagcccatggatcaagtccccaagaggtcacgagcgggcgcgggccctgggcctgagcgccctcctgctgcgctacttcctggagcacctgcgtgtcagctggcgcccaagtagataccaggtttccatctgagcccaggatcctgtgcaagggccctggtgcccttccacaacctgggccttctcatcggcctcttctccccacggtgtgcggacctgtggcctgccacccgccaggaggccgtggactgtgtctactccctgctgtacctccagctcggctatgagggcttctcccgggactaccgcgatgacgtggcggagcggctcctcagcctcaaggacggcctcgtgcaccctgaccccgccattctcttccacacctgccacagtgtaggccagctggtcaaggtgctttgtctactgccatctgaagggaggatgaccctgggcaccgcgtcccctccccgacccatgcctgcctggtctactctgaggctcagctcacaacacaagcttgaattattgccaagcgcctccccccagaccagctcatcagcctcttgctaaccatgtttgaggccctgggagaccccgaaaagaactgctcccgagcagctaccgtcatgatcaactgcctgctgcaggagcggggcggtgtgctccaggagaaggtgcccgagatcgtgagcgtcctgcgctccaagcttcaggaggcccagggagagcacgtcctgccggccgcccagcacagcgtgtacctcctggccacccagcactgcgcagccgtggtgtccagcctcctgggcagccccttgcccttggacagccacacctgcatgctgtggcgggcgctggcggtggagcctcgcctagctgcccaggtcctggggctgctgctggagaagatgagtagggacgtccctttcaaggagagccgggccttcctgctgggccgcaccccagaccgcgtggccacgctgctgcctctctcggctacctgtgcactgtttgaggtcatgtccacgcctgcagcggggcccgcggtgctcgagctctacccccagctgtttgtggtgcttctgctgcgcgtcagctgcaccgtgggtgtccagctgccccggaacctgcaggcccaggaaaggaggggtgccagtccagccctagccaccaggaacctggaaccctgcagctctgcagtggacaccctgcggtccatgctactccgcagcggcagcgaggatgtggtacagcgcatggacctggagggaggctgggaactgctcaggacctcggcggggcatgaggagggggccaccaggttggccagggccatggctgagcacgcagggccccgactccccctggtgctgaagacgctggcatgcacacacagcagtgcgtatgagaaccagagggtgaccaccaccgccttcctggccgagctgctgaacagcaacgtggccaacgacctcatgctcttggactcgctgctggagagcctggcggctcgccagaaggacacatgcgccagcgtgcggaggctggtgctccgcggcctggccaacctggcctccggctgccctgacaaggtgcgaacccacggcccccagctcctcacagccatgattggcgggctggacgacggggacaaccctcacagcccagtggccctggaggccatgctgggccttgcgaggctggtgcacctggtggagtcctgggacctgcgctcagggctgctgcacgtggccatccgcatccggcctttcttcgacagtgagaagatggagttccggacggcatctatccgcctctttgggcaccttaacaaggtctgccacggagactgtgaggacgtcttcctggaccaggtggtgggcgggctggcgcccctgctgctgcacctgcaggaccctcaggccaccgtggccagcgcctgcaggtttgccctgcgcatgtgtggccccaatctggcatgtgaggagctctcagctgctttccagaaacacctgcaggagggccgagccctgcacttcggggagttcctcaacaccacctgcaagcacctgatgcaccatttcccagacctgctgggccgtctcctgaccacctgcctgttctacttcaagagcagctgggagaacgtccgagctgctgcacccctgttcaccgggttcctggtgctgcactcggagcccaggcagcagccgcaggtggacctggaccagctcattgcggcgctccagatcctgctgaaggacccggcccccgaggtgcggacgagggctgctgaggccctgggccgcctggtgaagctcgcctaaggctccggccagcacccccagcgaggagtatgcacccagacctgtgcctgagctccaagacagggcctcctgaggaccacagcctgggcacacgactggaggggcctggccccagaacaggcactgctggggaccaaacccaagcccttcagtgagggatgtgcccaataaactcatctgctcccagcgagtgactgacagggtgcgatgctgagcctcttaggggatgggccagagggtgccctggactggctgtgttgtccccactgtttttgcaaaattgagtgaggggaaggctcggcgctgtggtgggggcggctttgttggcaaccccaattcaagaaggtgggagcaccaggcagcacagggtaaaggctctgttgacttcagcacgaccaccccagccccaggcaggcagaacagctaggtgaagaggcggacagtcccgtctgcccccgaggagaagacccacggctgggtggggtggaagatgacgtccagcactcccagatctcgggtcagcacgtgtcccttcagcaccttgacgggcaccagcaaggggttctgcagaaggtcactgtggggacgaggagggctcagggcacggccagacaccactgccctggggagggggccaggcagggtcagcactcacttgtacaccatgccatggcagacgatgacactgccgtcgtccgagcctgacgcaaagagtgggtaccgcgggtggaaggccacagcccgcagagccttcttgtggtgtctggggggagggaaccaggttgaaggcaggctcgggctgaagggaggggctctgctggccgcctccacccccagctttcctcacctcagcatcctgtatggcttggtggaaagatccaggtcaaaccacaccagcttgctatcgtagctcccacagatgacgttgtcacctagggccaaaggctgtgatgcaggtgttcccgctctcacctgcagggtgcactgccctgcccgtcacctacacccctcacctgcagggtgca

SEQ ID NO: 5748 - protein, 584 aa, Homo sapiens; identical to SEQ ID NO: 5746

SEQ ID NO: 5749 - DNA, 3748 bp, Homo sapiens
aggatcgaagtgagaacgaagtggagaaggtgaagagtgctctgatcctgtgctatgggcacgtggcggcccgggccccccgggagctggtgctggccaaggtagagtcagacatcctccggaacatctgccagcacttcagcaccaaggacccagccctgaagctgtgccttgtccagagtgtgtgcatggtcagccgcgccatctgcagcagcacccaggctggctccttccacttcacccggaaagcagagctggtggcacagatgatggagttcatcagggcagagcccccggactccttgaggacacctattcggaagaaagccatgctcacctgcacttacttggtctccgtggagccagcgctggacgagcaggcccgggcggatgtgatccatggctgcctgcacagcatcatggccctgctgcctgagcccaaggaggaggacggaggctgccagaagtccctgtatctggagacactgcacgcccttgaggatctgctgacgagcctcctgcagcggaacatgaccccccaaggcctgcagatcatgattgagcacctgagcccatggatcaagtccccaagaggtcacgagcgggcgcgggccctgggcctgagcgccctcctgctgcgctacttcctggagcacctgcgtgtcagcgccctggtgcccttccacaacctgggccttctcatcggcctcttctccccacggtgtgcggacctgtggcctgccacccgccaggaggccgtggactgtgtctactccctgctgtacctccagctcggctatgagggcttctcccgggactaccgcgatgacgtggcggagcggctcctcagcctcaaggacggcctcgtgcaccctgaccccgccattctcttccacacctgccacagtgtaggccagattattgccaagcgcctccccccagaccagctcatcagcctcttgctaaccatgtttgaggccctgggagaccccgaaaagaactgctcccgagcagctaccgtcatgatcaactgcctgctgcaggagcggggcggtgtgctccaggagaaggtgcccgagatcgtgagcgtcctgcgctccaagcttcaggaggcccagggagagcacgtcctgccggccgcccagcacagcgtgtacctcctggccacccagcactgcgcagccgtggtgtccagcctcctgggcagccccttgcccttggacagccacacctgcatgctgtggcgggcgctggcggtggagcctcgcctagctgcccaggtcctggggctgctgctggagaagatgagtagggacgtccctttcaaggagagccgggccttcctgctgggccgcaccccagaccgcgtggccacgctgctgcctctctcggctacctgtgcactgtttgaggtcatgtccacgcctgcagcggggcccgcggtgctcgagctctacccccagctgtttgtggtgcttctgctgcgcgtcagctgcaccgtgggtgtccagctgccccggaacctgcaggcccaggaaaggaggggtgccagtccagccctagccaccaggaacctggaaccctgcagctctgcagtggacaccctgcggtccatgctactccgcagcggcagcgaggatgtggtacagcgcatggacctggagggaggctgggaactgctcaggacctcggcggggcatgaggagggggccaccaggttggccagggccatggctgagcacgcagggccccgactccccctggtgctgaagacgctggcatgcacacacagcagtgcgtatgagaaccagagggtgaccaccaccgccttcctggccgagctgctgaacagcaacgtggccaacgacctcatgctcttggactcgctgctggagagcctggcggctcgccagaaggacacatgcgccagcgtgcggaggctggtgctccgcggcctggccaacctggcctccggctgccctgacaaggtgcgaacccacggcccccagctcctcacagccatgattggcgggctggacgacggggacaaccctcacagcccagtggccctggaggccatgctgggccttgcgaggctggtgcacctggtggagtcctgggacctgcgctcagggctgctgcacgtggccatccgcatccggcctttcttcgacagtgagaagatggagttccggacggcatctatccgcctctttgggcaccttaacaaggtctgccacggagactgtgaggacgtcttcctggaccaggtggtgggcgggctggcgcccctgctgctgcacctgcaggaccctcaggccaccgtggccagcgcctgcaggtttgccctgcgcatgtgtggccccaatctggcatgtgaggagctctcagctgctttccagaaacacctgcaggagggccgagccctgcacttcggggagttcctcaacaccacctgcaagcacctgatgcaccatttcccagacctgctgggccgtctcctgaccacctgcctgttctacttcaagagcagctgggagaacgtccgagctgctgcacccctgttcaccgggttcctggtgctgcactcggagcccaggcagcagccgcaggtggacctggaccagctcattgcggcgctccagatcctgctgaaggacccggcccccgaggtgcggacgagggctgctgaggccctgggccgcctggtgaagctcgcctaaggctccggccagcacccccagcgaggagtatgcacccagacctgtgcctgagctccaagacagggcctcctgaggaccacagcctgggcacacgactggaggggcctggccccagaacaggcactgctggggaccaaacccaagcccttcagtgagggatgtgcccaataaactcatctgctcccagcgagtgactgacagggtgcgatgctgagcctcttaggggatgggccagagggtgccctggactggctgtgttgtccccactgtttttgcaaaattgagtgaggggaaggctcggcgctgtggtgggggcggctttgttggcaaccccaattcaagaaggtgggagcaccaggcagcacagggtaaaggctctgttgacttcagcacgaccaccccagccccaggcaggcagaacagctaggtgaagaggcggacagtcccgtctgcccccgaggagaagacccacggctgggtggggtggaagatgacgtccagcactcccagatctcgggtcagcacgtgtcccttcagcaccttgacgggcaccagcaaggggttctgcagaaggtcactgtggggacgaggagggctcagggcacggccagacaccactgccctggggagggggccaggcagggtcagcactcacttgtacaccatgccatggcagacgatgacactgccgtcgtccgagcctgacgcaaagagtgggtaccgcgggtggaaggccacagcccgcagagccttcttgtggtgtctggggggagggaaccaggttgaaggcaggctcgggctgaagggaggggctctgctggccgcctccacccccagctttcctcacctcagcatcctgtatggcttggtggaaagatccaggtcaaaccacaccagcttgctatcgtagctcccacagatgacgttgtcacctagggccaaaggctgtgatgcaggtgttcccgctctcacctgcagggtgcactgccctgcccgtcacctacacccctcacctgcagggtgca

SEQ ID NO: 5750 - protein, 844 aa, Homo sapiens; identical to SEQ ID NO: 5744

SEQ ID NO: 5751 - DNA, 3564 bp, Homo sapiens
ttctctaacattccagcctttcccttctgacttgaaattctttctcatcagtggcgcccaagtagataccaggtttccatctgagcccaggatcctgtgcaagggtagggtgggagcacctcccaggaaggcctcgcacgtgggggctgaaaagggagcaggtggtgggagggggacaggtgcgtctgccagggaggaggtgtggaagtaggaggaagctgtctgcctataggagcatgggaggagcaggactgaggagagcagaaaggctctggaaggcaggaccaggacagtcagggtgtgagggggtcttgtacagtcctgcccctcacccaaattggcagagcccgtgcactcctcccatttggggccccctcctcaccccagttgtccgtctgcctgcacacgcctgcgtgcccacgtcggcatggcctggccctccttcttgtaggggcccggcctgggagcctgtgtggccctggtgtagacgaggtgtggtcagagctgagctgagcagcgcccacgctgcagcaggaggggagggaggaactcactgggagctgtgttggccacactgagggcccagggcttcgtggacaccagcagcactcctggccacactccagccctcctctgggtacaggtggcataggtggcatccacccacccccagcattctaatagcccaggcatctcctcctccaggccctggtgcccttccacaacctgggccttctcatcggcctcttctccccacggtgtgcggacctgtggcctgccacccgccaggaggccgtggactgtgtctactccctgctgtacctccagctcggctatgagggcttctcccgggactaccgcgatgacgtggcggagcggctcctcagcctcaaggacggcctcgtgcaccctgaccccgccattctcttccacacctgccacagtgtaggccagattattgccaagcgcctccccccagaccagctcatcagcctcttgctaaccatgtttgaggccctgggagaccccgaaaagaactgctcccgagcagctaccgtcatgatcaactgcctgctgcaggagcggggcggtgtgctccaggagaaggtgcccgagatcgtgagcgtcctgcgctccaagcttcaggaggcccagggagagcacgtcctgccggccgcccagcacagcgtgtacctcctggccacccagcactgcgcagccgtggtgtccagcctcctgggcagccccttgcccttggacaggtacccagctcagactccaggcttaggggtccctctggaatgatgctccccctggaatgatgctccccgagccctccacccggctctgcaccccgactttctgcatgagttcccatggctgtaggccacgtgggacagaaagtgacatggagccaggccccagtctctcaggtacccacggggacctctcctctccaggcgttttgggatcctcactggctccggtgggccctgcacagcacccccacagggaagctgctgtttctgccttcctctaaggtcccaaaactgcctggctgctctgttggccccaggctccagcacacactggaggctgcccctcaccctgtgtcttggttccggctactccaagccttgtcctctgcagggcatccactgctgcctgtgagcagacccctgggaactgcctgatctgagccccctcaggagcccaaggacaaccttgtctgtaccatacatcactatgtcttcccaagctcacacctcccagctcccagcaaagggcagggcgtgtctaccacccaccagcccactggggtcccccttcctcgccgaggcctccggagcatgggtctgctggcccttcctttctttgccatcttagtcatggacagaggctggcccaggggcacctggcttcctgtgacctccgggagactccatgctgggcaaggcagagtgacccttcccctggcaggcgggggcatgaggctgccacggggaacacaggtttccttgcacctggccctttaccctgtcagctttgctgttttcatgtgctctgacgccctcccattaggtgcatccaagctgcaatgcccacttcctcctggcaggggggacccgcaggcaccttctgctcagaggtgcacttgtctggtggccctgctccttcctggtactgttgacctttctgtgtgtttgttttaaatctcttgcatggtaaatagctgcattttgttactgataagagtgagtttaaatccactgtcatatcttttgcgtctttgttacacattttgttttttaaaaatcttctttcttgtccttttttagattgacagtgtccctcttacctcactttctccactcagtttgtaatcctgcagtctgttgcttttcttttagcgtttgccctaaaggtggctgcatgtgtcctcactgaagtccagcatgggccccaaatgcaggctgaggtctgggtctggctgggctgctgggcgcccgagtcatcatgaccattgttcctgggcacagccggcgttgacttgtatttcctccgtgattaccgcctggctcatcaatcactgttttcgttttccgtggaggcgtggctcacacaaagggcaagcacggagtcactgggtcctgcaggactttccaggtcaaggcagaggaggtgtccggtccccagcaggctcctgtgtgcccctcagtcccctagagggtcacggccacctgaccgccaccactagaggttttggcgattgtgctgtgtggtgggtcttcccggcctctgcttagcacagcagtgctgctgcccatccttcctccttgccaggtagtgccgggtgctgctgcccatccttcctctgccgggcagtgccgggtgctgctgcccatcctttctccttgccgggtagtgccgggtgctgctgcccatcctttctccttgccggacagtgctgggtgccgtgtgggctgcactgtgtgtgtgtttctaggtgatggacattcagattgttttttggtttggggctgctggggatggcgatgctttgaatgttcctgggagtgtctgttggtgggtagagcatgcatttctctttcgtgtgtatataggagtggaatcaaggccgggcactgtggctcatacctgtaatcccagcagtgtgggaggctgaggcaggaggattacctgaggtcagaagtttgcgaccagcctggccaacatggcaaaaccccgtctctactgaaaatataaaaattggccaggcatggccaggcgcagtggctcacccctgtaatcccagcactttgggaggctgaggtgggtggatcacgaggtcaggagatcgagaccatcctggctaacatggtaaaaccccgtctctactaaaaatataaaaaattagccaggcgaggtggcaggcgcctgtagtcccagctactcgggaggctgaggcaggagaatggtgtgaacccaggaggcggagcttgcagtgagttgagattgcaccactgcactccagcctgggcgacagagcaagaactctgtctc

SEQ ID NO: 5752 - protein, 99 aa, Homo sapiens
MFEALGDPEKNCSRAATVMINCLLQERGGVLQEKVPEIVSVLRSKLQEAQGEHVLPAAQHSVYLLATQHCAAVVSSLLGSPLPLDRYPAQTPGLGVPLE

SEQ ID NO: 5753 - DNA, 1664 bp, Homo sapiens
tggcgttgggggtgccccccttccctcaacctctggcatcgccttcctcctagattattgccaagcgcctccccccagaccagctcatcagcctcttgctaaccatgtttgaggccctgggagaccccgaaaagaactgctcccgagcagctaccgtcatgatcaactgcctgctgcaggagcggggcggtgtgctccaggagaaggtgcccgagatcgtgagcgtcctgcgctccaagcttcaggaggcccagggagagcacgtcctgccggccgcccagcacagcgtgtacctcctggccacccagcactgcgcagccgtggtgtccagcctcctgggcagccccttgcccttggacagccacacctgcatgctgtggcgggcgctggcggtggagcctcgcctagctgcccaggtcctggggctgctgctggagaagatgagtagggacgtccctttcaaggagagccgggccttcctgctgggccgcaccccagaccgcgtggccacgctgctgcctctctcggctacctgtgcactgtttgaggtcatgtccacgcctgcagcggggcccgcggtgctcgagctctacccccagctgtttgtggtgcttctgctgcgcgtcagctgcaccgtgggtgtccagctgccccggaacctgcaggcccaggaaaggaggggtgccagtccagccctagccaccaggaacctggaaccctgcagctctgcagtggacaccctgcggtccatgctactccgcagcggcagcgaggatgtggtacagcgcatggacctggagggaggctgggaactgctcaggacctcggcggggcatgaggagggggccaccaggttggccagggccatggctgagcacgcagggccccgactccccctggtgctgaagacgctggcatgcacacacagcagtgcgtatgagaaccagagggtgaccaccaccgccttcctggccgagctgctgaacagcaacgtggccaacgacctcatgctcttggactcgctgctggagagcctggcggctcgccagaaggacacatgcgccagcgtgcggaggctggtgctccgcggcctggccaacctggcctccggctgccctgacaaggtgcgaacccacggcccccagctcctcacagccatgattggcgggctggacgacggggacaaccctcacagcccagtggccctggaggccatgctgggccttgcgaggctggtgcacctggtggagtcctgggacctgcgctcagggctgctgcacgtggccatccgcatccggcctttcttcgacagtgtgaccgtggagagcgcggacctgcagggctgctgctttgctgggcctggcagcccccacccgtaaggcccccacccgtcggggtgtttcctggcccgggtcaggcaagggcacccatcaatggcagggggctaggcaggcaggcctgcaggggcacagcctgtgaggagacgtatgctgcatgtccttcccaggagaagatggagttccggacggcatctatccgcctctttgggcaccttaacaaggtctgccacggagactgtgaggacgtcttcctggaccaggtggtgggcgggctggcgcccctgctgctgcacctgcaggaccctcaggccaccgtggccagcg

SEQ ID NO: 5754 - protein, 424 aa, Homo sapiens; identical to SEQ ID NO: 5742

SEQ ID NO: 5755 - DNA, 2058 bp, Homo sapiens
tggcgttgggggtgccccccttccctcaacctctggcatcgccttcctcctagattattgccaagcgcctccccccagaccagctcatcagcctcttgctaaccatgtttgaggccctgggagaccccgaaaagaactgctcccgagcagctaccgtcatgatcaactgcctgctgcaggagcggggcggtgtgctccaggagaaggtgcccgagatcgtgagcgtcctgcgctccaagcttcaggaggcccagggagagcacgtcctgccggccgcccagcacagcgtgtacctcctggccacccagcactgcgcagccgtggtgtccagcctcctgggcagccccttgcccttggacagccacacctgcatgctgtggcgggcgctggcggtggagcctcgcctagctgcccaggtcctggggctgctgctggagaagatgagtagggacgtccctttcaaggagagccgggccttcctgctgggccgcaccccagaccgcgtggccacgctgctgcctctctcggctacctgtgcactgtttgaggtcatgtccacgcctgcagcggggcccgcggtgctcgagctctacccccagctgtttgtggtgcttctgctgcgcgtcagctgcaccgtgggtgtccagctgccccggaacctgcaggcccaggaaaggaggggtgccagtccagccctagccaccaggaacctggaaccctgcagctctgcagtggacaccctgcggtccatgctactccgcagcggcagcgaggatgtggtacagcgcatggacctggagggaggctgggaactgctcaggacctcggcggggcatgaggagggggccaccaggttggccagggccatggctgagcacgcagggccccgactccccctggtgctgaagacgctggcatgcacacacagcagtgcgtatgagaaccagagggtgaccaccaccgccttcctggccgagctgctgaacagcaacgtggccaacgacctcatgctcttggactcgctgctggagagcctggcggctcgccagaaggacacatgcgccagcgtgcggaggctggtgctccgcggcctggccaacctggcctccggctgccctgacaaggtgcgaacccacggcccccagctcctcacagccatgattggcgggctggacgacggggacaaccctcacagcccagtggccctggaggccatgctgggccttgcgaggctggtgcacctggtggagtcctgggacctgcgctcagggctgctgcacgtggccatccgcatccggcctttcttcgacagtgagaagatggagttccggacggcatctatccgcctctttgggcaccttaacaaggtctgccacggagactgtgaggacgtcttcctggaccaggtggtgggcgggctggcgcccctgctgctgcacctgcaggaccctcaggccaccgtggccagcgcctgcaggtttgccctgcgcatgtgtggccccaatctggcatgtgaggagctctcagctgctttccagaaacacctgcaggagggccgagccctgcacttcggggagttcctcaacaccacctgcaagcacctgatgcaccatttcccagacctgctgggccgtctcctgaccacctgcctgttctacttcaagagcagctgggagaacgtccgagctgctgcacccctgttcaccgggttcctggtgctgcactcggagcccaggcagcagccgcaggtggacctggaccagctcattgcggcgctccagatcctgctgaaggacccggcccccgaggtgcggacgagggctgctgaggccctgggccgcctggtgaagctcgcctaaggctccggccagcacccccagcgaggagtatgcacccagacctgtgcctgagctccaagacagggcctcctgaggaccacagcctgggcacacgactggaggggcctggccccagaacaggcactgctggggaccaaacccaagcccttcagtgagggatgtgcccaataaactcatctgctcccagcgagtgactgac

SEQ ID NO: 5756 - protein, 584 aa, Homo sapiens; identical to SEQ ID NO: 5746

SEQ ID NO: 5757 - DNA, 2884 bp, Homo sapiens
tggcgttgggggtgccccccttccctcaacctctggcatcgccttcctcctagattattgccaagcgcctccccccagaccagctcatcagcctcttgctaaccatgtttgaggccctgggagaccccgaaaagaactgctcccgagcagctaccgtcatgatcaactgcctgctgcaggagcggggcggtgtgctccaggagaaggtgcccgagatcgtgagcgtcctgcgctccaagcttcaggaggcccagggagagcacgtcctgccggccgcccagcacagcgtgtacctcctggccacccagcactgcgcagccgtggtgtccagcctcctgggcagccccttgcccttggacagccacacctgcatgctgtggcgggcgctggcggtggagcctcgcctagctgcccaggtcctggggctgctgctggagaagatgagtagggacgtccctttcaaggagagccgggccttcctgctgggccgcaccccagaccgcgtggccacgctgctgcctctctcggctacctgtgcactgtttgaggtcatgtccacgcctgcagcggggcccgcggtgctcgagctctacccccagctgtttgtggtgcttctgctgcgcgtcagctgcaccgtgggtgtccagctgccccggaacctgcaggcccaggaaaggaggggtgccagtccagccctagccaccaggaacctggaaccctgcagctctgcagtggacaccctgcggtccatgctactccgcagcggcagcgaggatgtggtacagcgcatggacctggagggaggctgggaactgctcaggacctcggcggggcatgaggagggggccaccaggttggccagggccatggctgagcacgcagggccccgactccccctggtgctgaagacgctggcatgcacacacagcagtgcgtatgagaaccagagggtgaccaccaccgccttcctggccgagctgctgaacagcaacgtggccaacgacctcatgctcttggactcgctgctggagagcctggcggctcgccagaaggacacatgcgccagcgtgcggaggctggtgctccgcggcctggccaacctggcctccggctgccctgacaaggtgcgaacccacggcccccagctcctcacagccatgattggcgggctggacgacggggacaaccctcacagcccagtggccctggaggccatgctgggccttgcgaggctggtgcacctggtggagtcctgggacctgcgctcagggctgctgcacgtggccatccgcatccggcctttcttcgacagtgagaagatggagttccggacggcatctatccgcctctttgggcaccttaacaaggtctgccacggagactgtgaggacgtcttcctggaccaggtggtgggcgggctggcgcccctgctgctgcacctgcaggaccctcaggccaccgtggccagcgcctgcaggtttgccctgcgcatgtgtggccccaatctggcatgtgaggagctctcagctgctttccagaaacacctgcaggagggccgagccctgcacttcggggagttcctcaacaccacctgcaagcacctgatgcaccatttcccagacctgctgggccgtctcctgaccacctgcctgttctacttcaagagcagctgggagaacgtccgagctgctgcacccctgttcaccgggttcctggtgctgcactcggagcccaggcagcagccgcaggtggacctggaccagctcattgcggcgctccagatcctgctgaaggacccggcccccgaggtgcggacgagggctgctgaggccctgggccgcctggtgaagctcgcctaaggctccggccagcacccccagcgaggagtatgcacccagacctgtgcctgagctccaagacagggcctcctgaggaccacagcctgggcacacgactggaggggcctggccccagaacaggcactgctggggaccaaacccaagcccttcagtgagggatgtgcccaataaactcatctgctcccagcgagtgactgacagggtgcgatgctgagcctcttaggggatgggccagagggtgccctggactggctgtgttgtccccactgtttttgcaaaattgagtgaggggaaggctcggcgctgtggtgggggcggctttgttggcaaccccaattcaagaaggtgggagcaccaggcagcacagggtaaaggctctgttgacttcagcacgaccaccccagccccaggcaggcagaacagctaggtgaagaggcggacagtcccgtctgcccccgaggagaagacccacggctgggtggggtggaagatgacgtccagcactcccagatctcgggtcagcacgtgtcccttcagcaccttgacgggcaccagcaaggggttctgcagaaggtcactgtggggacgaggagggctcagggcacggccagacaccactgccctggggagggggccaggcagggtcagcactcacttgtacaccatgccatggcagacgatgacactgccgtcgtccgagcctgacgcaaagagtgggtaccgcgggtggaaggccacagcccgcagagccttcttgtggtgtctggggggagggaaccaggttgaaggcaggctcgggctgaagggaggggctctgctggccgcctccacccccagctttcctcacctcagcatcctgtatggcttggtggaaagatccaggtcaaaccacaccagcttgctatcgtagctcccacagatgacgttgtcacctagggccaaaggctgtgatgcaggtgttcccgctctcacctgcagggtgcactgccctgcccgtcacctacacccctcacctgcagggtgca

SEQ ID NO: 5758 - protein, 584 aa, Homo sapiens; identical to SEQ ID NO: 5746

SEQ ID NO: 5759 - DNA, 641 bp, Homo sapiens
ctcgagcaccgcgggccccgctgcaggcgtggacatgacctcaaacagtgcacaggataaaacatgaagtggcctcccctgggggcccacacctgtgaggcctttacgagcctgagctcagagctcccagcccggtgctgcctccaggtgcctgtggggtggcgtccgggccacctcatcaaaaggcctgcccccgggcacccaggcaagcggggcagggacagcgtgtcaaggtggccccgagagcccgactcaccgagagaggcagcagcgtggccacgcggtctggggtgcggcccagcaggaaggcccggctctccttgaaagggacgtccctactcatcttctccagcagcagccccaggacctgggcagctaggcgaggctccaccgccagcgcccgccacagcatgcaggtgtggctggagcagagcaggagagtcactttgaggccgtggctggtcagggcgcctgccccccgccacctgggtgccgtggaccctggctccacgacgctcagacacagccaccaggctcagctgcagccagctgggaaatggcctcttggcctcagatctgagctcaccccttcccctgactccagggatctgtaaacagagctggtaataaaggacacagag

SEQ ID NO: 5760 - protein, 86 aa, Homo sapiens
MKWPPLGAHTCEAFTSLSSELPARCCLQVPVGWRPGHLIKRPAPGHPGKRGRDSVSRWPREPDSPREAAAWPRGLGCGPAGRPGSP

SEQ ID NO: 5761 - DNA, 1417 bp, Homo sapiens
tcttcgacagtgtaggctggttggggcagggggagggaagagggccccagcccttcctgcctcttactctgagctttagccccagccccaccctcctccctgtctcccacctcggctaggtgaccgtggagagcgcggacctgcagggctgctgctttgctgggcctggcagcccccacccgtaaggcccccacccgtcggggtgtttcctggcccgggtcaggcaagggcacccatcaatggcagggggctaggcaggcaggcctgcaggggcacagcctgtgaggagacgtatgctgcatgtccttcccaggagaagatggagttccggacggcatctatccgcctctttgggcaccttaacaaggtctgccacggagactgtgaggacgtcttcctggaccaggtggtgggcgggctggcgcccctgctgctgcacctgcaggaccctcaggccaccgtggccagcgcctgcaggtttgccctgcgcatgtgtggccccaatctggcatgtgaggagctctcagctgctttccagaaacacctgcaggagggccgagccctgcacttcggggagttcctcaacaccacctgcaagcacctgatgcaccatttcccagacctgctgggccgtctcctgaccacctgcctgttctacttcaagagcagctgggagaacgtccgagctgctgcacccctgttcaccggtaagcaccaccccctgccccacccccacgccgcccggcagccccgcctgatgcccccacttcacagggttcctggtgctgcactcggagcccaggcagcagccgcaggtggacctggaccagctcattgcgggtgagcacccctccacggggcccctccgctgggccctgctgaccctgtaggcacccgcagggactaagtgattttcctggatttcaggactttttccctgtcactggtgacctcatcgtctctagtaattcacggaaacttcttaactgttccaaaagagcttaaaaaacactaaaaaaggaaaaacgatctttccgttggctcctgagcctcccagcagaggctgtcaggagagcgtggcccacgcgcaggcatgggcatgccgaggtcacagcccgcaggcagcccccctcctctacccccagcgctccagatcctgctgaaggacccggcccccgaggtgcggacgagggctgctgaggccctgggccgcctggtgaagctcgcctaaggctccggccagcacccccagcgaggagtatgcacccagacctgtgcctgagctccaagacagggcctcctgaggaccacagcctgggcacacgactggaggggcctggccccagaacaggcactgctggggaccaaacccaagcccttcagtgagggatgtgcccaataaactcatctgctccca

SEQ ID NO: 5762 - protein, 174 aa, Homo sapiens
MEFRTASIRLFGHLNKVCHGDCEDVFLDQVVGGLAPLLLHLQDPQATVASACRFALRMCGPNLACEELSAAFQKHLQEGRALHFGEFLNTTCKHLMHHFPDLLGRLLTTCLFYFKSSWENVRAAAPLFTGKHHPLPHPHAARQPRLMPPLHRVPGAALGAQAAAAGGPGPAHCG

SEQ ID NO: 5763 - DNA, 1058 bp, Homo sapiens
tcttcgacagtgtaggctggttggggcagggggagggaagagggccccagcccttcctgcctcttactctgagctttagccccagccccaccctcctccctgtctcccacctcggctaggtgaccgtggagagcgcggacctgcagggctgctgctttgctgggcctggcagcccccacccgtaaggcccccacccgtcggggtgtttcctggcccgggtcaggcaagggcacccatcaatggcagggggctaggcaggcaggcctgcaggggcacagcctgtgaggagacgtatgctgcatgtccttcccaggagaagatggagttccggacggcatctatccgcctctttgggcaccttaacaaggtctgccacggagactgtgaggacgtcttcctggaccaggtggtgggcgggctggcgcccctgctgctgcacctgcaggaccctcaggccaccgtggccagcgcctgcaggtttgccctgcgcatgtgtggccccaatctggcatgtgaggagctctcagctgctttccagaaacacctgcaggagggccgagccctgcacttcggggagttcctcaacaccacctgcaagcacctgatgcaccatttcccagacctgctgggccgtctcctgaccacctgcctgttctacttcaagagcagctgggagaacgtccgagctgctgcacccctgttcaccgggttcctggtgctgcactcggagcccaggcagcagccgcaggtggacctggaccagctcattgcggcgctccagatcctgctgaaggacccggcccccgaggtgcggacgagggctgctgaggccctgggccgcctggtgaagctcgcctaaggctccggccagcacccccagcgaggagtatgcacccagacctgtgcctgagctccaagacagggcctcctgaggaccacagcctgggcacacgactggaggggcctggccccagaacaggcactgctggggaccaaacccaagcccttcagtgagggatgtgcccaataaactcatctgctcccagcgagtgactgac

SEQ ID NO: 5764 - protein, 179 aa, Homo sapiens [sequence omitted]

SEQ ID NO: 5765 - DNA, 1884 bp, Homo sapiens
tcttcgacagtgtaggctggttggggcagggggagggaagagggccccagcccttcctgcctcttactctgagctttagccccagccccaccctcctccctgtctcccacctcggctaggtgaccgtggagagcgcggacctgcagggctgctgctttgctgggcctggcagcccccacccgtaaggcccccacccgtcggggtgtttcctggcccgggtcaggcaagggcacccatcaatggcagggggctaggcaggcaggcctgcaggggcacagcctgtgaggagacgtatgctgcatgtccttcccaggagaagatggagttccggacggcatctatccgcctctttgggcaccttaacaaggtctgccacggagactgtgaggacgtcttcctggaccaggtggtgggcgggctggcgcccctgctgctgcacctgcaggaccctcaggccaccgtggccagcgcctgcaggtttgccctgcgcatgtgtggccccaatctggcatgtgaggagctctcagctgctttccagaaacacctgcaggagggccgagccctgcacttcggggagttcctcaacaccacctgcaagcacctgatgcaccatttcccagacctgctgggccgtctcctgaccacctgcctgttctacttcaagagcagctgggagaacgtccgagctgctgcacccctgttcaccgggttcctggtgctgcactcggagcccaggcagcagccgcaggtggacctggaccagctcattgcggcgctccagatcctgctgaaggacccggcccccgaggtgcggacgagggctgctgaggccctgggccgcctggtgaagctcgcctaaggctccggccagcacccccagcgaggagtatgcacccagacctgtgcctgagctccaagacagggcctcctgaggaccacagcctgggcacacgactggaggggcctggccccagaacaggcactgctggggaccaaacccaagcccttcagtgagggatgtgcccaataaactcatctgctcccagcgagtgactgacagggtgcgatgctgagcctcttaggggatgggccagagggtgccctggactggctgtgttgtccccactgtttttgcaaaattgagtgaggggaaggctcggcgctgtggtgggggcggctttgttggcaaccccaattcaagaaggtgggagcaccaggcagcacagggtaaaggctctgttgacttcagcacgaccaccccagccccaggcaggcagaacagctaggtgaagaggcggacagtcccgtctgcccccgaggagaagacccacggctgggtggggtggaagatgacgtccagcactcccagatctcgggtcagcacgtgtcccttcagcaccttgacgggcaccagcaaggggttctgcagaaggtcactgtggggacgaggagggctcagggcacggccagacaccactgccctggggagggggccaggcagggtcagcactcacttgtacaccatgccatggcagacgatgacactgccgtcgtccgagcctgacgcaaagagtgggtaccgcgggtggaaggccacagcccgcagagccttcttgtggtgtctggggggagggaaccaggttgaaggcaggctcgggctgaagggaggggctctgctggccgcctccacccccagctttcctcacctcagcatcctgtatggcttggtggaaagatccaggtcaaaccacaccagcttgctatcgtagctcccacagatgacgttgtcacctagggccaaaggctgtgatgcaggtgttcccgctctcacctgcagggtgcactgccctgcccgtcacctacacccctcacctgcagggtgca

SEQ ID NO: 5766 - protein, 179 aa, Homo sapiens [sequence omitted]

SEQ ID NO: 5767 - DNA, 428 bp, Homo sapiens
ggcggtgcaccctgcaggtgacaacgtcatctgtgggagctacgatagcaagctggtgtggtttgacctggatctttccaccaagccatacaggatgctgagacaccacaagaaggctctgcgggctgtggccttccacccgcggtacccactctttgcgtcaggctcggacgacggcagtgtcatcgtctgccatggcatggtgtacaatgaccttctgcagaaccccttgctggtgcccgtcaaggtgctgaagggacacgtgctgacccgagatctgggagtgctggacgtcatcttccaccccacccagccgtgggtcttctcctcgggggcagacgggactgtccgcctcttcacctagctgttctgcctgcctggggctggggtggtcgtgctgaagtcaacagagcctttaccctgtgctg

SEQ ID NO: 5768 - protein, 89 aa, Homo sapiens [sequence omitted]

SEQ ID NO: 5769 - DNA, 2354 bp, Homo sapiens
gtcgctgtcggaagcggctgtgcgggtggcggccggcgcgcggtggggcatggcgggttcgcggggtgcggggcgcacggcggcgccgagcgtgcggccggagaagcggcggtctgagcccgaactggagcctgagcccgagccggagccccccctcctctgcacctctcctctcagccacagcaccggcagcgattctggcgtctccgacagcgaggagagtgtgttctcaggcctggaagattccggcagtgacagcagtgaggatgatgacgaaggcgacgaggagggagaggacggagcccttgatgacgagggccacagtgggattaaaaagaccactgaggagcaggtgcaggccagcactccttgcccgaggacagagatggcgagcgcccggattggggatgagtatgcggaggacagctctgatgaggaggacatccggaacacggtgggcaacgtgcccttggagtggtacgatgacttcccccacgtgggctacgacctggatggcaggcgcatctacaagcccctgcggacccgggatgagctggaccagttcctggacaagatggacgatcctgactactggcgcaccgtgcaggacccgatgacagggcgggacctgagactgacggatgagcaggtggccctggtgcggcggctgcagagtggccagtttggggatgtgggcttcaacccctatgagccggctgtcgacttcttcagcggggacgtcatgatccacccggtgaccaaccgcccggccgacaagcgcagcttcatcccctccctggtggagaaggagaaggtctctcgcatggtgcacgccatcaagatgggctggatccagcctcgccggccccgagaccccacccccagcttctatgacctgtgggcccaggaggaccccaacgccgtgctcgggcgccacaagatgcacgtacctgctcccaagctggccctgccaggccacgccgagtcgtacaacccaccccctgaatacctgctcagcgaggaggagcgcttggcgtgggaacagcaggagccaggcgagaggaagctgagctttttgccacgcaagttcccgagcctgcgggccgtgcctgcctacggacgcttcatccaggaacgcttcgagcgctgccttgacctgtacctgtgcccacggcagcgcaagatgagggtgaatgtagaccctgaggacctcatccccaagctgcctcggccgagggacctgcagcccttccccacgtgccaggccctggtctacaggggccacagtgaccttgtccggtgcctcagtgtctctcctgggggccagtggctggtttcaggctctgacgacggctccctgcggctctgggaggtggccactgcccgctgtgtgaggactgttcccgtggggggcgtggtgaagagtgtggcctggaaccccagccccgctgtctgcctggtggctgcagccgtggaggactcggtgctgctgctgaacccagctctgggggaccggctggtggcgggcagcacagatcagctgttgagcgccttcgtcccgcctgaggagccccccttgcagccggcccgctggctggaggcctcagaggaggagcgccaagtgggcctgcggctgcgcatctgccacgggaagccagtgacgcaggtgacctggcacgggcgtggggactacctggccgtggtgctggccacccaaggccacacccaggtgctgattcaccagctgagccgtcgccgcagccagagtccgttccgccgcagccacggacaggtgcagcgagtggccttccaccctgcccggcccttcctgttggtggcgtcccagcgcagcgtccgcctctaccacctgctgcgccaggagctcaccaagaagctgatgcccaactgcaagtgggtgtccagcctggcggtgcaccctgcaggtgacaacgtcatctgtgggagctacgatagcaagctggtgtggtttgacctggatctttccaccaagccatacaggatgctgagacaccacaagaaggctctgcgggctgtggccttccacccgcggtacccactctttgcgtcaggctcggacgacggcagtgtcatcgtctgccatggcatggtgtacaatgaccttctgcagaaccccttgctggtgcccgtcaaggtgctgaagggacacgtgctgacccgagatctgggagtgctggacgtcatcttccaccccacccagccgtgggtcttctcctcgggggcagacgggactgtccgcctcttcacctagctgttctgcctgcctggggctggggtggtcgtgctgaagtcaacagagcctttaccctgtgctg

SEQ ID NO: 5770 - protein, 746 aa, Homo sapiens; identical to SEQ ID NO: 787

SEQ ID NO: 5771 - DNA, 1135 bp, Homo sapiens
aacagctaggtgaagaggcggacagtcccgtctgcccccgaggagaagacccacggctgggtggggtggaagatgacgtccagcactcccagatctcgggtcagcacgtgtcccttcagcaccttgacgggcaccagcaaggggttctgcagaaggtcactgtggggacgaggagggctcagggcacggccagacaccactgccctggggagggggccaggcagggtcagcactcacttgtacaccatgccatggcagacgatgacactgccgtcgtccgagcctgacgcaaagagtgggtaccgcgggtggaaggccacagcccgcagagccttcttgtggtgtctggggggagggaaccaggttgaaggcaggctcgggctgaagggaggggctctgctggccgcctccacccccagctttcctcacctcagcatcctgtatggcttggtggaaagatccaggtcaaaccacaccagcttgctatcgtagctcccacagatgacgttgtcacctagggccaaaggctgtgatgcaggtgttcccgctctcacctgcagggtacaccgcccccccccccacccctcacctgcagggtgcaccgcccccacccctcacctgcagggtgcaccgccaggctggacacccacttgcagttgggcatcagcttcttggtgagctcctggcgcagcaggtggtagaggcggacgctgcgctgggacgccaccaacaggaagggccgggcagggtggaaggccactcgctgcacctgtccgtggctgcggcggaacggactctggctgcggcgacggctcagctggtgaatcagcacctgggtgtggccttgggtggccagcaccacggccaggtagtccccacgcccgtgccaggtcacctgcgtcactggctgcaggagagcaaggctggctgagtggctgagccgggcccctcccgctgcagcctcacccccaaggcgccccacgtaccttcccgtggcagatgcgcagccgcaggcccacttggcgctcctcctctgaggcctccagccagcgggccggctgcaaggggggctcctcaggcgggacgaaggcgctcaacagctgatctgtgctgcccgccaccagccggtccccca

SEQ ID NO: 5772 - protein, 132 aa, Homo sapiens
MQVFPLSPAGYTAPPPTPHLQGAPPPPLTCRVHRQAGHPLAVGHQLLGELLAQQVVEADAALGRHQQEGPGRVEGHSLHLSVAAAERTLAAATAQLVNQHLGVALGGQHHGQVVPTPVPGHLRHWLQESKAG

SEQ ID NO: 5773 - DNA, 1928 bp, Homo sapiens
gggaccgctgcccaggaggctgcttcctgcaacagtagccacggggaggggcccaggcaagacagagcacagctgggagcctgccgggccccctgctgcaggagggaccccttgggccctgccccctgctgagggtccttccctctcctccccatggagatagggggccatccccaaattggataatgggggtatgtgtgtgcttcctgaggggcctggtggccctggagaggaacgggggaaggaggaaggggcaaggagaccgacggggtgagaggtccacacagcacaagaacaggggacatggccagctagcagaaggcacagtctgtgccaagcctggagaggcaggtgcaggacagacaggcggagagactgagctctaggcccctaaatactcgcctgtgcccgccccctgcacacggcctggcacaggcaggcgctggcgcacatgggaggcaaagacagacagggtgcggtcaggcagcagggccagggcggctgggttaactcagttgtgccacgggagaaaacggggtggtgggttcctcccctctcccggggacggggggcactgcagttttggggccctgagtaactacagcccagaagcgacctcccagttcctccgcatccccagagacggaacgatgcccccaaagaccagccccgccccccccacccccgccaaagcgtggccacagaaggccgagggacgcggcgggcgctgctcgaggagcctccgggctgagaggggcggggcgtgcgcgggggaggggccgggacgccgctataaaggcgcagctcggggccccgctccggcccgggacgcacatgtgcgcgcgacgcccggcagctgccaccgcggggcgcagccgagaccccgcgcctcgccccggccggcccgcgaggcccgcggcggccgcaggaggcggcatgagcagcgcgcgacagagctgacgccgcgcccccgccggccccatgtccttcgccacgctgcgcccggcgccgccgggccgctacctgtaccccgaggtgagcccgctgtcggaggacgaggaccgcggcagcgacagctcgggctccgacgagaaaccctgtcgcgtgcacgcggcgcgctgcggcctccagggcgcccggcggagggcggggggccggcgggccgggggcggggggccagggggccggccaggccgtgagccccggcagcggcacacggcgaacgcgcgcgagcgagaccgcaccaacagcgtgaacacggccttcacggcgctgcgcacgctgatccccaccgagcccgccgaccgcaagctctccaagattgagacgctgcgcctggcctccagctacatctcgcacctgggcaacgtgctgctggcgggcgaggcctgcggcgacggacagccctgccactccgggcccgccttcttccacgcggcgcgcgccggcagccccccgccgccgcccccgccgcctcccgcccgcgacggcgagaacacccagcccaaacagatctgcaccttctgcctcagcaaccagagaaagttgagcaaggaccgcgacagaaagacagcgattcgcagttaggaggtggccggcagcagccaggaggcagacgctgctgggggaggtggacgcccggggtgactgcagacagcccccaccttggacctgagctgggcaaggcccaccgcaagcatgcccccaggccagccctggctgcgagcggggccgagggacagacggacgtacagacaggcgccggcagcgggactctgcgctggccccagcacctgcccgggcccactggaactttctgcgctggcttttcttccggccactgtgtgatggcatcttgtgtttttgatatgataatataaagtctgaaaattttgtataattaaaaacaaaacagtatcttccaaata

SEQ ID NO: 5774 - protein, 201 aa, Homo sapiens
MSFATLRPAPPGRYLYPEVSPLSEDEDRGSDSSGSDEKPCRVHAARCGLQGARRRAGGRRAGGGGPGGRPGREPRQRHTANARERDRTNSVNTAFTALRTLIPTEPADRKLSKIETLRLASSYISHLGNVLLAGEACGDGQPCHSGPAFFHAARAGSPPPPPPPPPARDGENTQPKQICTFCLSNQRKLSKDRDRKTAIRS

SEQ ID NO: 5775 - DNA, 252 bp, Homo sapiens
gcaaggaccgcgacagaaagacagcgattcgcagttaggaggtggccggcagcagccaggaggcagacgctgctgggggaggtggacgcccggggtgagtacagacaggcgccggcagcgggactctgcgctggccccagcacctgcccgggcccactggaactttctgcgctggcttttcttccggccactgtgtgatggcatcttgtgtttttgatatgataatataaagtctgaaaattttgtataatt

SEQ ID NO: 5776 - protein, 71 aa, Homo sapiens [sequence omitted]

SEQ ID NO: 5777 - DNA, 238 bp, Homo sapiens
gcccaccgcaagcatgcccccaggccagccctggctgcgagcggggccgagggacagacggacgtacagacaggcgccggcagcgggactctgcgctggccccagcacctgcccgggcccactggaactttctgcgctggcttttcttccggccactgtgtgatggcatcttgtgtttttgatatgataatataaagtctgaaaattttgtataattaaaaacaaaacagtattttcc

SEQ ID NO: 5778 - protein, 49 aa, Homo sapiens
MPPGQPWLRAGPRDRRTYRQAPAAGLCAGPSTCPGPLELSALAFLPATV

SEQ ID NO: 5779 - DNA, 518 bp, Homo sapiens
gggccacacagcggacccctaagcggaccgctggcaccggtcgggtggcagcagagtgtcgctcgacatgggggaggccggggctggcgctggcgcctcgggagggccggaggcaagcccggaggcagaggtggtgaagctgctgcccttcctggcgccgggcgcgcgggcggacctgcaggcggcggcggtgcggcacgtgctggcgctgactggctgcggacccggccgcgcgctgttggcggggcagactcgggcctggagcggctggtgcgcgcgctgtgcacgcccggctacaacgcccgcgcgcccctgcactacctagcgccgctgctctccaacctcagccaacgccctgcggcgcgggccttcctactggaccccgacaggtgcgtggtccagcggctgctgccccttacccagtaccccgactcctctgtacgcaggggcggggtggtggggacgctgcggaattgctgcttcgagcaccgacatcacgagtggttgcttggacctga

SEQ ID NO: 5780 - protein, 85 aa, Homo sapiens
MGEAGAGAGASGGPEASPEAEVVKLLPFLAPGARADLQAAAVRHVLALTGCGPGRALLAGQTRAWSGWCARCARPATTPARPCTT

SEQ ID NO: 5781 - DNA, 1162 bp, Homo sapiens
gggccacacagcggacccctaagcggaccgctggcaccggtcgggtggcagcagagtgtcgctcgacatgggggaggccggggctggcgctggcgcctcgggagggccggaggcaagcccggaggcagaggtggtgaagctgctgcccttcctggcgccgggcgcgcgggcggacctgcaggcggcggcggtgcggcacgtgctggcgctgactggctgcggacccggccgcgcgctgttggcggggcaggcggcgctgctgcaggcgctgatggagctggcgccggcctctgccccggcccgggacgccgcccgcgcgctcgtgaacttggccgccgaccccggcctgcacgagacattgctggcggccgaccccgggctgccagcgcgcctgatgggccgcgcgttggacccgcagtggccctgggccgaggaggcggccgccgcgctagccaacctcagtcgcgagccggcgccgtgtgcagcgctcatggcggcgctggcggccgcggagccggcagactcgggcctggagcggctggtgcgcgcgctgtgcacgcccggctacaacgcccgcgcgcccctgcactacctagcgccgctgctctccaacctcagccaacgccctgcggcgcgggccttcctactggaccccgacaggacatcacgagtggttgcttggacctgaggtggacattctcccctttttgctcctgcccttggctgggcctgaggatttctccgaggaagagatgcaacgtgagtggctagtgtggagcctcagagttggccggagaggagggaggccagtggagggagagagaggtgtccaggccacaggctcctgaaactttgcagcagtgagttgctgagcacaggtgggacttacacaggcagagcctggctcagctgcccagcccagggacacagtggctcccacacactcacccctagggctgcctgtcgacttgcagtacctgccaccagacaagcagcgagaacctgatgcagacatccgcaagatgcttgttgaagccatcatgctggtgagcaggagccctgctgcaataagcaccaccccaacacacacacatgagcatgctgacatctgggtaacctcttccacctcctcagctgacagccacagcaccaggtcggcagc

SEQ ID NO: 5782 - protein, 206 aa, Homo sapiens; identical to SEQ ID NO: 5703

SEQ ID NO: 5783 - DNA, 2534 bp, Homo sapiens
gggccacacagcggacccctaagcggaccgctggcaccggtcgggtggcagcagagtgtcgctcgacatgggggaggccggggctggcgctggcgcctcgggagggccggaggcaagcccggaggcagaggtggtgaagctgctgcccttcctggcgccgggcgcgcgggcggacctgcaggcggcggcggtgcggcacgtgctggcgctgactggctgcggacccggccgcgcgctgttggcggggcaggcggcgctgctgcaggcgctgatggagctggcgccggcctctgccccggcccgggacgccgcccgcgcgctcgtgaacttggccgccgaccccggcctgcacgagacattgctggcggccgaccccgggctgccagcgcgcctgatgggccgcgcgttggacccgcagtggccctgggccgaggaggcggccgccgcgctagccaacctcagtcgcgagccggcgccgtgtgcagcgctcatggcggcgctggcggccgcggagccggcagactcgggcctggagcggctggtgcgcgcgctgtgcacgcccggctacaacgcccgcgcgcccctgcactacctagcgccgctgctctccaacctcagccaacgccctgcggcgcgggccttcctactggaccccgacaggtgcgtggtccagcggctgctgccccttacccagtaccccgactcctctgtacgcaggggcggggtggtggggacgctgcggaattgctgcttcgagcaccgacatcacgagtggttgcttggacctgaggtggacattctcccctttttgctcctgcccttggctgggcctgaggatttctccgaggaagagatgcaacggctgcctgtcgacttgcagtacctgccaccagacaagcagcgagaacctgatgcagacatccgcaagatgcttgttgaagccatcatgctgctgacagccacagcaccaggtcggcagcaggtgcgggaccagggagcctacctgatccttcgagagctgcacagctgggagccggagcccgacgtgcggacggcttgtgagaagctcatccaggtgcttattggggacgagcctgaacgtggcatggaaaacctgctggaggtgcaggtgcctgaggatgtggagcagcagctgcagcagctggattgcagggagcaggagcagttggagcgggagctggccccagagccatgggtggagagggccacacccacctgaggcccctgcagccggacaccagctccagggtcccctttgccaggctttctcagaccaggccttcctgcagctgtctgcaggccccctgggtccccttgttcagagactgtgctcttctgagaagcagagctacgcttaggctccagtaaggattggaggcactttccagccctgtgcagtgttgctaccagcaagaatgaaggttgtgcagagcagtactgtgaggtaggcaccgtgactcggctgcctgtgcagaaggtggaggtggcaggcggatggccagggagccatgagaagactcttcctgggcacggcgtggggactggacagaaaaccactgcaagccccaaggagccagctgaagcctcccaatccccagggcactgcagagtctgggcagaggtgggcgcataggtacaagtgctgctttgtcagcctcactccctgcagctctcagctccctgttccctgagacctggcctcaaagggctgacccagccatacgtagatcctggggtctttctaggactgtgcctccctgcttgacctatgctccaggaccctgccctcaacccttgtcagctccctaagtcttcctgtttcccagtctcagattgagtgggtgctctcattggcctctctagctaggccgtctccctggtcagcttccttgagcctgggccactcctccctggccttcttacctctgccaagagcctccagatgtgcctgcagcctagtccctgcccaagcttctcccccagccaccctctgcccctgtggtagagcccactataggcccaggcgccttacgtgcttctcccctggacctatgtgcatccctcacctgccagttatgtggctgccaagccccacaggctgtcatggtggctcttgccacacttcccttcctgagctgacctgacctcactgccacctcttgcattgggatcctgagggctggcccctgctcactgatgggccctcccaggcccgtcaagccctggtgaaggagcttagcttgtcttcttggcaattcacaatgcctcactccacaccctaaaactggagcgtcccctatggtctcctgctgtggcttgggtgccgggcgtctcccgcctccaggatctcctctcacctgcccccattaaagctctgccactcatgcaggcatgtgtggaccatgttttcccctggccagagcccccacctgccactggaggccagttgccctcttagcactcagacatcagcactgtcttcacagaataaatgctttatctggccttgcccc

SEQ ID NO: 5784 - protein, 390 aa, Homo sapiens; identical to SEQ ID NO: 785

SEQ ID NO: 5785 - DNA, 2066 bp, Homo sapiens
cagcagagtgtcgctcgacatgggggaggccggggctggcgctggcgcctcgggagggccggaggcaagcccggaggcagaggtggtgaagctgctgcccttcctggccgcgcccctgcactacctagcgccgctgctctccaacctcagccaacgccctgcggcgcgggccttcctactggaccccgacaggtgcgtggtccagcggctgctgccccttacccagtaccccgactcctctgtacgcaggggcggggtggtggggacgctgcggaattgctgcttcgagcaccgacatcacgagtggttgcttggacctgaggtggacattctcccctttttgctcctgcccttggctgggcctgaggatttctccgaggaagagatgcaacggctgcctgtcgacttgcagtacctgccaccagacaagcagcgagaacctgatgcagacatccgcaagatgcttgttgaagccatcatgctgctgacagccacagcaccaggtcggcagcaggtgcgggaccagggagcctacctgatccttcgagagctgcacagctgggagccggagcccgacgtgcggacggcttgtgagaagctcatccaggtgcttattggggacgagcctgaacgtggcatggaaaacctgctggaggtgcaggtgcctgaggatgtggagcagcagctgcagcagctggattgcagggagcaggagcagttggagcgggagctggccccagagccatgggtggagagggccacacccacctgaggcccctgcagccggacaccagctccagggtcccctttgccaggctttctcagaccaggccttcctgcagctgtctgcaggccccctgggtccccttgttcagagactgtgctcttctgagaagcagagctacgcttaggctccagtaaggattggaggcactttccagccctgtgcagtgttgctaccagcaagaatgaaggttgtgcagagcagtactgtgaggtaggcaccgtgactcggctgcctgtgcagaaggtggaggtggcaggcggatggccagggagccatgagaagactcttcctgggcacggcgtggggactggacagaaaaccactgcaagccccaaggagccagctgaagcctcccaatccccagggcactgcagagtctgggcagaggtgggcgcataggtacaagtgctgctttgtcagcctcactccctgcagctctcagctccctgttccctgagacctggcctcaaagggctgacccagccatacgtagatcctggggtctttctaggactgtgcctccctgcttgacctatgctccaggaccctgccctcaacccttgtcagctccctaagtcttcctgtttcccagtctcagattgagtgggtgctctcattggcctctctagctaggccgtctccctggtcagcttccttgagcctgggccactcctccctggccttcttacctctgccaagagcctccagatgtgcctgcagcctagtccctgcccaagcttctcccccagccaccctctgcccctgtggtagagcccactataggcccaggcgccttacgtgcttctcccctggacctatgtgcatccctcacctgccagttatgtggctgccaagccccacaggctgtcatggtggctcttgccacacttcccttcctgagctgacctgacctcactgccacctcttgcattgggatcctgagggctggcccctgctcactgatgggccctcccaggcccgtcaagccctggtgaaggagcttagcttgtcttcttggcaattcacaatgcctcactccacaccctaaaactggagcgtcccctatggtctcctgctgtggcttgggtgccgggcgtctcccgcctccaggatctcctctcacctgcccccattaaagctctgccactcatgcaggcatgtgtggaccatgttttcccctggccagagcccccacctgccactggaggccagttgccctcttagcactcagacatcagcactgtcttcacagaataaatgctttatctggccttgcccc

SEQ ID NO: 5786 - protein, 250 aa, Homo sapiens
MGEAGAGAGASGGPEASPEAEVVKLLPFLAAPLHYLAPLLSNLSQRPAARAFLLDPDRCVVQRLLPLTQYPDSSVRRGGVVGTLRNCCFEHRHHEWLLGPEVDILPFLLLPLAGPEDFSEEEMQRLPVDLQYLPPDKQREPDADIRKMLVEAIMLLTATAPGRQQVRDQGAYLILRELHSWEPEPDVRTACEKLIQVLIGDEPERGMENLLEVQVPEDVEQQLQQLDCREQEQLERELAPEPWVERATPT

SEQ ID NO: 5787 - DNA, 1920 bp, Homo sapiens
tgggggaggccggggctggcgctggcgcctcgggagggccggaggcaagcccggaggcagaggtggtgaagctgctgcccttcctggccgcgcccctgcactacctagcgccgctgctctccaacctcagccaacgccctgcggcgcgggccttcctactggaccccgacaggtgcgtggtccagcggctgctgccccttacccagtaccccgactcctctgtacgcaggggcggggtggtggggacgctgcggaattgctgcttcgagcaccgacatcacgagtggttgcttggacctgaggtggacattctcccctttttgctcctgcccttggctgggcctgaggatttctccgaggaagagatgcaacggctgcctgtcgacttgcagtacctgccaccagacaagcagcgagaacctgatgcagacatccgcaagatgcttgttgaagccatcatgctgctgacagccacagcaccaggtcggcagcaggtgcgggaccagggagcctacctgatccttcgagagctgcacagctgggagccggagcccgacgtgcggacggcttgtgagaagctcatccaggtgcttattggggacgagcctgaacgtggcatggaaaacctgctggaggtgcaggtgcctgaggatgtggagcagcagctgcagcagctggattgcagggagcaggagcagttggagcgggagctggccccagagccatgggtggagagggccacacccacctgaggcccctgcagccggacaccagctccagggtcccctttgccaggctttctcagaccaggccttcctgcagctgtctgcaggccccctgggtccccttgttcagagactgtgctcttctgagaagcagagctacgcttaggctccagtaaggattggaggcactttccagccctgtgcagtgttgctaccagcaagaatgaaggttgtgcagagcagtactgtgaggtaggcaccgtgactcggctgcctgtgcagaaggtggaggtggcaggcggatggccagggagccatgagaagactcttcctgggcacggcgtggggactggacagaaaaccactgcaagccccaaggagccagctgaagcctcccaatccccagggcactgcagagtctgggcagaggtgggcgcataggtacaagtgctgctttgtcagcctcactccctgcagctctcagctccctgttccctgagacctggcctcaaagggctgacccagccatacgtagatcctggggtctttctaggactgtgcctccctgcttgacctatgctccaggaccctgccctcaacccttgtcagctccctaagtcttcctgtttcccagtctcagattgagtgggtgctctcattggcctctctagctaggccgtctccctggtcagcttccttgagcctgggccactcctccctggccttcttacctctgccaagagcctccagatgtgcctgcagcctagtccctgcccaagcttctcccccagccaccctctgcccctgtggtagagcccactataggcccaggcgccttacgtgcttctcccctggacctatgtgcatccctcacctgccagttatgtggctgccaagccccacaggctgtcatggtggctcttgccacacttcccttcctgagctgacctgacctcactgccacctcttgcattgggatcctgagggctggcccctgctcactgatgggccctcccaggcccgtcaagccctggtgaaggagcttagcttgtcttcttggcaattcacaatgcctcactccacaccctaaaactggagcgtcccctatggtctcctgctgtggcttgggtgccgggcgtctcccgcctccaggatctcctctcacctgcccccattaaagctctgccactcatgc

SEQ ID NO: 5788 - protein, 128 aa, Homo sapiens
MQRLPVDLQYLPPDKQREPDADIRKMLVEAIMLLTATAPGRQQVRDQGAYLILRELHSWEPEPDVRTACEKLIQVLIGDEPERGMENLLEVQVPEDVEQQLQQLDCREQEQLERELAPEPWVERATPT

SEQ ID NO: 5789 - DNA, 1746 bp, Homo sapiens; identical to SEQ ID NO: 5708

SEQ ID NO: 5790 - protein, 103 aa, Homo sapiens; identical to SEQ ID NO: 5709

SEQ ID NO: 5791 - DNA, 1872 bp, Homo sapiens; identical to SEQ ID NO: 5710

SEQ ID NO: 5792 - protein, 103 aa, Homo sapiens; identical to SEQ ID NO: 5709

SEQ ID NO: 5793 - DNA, 3351 bp, Homo sapiens
ctgatccagcttctgcctgctgctgcccttcatggagggcagtgcatggaagggggtgtggtggtccagtttcaccagtcttggggggcacagctgagacctgacttgtgtcagagggcaggggccagggtggtagggggtgctgggtgggaactgcgtccctcttgaggcagcagccacacttctgaagacttgctgggactgcggcagaggcagggagtgatggggctgcaagctcagggcgggggctggcacagctctggactgggcagggggagggccagctctgggagacgaggtgcaggttctagagtggagaattgagctgtacctgcattgtgccctcaaagggtgcgtcttcttgttttgaggacctgcccactctgaggacatcttgtgggaccagtcctgcccacatggggcccactctctgtgaggtgaaaacccatttcaagggctgcagccagggtgaggcctctgtggacccctatggacgtggctggccacagaaagctgttaaagaaatgagggtggggatttctggggcataaggacaggaaaagggacacatacgtgtcaaccaccatttcaactgcaccccctccttcgagaggatgccatggccacactcagctgggccctaagctggcgcttccggggcagacagagggcgggcgggccgcgcgagtccagggcgggcgtgtgcttgcgagcggccgcaacgccgcgccgagcccgcgtccccggcgtctgggagcggaggtcgtcagggctgtatgcgtccgacggggacacggggactgcagcaccccggggctggcgtagctgtcgcgagcctgaaggccgcgcctgcgccgtggcggccgaactggcgctcaacagacgggcggggccgagccctgagaagccaggccccggcagcaaggaccccaaggccgacagcgtgcgggccatcagcgtgcgcaccctctacctggtcagcaccaccgtggacaggatgagtcacgtcctctggccatacctgctccagttcctcacccctgtgcgcttcactggggccctgactccgctctgcaggagcctcgtgcatctggcgcagaagaggcaggaggccggggccgacgccttcctcatccagtacgacgcccatggcttggaaggggttaccttctcagtgggcagccgcggtcagggctcaggtgtggttttcctctacgttgtgtcttccagcccctacctaggggacggacgtggggcagcggcgctgcgcctcctcagtgttctgcacccaaacattcaccctttgctgggtcagcattgggaaacgactgtcccgctgctgctggggtacctggatgagcacacagaagagaccctgccacaggaggagtgggaggagaagctgttgatgttcctgcgagacaccctggccatcatttctgacaacgcgtggatctgccagctgagcctggagctgtgcaggcagctgccctgctacgatgaggcaccccaggagaagaacttcctgtacaaatgcataggcaccaccctgggtgctgcttcaagtaaggaggtggtgaggaagcaccttcaagagctgctggagacggccagataccaggaggaggcagaacgcgagtgcgtgctcttccctgcccggggtaagtgtgctgccccccagggcctcgcctgctgcttcgggatctgtgccatctcccacctcgaggacacgctggcccagctggaggacttcgatcgaagtgagaacgaagtggagaaggtgaagagtgctctgatcctgtgctatgggcacgtggcggcccgggccccccgggagctggtgctggccaaggtagagtcagacatcctccggaacatctgccagcacttcagcaccaaggaggcgttcgagagcatcaccagggctccttccctggcctgggccctggacggcagtgggaagaagggaggcgtctgcgcctccgaggggccgggtcgtgggctgtcgccccccagggagttcagccagccccacccgtcccaggacagctggaacctcctctggctctgctccccagtgctcatgggggctgtacctccccggaccccagacccagccctgaagctgtgccttgtccagagtgtgtgcatggtcagccgcgccatctgcagcagcacccaggctggctccttccacttcacccggaaagcagagctggtggcacagatgatggagttcatcagggcagagcccccggactccttgaggacacctattcggaagaaagccatgctcacctgcacttacttggtgtatcctttcctgcctctgcacaggcccgtgcagctgcgtgtctccgtggagccagcgctggacgagcaggcccgggcggatgtgatccatggctgcctgcacagcatcatggccctgctgcctgagcccaaggaggaggacggaggctgccagaagtccctgtatctggagacactgcacgcccttgaggatctgctgacgagcctcctgcagcggaacatgaccccccaaggcctgcagatcatgattgagcacctgagcccatggatcaagtccccaagaggtcacgagcgggcgcgggccctgggcctgagcgccctcctgctgcgctacttcctggagcacctgcgtgtcagctggcgcccaagtagataccaggtttccatctgagcccaggatcctgtgcaagggccctggtgcccttccacaacctgggccttctcatcggcctcttctccccacggtgtgcggacctgtggcctgccacccgccaggaggccgtggactgtgtctactccctgctgtacctccagctcggctatgagggcttctcccgggactaccgcgatgacgtggcggagcggctcctcagcctcaaggacggcctcgtgcaccctgaccccgccattctcttccacacctgccacagtgtaggccagattattgccaagcgcctccccccagaccagctcatcagcctcttgctaaccatgtttgaggccctgggagaccccgaaaagaactgctcccgagcagctaccgtcatgatcaactgcctgctgcaggagcggggcggtgtgctccaggagaaggtgcccgagatcgtgagcgtcctgcgctccaagcttcaggaggcccagggagagcacgtcctgccggccgcccagcacagcgtgtacctcctggccacccagcactgcgcagccgtggtgtccagcctcctgggcagccccttgcccttggacaggtacccagctcagactccaggcttaggggtccctctggaatgatgctccccctggaatgatgctccccga

SEQ ID NO: 5794 - protein, 694 aa, Homo sapiens
MATLSWALSWRFRGRQRAGGPRESRAGVCLRAAATPRRARVPGVWERRSSGLYASDGDTGTAAPRGWRSCREPEGRACAVAAELALNRRAGPSPEKPGPGSKDPKADSVRAISVRTLYLVSTTVDRMSHVLWPYLLQFLTPVRFTGALTPLCRSLVHLAQKRQEAGADAFLIQYDAHGLEGVTFSVGSRGQGSGVVFLYVVSSSPYLGDGRGAAALRLLSVLHPNIHPLLGQHWETTVPLLLGYLDEHTEETLPQEEWEEKLLMFLRDTLAIISDNAWICQLSLELCRQLPCYDEAPQEKNFLYKCIGTTLGAASSKEVVRKHLQELLETARYQEEAERECVLFPARGKCAAPQGLACCFGICAISHLEDTLAQLEDFDRSENEVEKVKSALILCYGHVAARAPRELVLAKVESDILRNICQHFSTKEAFESITRAPSLAWALDGSGKKGGVCASEGPGRGLSPPREFSQPHPSQDSWNLLWLCSPVLMGAVPPRTPDPALKLCLVQSVCMVSRAICSSTQAGSFHFTRKAELVAQMMEFIRAEPPDSLRTPIRKKAMLTCTYLVYPFLPLHRPVQLRVSVEPALDEQARADVIHGCLHSIMALLPEPKEEDGGCQKSLYLETLHALEDLLTSLLQRNMTPQGLQIMIEHLSPWIKSPRGHERARALGLSALLLRYFLEHLRVSWRPSRYQVSI

SEQ ID NO: 5795 - DNA, 4703 bp, Homo sapiens
ctgatccagcttctgcctgctgctgcccttcatggagggcagtgcatggaagggggtgtggtggtccagtttcaccagtcttggggggcacagctgagacctgacttgtgtcagagggcaggggccagggtggtagggggtgctgggtgggaactgcgtccctcttgaggcagcagccacacttctgaagacttgctgggactgcggcagaggcagggagtgatggggctgcaagctcagggcgggggctggcacagctctggactgggcagggggagggccagctctgggagacgaggtgcaggttctagagtggagaattgagctgtacctgcattgtgccctcaaagggtgcgtcttcttgttttgaggacctgcccactctgaggacatcttgtgggaccagtcctgcccacatggggcccactctctgtgaggtgaaaacccatttcaagggctgcagccagggtgaggcctctgtggacccctatggacgtggctggccacagaaagctgttaaagaaatgagggtggggatttctggggcataaggacaggaaaagggacacatacgtgtcaaccaccatttcaactgcaccccctccttcgagaggatgccatggccacactcagctgggccctaagctggcgcttccggggcagacagagggcgggcgggccgcgcgagtccagggcgggcgtgtgcttgcgagcggccgcaacgccgcgccgagcccgcgtccccggcgtctgggagcggaggtcgtcagggctgtatgcgtccgacggggacacggggactgcagcaccccggggctggcgtagctgtcgcgagcctgaaggccgcgcctgcgccgtggcggccgaactggcgctcaacagacgggcggggccgagccctgagaagccaggccccggcagcaaggaccccaaggccgacagcgtgcgggccatcagcgtgcgcaccctctacctggtcagcaccaccgtggacaggatgagtcacgtcctctggccatacctgctccagttcctcacccctgtgcgcttcactggggccctgactccgctctgcaggagcctcgtgcatctggcgcagaagaggcaggaggccggggccgacgccttcctcatccagtacgacgcccatggcttggaaggggttaccttctcagtgggcagccgcggtcagggctcaggtgtggttttcctctacgttgtgtcttccagcccctacctaggggacggacgtggggcagcggcgctgcgcctcctcagtgttctgcacccaaacattcaccctttgctgggtcagcattgggaaacgactgtcccgctgctgctggggtacctggatgagcacacagaagagaccctgccacaggaggagtgggaggagaagctgttgatgttcctgcgagacaccctggccatcatttctgacaacgcgtggatctgccagctgagcctggagctgtgcaggcagctgccctgctacgatgaggcaccccaggagaagaacttcctgtacaaatgcataggcaccaccctgggtgctgcttcaagtaaggaggtggtgaggaagcaccttcaagagctgctggagacggccagataccaggaggaggcagaacgcgagtgcgtgctcttccctgcccggggtaagtgtgctgccccccagggcctcgcctgctgcttcgggatctgtgccatctcccacctcgaggacacgctggcccagctggaggacttcgatcgaagtgagaacgaagtggagaaggtgaagagtgctctgatcctgtgctatgggcacgtggcggcccgggccccccgggagctggtgctggccaaggtagagtcagacatcctccggaacatctgccagcacttcagcaccaaggaggcgttcgagagcatcaccagggctccttccctggcctgggccctggacggcagtgggaagaagggaggcgtctgcgcctccgaggggccgggtcgtgggctgtcgccccccagggagttcagccagccccacccgtcccaggacagctggaacctcctctggctctgctccccagtgctcatgggggctgtacctccccggaccccagacccagccctgaagctgtgccttgtccagagtgtgtgcatggtcagccgcgccatctgcagcagcacccaggctggctccttccacttcacccggaaagcagagctggtggcacagatgatggagttcatcagggcagagcccccggactccttgaggacacctattcggaagaaagccatgctcacctgcacttacttggtgtatcctttcctgcctctgcacaggcccgtgcagctgcgtgtctccgtggagccagcgctggacgagcaggcccgggcggatgtgatccatggctgcctgcacagcatcatggccctgctgcctgagcccaaggaggaggacggaggctgccagaagtccctgtatctggagacactgcacgcccttgaggatctgctgacgagcctcctgcagcggaacatgaccccccaaggcctgcagatcatgattgagcacctgagcccatggatcaagtccccaagaggtcacgagcgggcgcgggccctgggcctgagcgccctcctgctgcgctacttcctggagcacctgcgtgtcagctggcgcccaagtagataccaggtttccatctgagcccaggatcctgtgcaagggccctggtgcccttccacaacctgggccttctcatcggcctcttctccccacggtgtgcggacctgtggcctgccacccgccaggaggccgtggactgtgtctactccctgctgtacctccagctcggctatgagggcttctcccgggactaccgcgatgacgtggcggagcggctcctcagcctcaaggacggcctcgtgcaccctgaccccgccattctcttccacacctgccacagtgtaggccagctggtcaaggtgctttgtctactgccatctgaagggaggatgaccctgggcaccgcgtcccctccccgacccatgcctgcctggtctactctgaggctcagctcacaacacaagcttgaattattgccaagcgcctccccccagaccagctcatcagcctcttgctaaccatgtttgaggccctgggagaccccgaaaagaactgctcccgagcagctaccgtcatgatcaactgcctgctgcaggagcggggcggtgtgctccaggagaaggtgcccgagatcgtgagcgtcctgcgctccaagcttcaggaggcccagggagagcacgtcctgccggccgcccagcacagcgtgtacctcctggccacccagcactgcgcagccgtggtgtccagcctcctgggcagccccttgcccttggacagccacacctgcatgctgtggcgggcgctggcggtggagcctcgcctagctgcccaggtcctggggctgctgctggagaagatgagtagggacgtccctttcaaggagagccgggccttcctgctgggccgcaccccagaccgcgtggccacgctgctgcctctctcggctacctgtgcactgtttgaggtcatgtccacgcctgcagcggggcccgcggtgctcgagctctacccccagctgtttgtggtgcttctgctgcgcgtcagctgcaccgtgggtgtccagctgccccggaacctgcaggcccaggaaaggaggggtgccagtccagccctagccaccaggaacctggaaccctgcagctctgcagtggacaccctgcggtccatgctactccgcagcggcagcgaggatgtggtacagcgcatggacctggagggaggctgggaactgctcaggacctcggcggggcatgaggagggggccaccaggttggccagggccatggctgagcacgcagggccccgactccccctggtgctgaagacgctggcatgcacacacagcagtgcgtatgagaaccagagggtgaccaccaccgccttcctggccgagctgctgaacagcaacgtggccaacgacctcatgctcttggactcgctgctggagagcctggcggctcgccagaaggacacatgcgccagcgtgcggaggctggtgctccgcggcctggccaacctggcctccggctgccctgacaaggtgcgaacccacggcccccagctcctcacagccatgattggcgggctggacgacggggacaaccctcacagcccagtggccctggaggccatgctgggccttgcgaggctggtgcacctggtggagtcctgggacctgcgctcagggctgctgcacgtggccatccgcatccggcctttcttcgacagtgtgaccgtggagagcgcggacctgcagggctgctgctttgctgggcctggcagcccccacccgtaaggcccccacccgtcggggtgtttcctggcccgggtcaggcaagggcacccatcaatggcagggggctaggcaggcaggcctgcaggggcacagcctgtgaggagacgtatgctgcatgtccttcccaggagaagatggagttccggacggcatctatccgcctctttgggcaccttaacaaggtctgccacggagactgtgaggacgtcttcctggaccaggtggtgggcgggctggcgcccctgctgctgcacctgcaggaccctcaggccaccgtggccagcg

SEQ ID NO: 5796 - protein, 694 aa, Homo sapiens; identical to SEQ ID NO: 5794

SEQ ID NO: 5797 - DNA, 5152 bp, Homo sapiens
ctgatccagcttctgcctgctgctgcccttcatggagggcagtgcatggaagggggtgtggtggtccagtttcaccagtcttggggggcacagctgagacctgacttgtgtcagagggcaggggccagggtggtagggggtgctgggtgggaactgcgtccctcttgaggcagcagccacacttctgaagacttgctgggactgcggcagaggcagggagtgatggggctgcaagctcagggcgggggctggcacagctctggactgggcagggggagggccagctctgggagacgaggtgcaggttctagagtggagaattgagctgtacctgcattgtgccctcaaagggtgcgtcttcttgttttgaggacctgcccactctgaggacatcttgtgggaccagtcctgcccacatggggcccactctctgtgaggtgaaaacccatttcaagggctgcagccagggtgaggcctctgtggacccctatggacgtggctggccacagaaagctgttaaagaaatgagggtggggatttctggggcataaggacaggaaaagggacacatacgtgtcaaccaccatttcaactgcaccccctccttcgagaggatgccatggccacactcagctgggccctaagctggcgcttccggggcagacagagggcgggcgggccgcgcgagtccagggcgggcgtgtgcttgcgagcggccgcaacgccgcgccgagcccgcgtccccggcgtctgggagcggaggtcgtcagggctgtatgcgtccgacggggacacggggactgcagcaccccggggctggcgtagctgtcgcgagcctgaaggccgcgcctgcgccgtggcggccgaactggcgctcaacagacgggcggggccgagccctgagaagccaggccccggcagcaaggaccccaaggccgacagcgtgcgggccatcagcgtgcgcaccctctacctggtcagcaccaccgtggacaggatgagtcacgtcctctggccatacctgctccagttcctcacccctgtgcgcttcactggggccctgactccgctctgcaggagcctcgtgcatctggcgcagaagaggcaggaggccggggccgacgccttcctcatccagtacgacgcccatggcttggaaggggttaccttctcagtgggcagccgcggtcagggctcaggtgtggttttcctctacgttgtgtcttccagcccctacctaggggacggacgtggggcagcggcgctgcgcctcctcagtgttctgcacccaaacattcaccctttgctgggtcagcattgggaaacgactgtcccgctgctgctggggtacctggatgagcacacagaagagaccctgccacaggaggagtgggaggagaagctgttgatgttcctgcgagacaccctggccatcatttctgacaacgcgtggatctgccagctgagcctggagctgtgcaggcagctgccctgctacgatgaggcaccccaggagaagaacttcctgtacaaatgcataggcaccaccctgggtgctgcttcaagtaaggaggtggtgaggaagcaccttcaagagctgctggagacggccagataccaggaggaggcagaacgcgagtgcgtgctcttccctgcccggggtaagtgtgctgccccccagggcctcgcctgctgcttcgggatctgtgccatctcccacctcgaggacacgctggcccagctggaggacttcgatcgaagtgagaacgaagtggagaaggtgaagagtgctctgatcctgtgctatgggcacgtggcggcccgggccccccgggagctggtgctggccaaggtagagtcagacatcctccggaacatctgccagcacttcagcaccaaggaggcgttcgagagcatcaccagggctccttccctggcctgggccctggacggcagtgggaagaagggaggcgtctgcgcctccgaggggccgggtcgtgggctgtcgccccccagggagttcagccagccccacccgtcccaggacagctggaacctcctctggctctgctccccagtgctcatgggggctgtacctccccggaccccagacccagccctgaagctgtgccttgtccagagtgtgtgcatggtcagccgcgccatctgcagcagcacccaggctggctccttccacttcacccggaaagcagagctggtggcacagatgatggagttcatcagggcagagcccccggactccttgaggacacctattcggaagaaagccatgctcacctgcacttacttggtgtatcctttcctgcctctgcacaggcccgtgcagctgcgtgtctccgtggagccagcgctggacgagcaggcccgggcggatgtgatccatggctgcctgcacagcatcatggccctgctgcctgagcccaaggaggaggacggaggctgccagaagtccctgtatctggagacactgcacgcccttgaggatctgctgacgagcctcctgcagcggaacatgaccccccaaggcctgcagatcatgattgagcacctgagcccatggatcaagtccccaagaggtcacgagcgggcgcgggccctgggcctgagcgccctcctgctgcgctacttcctggagcacctgcgtgtcagctggcgcccaagtagataccaggtttccatctgagcccaggatcctgtgcaagggccctggtgcccttccacaacctgggccttctcatcggcctcttctccccacggtgtgcggacctgtggcctgccacccgccaggaggccgtggactgtgtctactccctgctgtacctccagctcggctatgagggcttctcccgggactaccgcgatgacgtggcggagcggctcctcagcctcaaggacggcctcgtgcaccctgaccccgccattctcttccacacctgccacagtgtaggccagctggtcaaggtgctttgtctactgccatctgaagggaggatgaccctgggcaccgcgtcccctccccgacccatgcctgcctggtctactctgaggctcagctcacaacacaagcttgaattattgccaagcgcctccccccagaccagctcatcagcctcttgctaaccatgtttgaggccctgggagaccccgaaaagaactgctcccgagcagctaccgtcatgatcaactgcctgctgcaggagcggggcggtgtgctccaggagaaggtgcccgagatcgtgagcgtcctgcgctccaagcttcaggaggcccagggagagcacgtcctgccggccgcccagcacagcgtgtacctcctggccacccagcactgcgcagccgtggtgtccagcctcctgggcagccccttgcccttggacagccacacctgcatgctgtggcgggcgctggcggtggagcctcgcctagctgcccaggtcctggggctgctgctggagaagatgagtagggacgtccctttcaaggagagccgggccttcctgctgggccgcaccccagaccgcgtggccacgctgctgcctctctcggctacctgtgcactgtttgaggtcatgtccacgcctgcagcggggcccgcggtgctcgagctctacccccagctgtttgtggtgcttctgctgcgcgtcagctgcaccgtgggtgtccagctgccccggaacctgcaggcccaggaaaggaggggtgccagtccagccctagccaccaggaacctggaaccctgcagctctgcagtggacaccctgcggtccatgctactccgcagcggcagcgaggatgtggtacagcgcatggacctggagggaggctgggaactgctcaggacctcggcggggcatgaggagggggccaccaggttggccagggccatggctgagcacgcagggccccgactccccctggtgctgaagacgctggcatgcacacacagcagtgcgtatgagaaccagagggtgaccaccaccgccttcctggccgagctgctgaacagcaacgtggccaacgacctcatgctcttggactcgctgctggagagcctggcggctcgccagaaggacacatgcgccagcgtgcggaggctggtgctccgcggcctggccaacctggcctccggctgccctgacaaggtgcgaacccacggcccccagctcctcacagccatgattggcgggctggacgacggggacaaccctcacagcccagtggccctggaggccatgctgggccttgcgaggctggtgcacctggtggagtcctgggacctgcgctcagggctgctgcacgtggccatccgcatccggcctttcttcgacagtgagaagatggagttccggacggcatctatccgcctctttgggcaccttaacaaggtctgccacggagactgtgaggacgtcttcctggaccaggtggtgggcgggctggcgcccctgctgctgcacctgcaggaccctcaggccaccgtggccagcgcctgcaggtttgccctgcgcatgtgtggccccaatctggcatgtgaggagctctcagctgctttccagaaacacctgcaggagggccgagccctgcacttcggggagttcctcaacaccacctgcaagcacctgatgcaccatttcccagacctgctgggccgtctcctgaccacctgcctgttctacttcaagagcagctgggagaacgtccgagctgctgcacccctgttcaccggtaagcaccaccccctgccccacccccacgccgcccggcagccccgcctgatgcccccacttcacagggttcctggtgctgcactcggagcccaggcagcagccgcaggtggacctggaccagctcattgcggcgctccagatcctgctgaaggacccggcccccgaggtgcggacgagggctgctgaggccctgggccgcctggtgaagctcgcctaaggctccggccagcacccccagcgaggagtatgcacccagacctgtgcctgagctccaagacagggcctcctgaggaccacagcctgggcacacgactggaggggcctggccccagaacaggcactgctggggaccaaacccaagcccttcagtgagggatgtgcccaataaactcatctgctcccag

SEQ ID NO: 5798 - protein, 694 aa, Homo sapiens; identical to SEQ ID NO: 5794

SEQ ID NO: 5799 - DNA, 3285 bp, Homo sapiens
ctgatccagcttctgcctgctgctgcccttcatggagggcagtgcatggaagggggtgtggtggtccagtttcaccagtcttggggggcacagctgagacctgacttgtgtcagagggcaggggccagggtggtagggggtgctgggtgggaactgcgtccctcttgaggcagcagccacacttctgaagacttgctgggactgcggcagaggcagggagtgatggggctgcaagctcagggcgggggctggcacagctctggactgggcagggggagggccagctctgggagacgaggtgcaggttctagagtggagaattgagctgtacctgcattgtgccctcaaagggtgcgtcttcttgttttgaggacctgcccactctgaggacatcttgtgggaccagtcctgcccacatggggcccactctctgtgaggtgaaaacccatttcaagggctgcagccagggtgaggcctctgtggacccctatggacgtggctggccacagaaagctgttaaagaaatgagggtggggatttctggggcataaggacaggaaaagggacacatacgtgtcaaccaccatttcaactgcaccccctccttcgagaggatgccatggccacactcagctgggccctaagctggcgcttccggggcagacagagggcgggcgggccgcgcgagtccagggcgggcgtgtgcttgcgagcggccgcaacgccgcgccgagcccgcgtccccggcgtctgggagcggaggtcgtcagggctgtatgcgtccgacggggacacggggactgcagcaccccggggctggcgtagctgtcgcgagcctgaaggccgcgcctgcgccgtggcggccgaactggcgctcaacagacgggcggggccgagccctgagaagccaggccccggcagcaaggaccccaaggccgacagcgtgcgggccatcagcgtgcgcaccctctacctggtcagcaccaccgtggacaggatgagtcacgtcctctggccatacctgctccagttcctcacccctgtgcgcttcactggggccctgactccgctctgcaggagcctcgtgcatctggcgcagaagaggcaggaggccggggccgacgccttcctcatccagtacgacgcccatggcttggaaggggttaccttctcagtgggcagccgcggtcagggctcaggtgtggttttcctctacgttgtgtcttccagcccctacctaggggacggacgtggggcagcggcgctgcgcctcctcagtgttctgcacccaaacattcaccctttgctgggtcagcattgggaaacgactgtcccgctgctgctggggtacctggatgagcacacagaagagaccctgccacaggaggagtgggaggagaagctgttgatgttcctgcgagacaccctggccatcatttctgacaacgcgtggatctgccagctgagcctggagctgtgcaggcagctgccctgctacgatgaggcaccccaggagaagaacttcctgtacaaatgcataggcaccaccctgggtgctgcttcaagtaaggaggtggtgaggaagcaccttcaagagctgctggagacggccagataccaggaggaggcagaacgcgagtgcgtgctcttccctgcccggggtaagtgtgctgccccccagggcctcgcctgctgcttcgggatctgtgccatctcccacctcgaggacacgctggcccagctggaggacttcgatcgaagtgagaacgaagtggagaaggtgaagagtgctctgatcctgtgctatgggcacgtggcggcccgggccccccgggagctggtgctggccaaggtagagtcagacatcctccggaacatctgccagcacttcagcaccaaggaggcgttcgagagcatcaccagggctccttccctggcctgggccctggacggcagtgggaagaagggaggcgtctgcgcctccgaggggccgggtcgtgggctgtcgccccccagggagttcagccagccccacccgtcccaggacagctggaacctcctctggctctgctccccagtgctcatgggggctgtacctccccggaccccagacccagccctgaagctgtgccttgtccagagtgtgtgcatggtcagccgcgccatctgcagcagcacccaggctggctccttccacttcacccggaaagcagagctggtggcacagatgatggagttcatcagggcagagcccccggactccttgaggacacctattcggaagaaagccatgctcacctgcacttacttggtgtatcctttcctgcctctgcacaggcccgtgcagctgcgtgtctccgtggagccagcgctggacgagcaggcccgggcggatgtgatccatggctgcctgcacagcatcatggccctgctgcctgagcccaaggaggaggacggaggctgccagaagtccctgtatctggagacactgcacgcccttgaggatctgctgacgagcctcctgcagcggaacatgaccccccaaggcctgcagatcatgattgagcacctgagcccatggatcaagtccccaagaggtcacgagcgggcgcgggccctgggcctgagcgccctcctgctgcgctacttcctggagcacctgcgtgtcagctggcgcccaagtagataccaggtttccatctgagcccaggatcctgtgcaagggccctggtgcccttccacaacctgggccttctcatcggcctcttctccccacggtgtgcggacctgtggcctgccacccgccaggaggccgtggactgtgtctactccctgctgtacctccagctcggctatgagggcttctcccgggactaccgcgatgacgtggcggagcggctcctcagcctcaaggacggcctcgtgcaccctgaccccgccattctcttccacacctgccacagtgtaggccagattattgccaagcgcctccccccagaccagctcatcagcctcttgctaaccatgtttgaggccctgggagaccccgaaaagaactgctcccgagcagctaccgtcatgatcaactgcctgctgcaggagcggggcggtgtgctccaggagaaggtgcccgagatcgtgagcgtcctgcgctcctgaggaccacagcctgggcacacgactggaggggcctggccccagaacaggcactgctggggaccaaacccaagcccttcagtgagggatgtgcccaataaactcatctgctcccagcgagtgactgac

SEQ ID NO: 5800 - protein, 694 aa, Homo sapiens; identical to SEQ ID NO: 5794

SEQ ID NO: 5801 - DNA, 5097 bp, Homo sapiens
ctgatccagcttctgcctgctgctgcccttcatggagggcagtgcatggaagggggtgtggtggtccagtttcaccagtcttggggggcacagctgagacctgacttgtgtcagagggcaggggccagggtggtagggggtgctgggtgggaactgcgtccctcttgaggcagcagccacacttctgaagacttgctgggactgcggcagaggcagggagtgatggggctgcaagctcagggcgggggctggcacagctctggactgggcagggggagggccagctctgggagacgaggtgcaggttctagagtggagaattgagctgtacctgcattgtgccctcaaagggtgcgtcttcttgttttgaggacctgcccactctgaggacatcttgtgggaccagtcctgcccacatggggcccactctctgtgaggtgaaaacccatttcaagggctgcagccagggtgaggcctctgtggacccctatggacgtggctggccacagaaagctgttaaagaaatgagggtggggatttctggggcataaggacaggaaaagggacacatacgtgtcaaccaccatttcaactgcaccccctccttcgagaggatgccatggccacactcagctgggccctaagctggcgcttccggggcagacagagggcgggcgggccgcgcgagtccagggcgggcgtgtgcttgcgagcggccgcaacgccgcgccgagcccgcgtccccggcgtctgggagcggaggtcgtcagggctgtatgcgtccgacggggacacggggactgcagcaccccggggctggcgtagctgtcgcgagcctgaaggccgcgcctgcgccgtggcggccgaactggcgctcaacagacgggcggggccgagccctgagaagccaggccccggcagcaaggaccccaaggccgacagcgtgcgggccatcagcgtgcgcaccctctacctggtcagcaccaccgtggacaggatgagtcacgtcctctggccatacctgctccagttcctcacccctgtgcgcttcactggggccctgactccgctctgcaggagcctcgtgcatctggcgcagaagaggcaggaggccggggccgacgccttcctcatccagtacgacgcccatggcttggaaggggttaccttctcagtgggcagccgcggtcagggctcaggtgtggttttcctctacgttgtgtcttccagcccctacctaggggacggacgtggggcagcggcgctgcgcctcctcagtgttctgcacccaaacattcaccctttgctgggtcagcattgggaaacgactgtcccgctgctgctggggtacctggatgagcacacagaagagaccctgccacaggaggagtgggaggagaagctgttgatgttcctgcgagacaccctggccatcatttctgacaacgcgtggatctgccagctgagcctggagctgtgcaggcagctgccctgctacgatgaggcaccccaggagaagaacttcctgtacaaatgcataggcaccaccctgggtgctgcttcaagtaaggaggtggtgaggaagcaccttcaagagctgctggagacggccagataccaggaggaggcagaacgcgagtgcgtgctcttccctgcccggggtaagtgtgctgccccccagggcctcgcctgctgcttcgggatctgtgccatctcccacctcgaggacacgctggcccagctggaggacttcgatcgaagtgagaacgaagtggagaaggtgaagagtgctctgatcctgtgctatgggcacgtggcggcccgggccccccgggagctggtgctggccaaggtagagtcagacatcctccggaacatctgccagcacttcagcaccaaggaggcgttcgagagcatcaccagggctccttccctggcctgggccctggacggcagtgggaagaagggaggcgtctgcgcctccgaggggccgggtcgtgggctgtcgccccccagggagttcagccagccccacccgtcccaggacagctggaacctcctctggctctgctccccagtgctcatgggggctgtacctccccggaccccagacccagccctgaagctgtgccttgtccagagtgtgtgcatggtcagccgcgccatctgcagcagcacccaggctggctccttccacttcacccggaaagcagagctggtggcacagatgatggagttcatcagggcagagcccccggactccttgaggacacctattcggaagaaagccatgctcacctgcacttacttggtgtatcctttcctgcctctgcacaggcccgtgcagctgcgtgtctccgtggagccagcgctggacgagcaggcccgggcggatgtgatccatggctgcctgcacagcatcatggccctgctgcctgagcccaaggaggaggacggaggctgccagaagtccctgtatctggagacactgcacgcccttgaggatctgctgacgagcctcctgcagcggaacatgaccccccaaggcctgcagatcatgattgagcacctgagcccatggatcaagtccccaagaggtcacgagcgggcgcgggccctgggcctgagcgccctcctgctgcgctacttcctggagcacctgcgtgtcagctggcgcccaagtagataccaggtttccatctgagcccaggatcctgtgcaagggccctggtgcccttccacaacctgggccttctcatcggcctcttctccccacggtgtgcggacctgtggcctgccacccgccaggaggccgtggactgtgtctactccctgctgtacctccagctcggctatgagggcttctcccgggactaccgcgatgacgtggcggagcggctcctcagcctcaaggacggcctcgtgcaccctgaccccgccattctcttccacacctgccacagtgtaggccagctggtcaaggtgctttgtctactgccatctgaagggaggatgaccctgggcaccgcgtcccctccccgacccatgcctgcctggtctactctgaggctcagctcacaacacaagcttgaattattgccaagcgcctccccccagaccagctcatcagcctcttgctaaccatgtttgaggccctgggagaccccgaaaagaactgctcccgagcagctaccgtcatgatcaactgcctgctgcaggagcggggcggtgtgctccaggagaaggtgcccgagatcgtgagcgtcctgcgctccaagcttcaggaggcccagggagagcacgtcctgccggccgcccagcacagcgtgtacctcctggccacccagcactgcgcagccgtggtgtccagcctcctgggcagccccttgcccttggacagccacacctgcatgctgtggcgggcgctggcggtggagcctcgcctagctgcccaggtcctggggctgctgctggagaagatgagtagggacgtccctttcaaggagagccgggccttcctgctgggccgcaccccagaccgcgtggccacgctgctgcctctctcggctacctgtgcactgtttgaggtcatgtccacgcctgcagcggggcccgcggtgctcgagctctacccccagctgtttgtggtgcttctgctgcgcgtcagctgcaccgtgggtgtccagctgccccggaacctgcaggcccaggaaaggaggggtgccagtccagccctagccaccaggaacctggaaccctgcagctctgcagtggacaccctgcggtccatgctactccgcagcggcagcgaggatgtggtacagcgcatggacctggagggaggctgggaactgctcaggacctcggcggggcatgaggagggggccaccaggttggccagggccatggctgagcacgcagggccccgactccccctggtgctgaagacgctggcatgcacacacagcagtgcgtatgagaaccagagggtgaccaccaccgccttcctggccgagctgctgaacagcaacgtggccaacgacctcatgctcttggactcgctgctggagagcctggcggctcgccagaaggacacatgcgccagcgtgcggaggctggtgctccgcggcctggccaacctggcctccggctgccctgacaaggtgcgaacccacggcccccagctcctcacagccatgattggcgggctggacgacggggacaaccctcacagcccagtggccctggaggccatgctgggccttgcgaggctggtgcacctggtggagtcctgggacctgcgctcagggctgctgcacgtggccatccgcatccggcctttcttcgacagtgagaagatggagttccggacggcatctatccgcctctttgggcaccttaacaaggtctgccacggagactgtgaggacgtcttcctggaccaggtggtgggcgggctggcgcccctgctgctgcacctgcaggaccctcaggccaccgtggccagcgcctgcaggtttgccctgcgcatgtgtggccccaatctggcatgtgaggagctctcagctgctttccagaaacacctgcaggagggccgagccctgcacttcggggagttcctcaacaccacctgcaagcacctgatgcaccatttcccagacctgctgggccgtctcctgaccacctgcctgttctacttcaagagcagctgggagaacgtccgagctgctgcacccctgttcaccgggttcctggtgctgcactcggagcccaggcagcagccgcaggtggacctggaccagctcattgcggcgctccagatcctgctgaaggacccggcccccgaggtgcggacgagggctgctgaggccctgggccgcctggtgaagctcgcctaaggctccggccagcacccccagcgaggagtatgcacccagacctgtgcctgagctccaagacagggcctcctgaggaccacagcctgggcacacgactggaggggcctggccccagaacaggcactgctggggaccaaacccaagcccttcagtgagggatgtgcccaataaactcatctgctcccagcgagtgactgac

SEQ ID NO: 5802 - protein, 694 aa, Homo sapiens; identical to SEQ ID NO: 5794

SEQ ID NO: 5803 - DNA, 5923 bp, Homo sapiens
ctgatccagcttctgcctgctgctgcccttcatggagggcagtgcatggaagggggtgtggtggtccagtttcaccagtcttggggggcacagctgagacctgacttgtgtcagagggcaggggccagggtggtagggggtgctgggtgggaactgcgtccctcttgaggcagcagccacacttctgaagacttgctgggactgcggcagaggcagggagtgatggggctgcaagctcagggcgggggctggcacagctctggactgggcagggggagggccagctctgggagacgaggtgcaggttctagagtggagaattgagctgtacctgcattgtgccctcaaagggtgcgtcttcttgttttgaggacctgcccactctgaggacatcttgtgggaccagtcctgcccacatggggcccactctctgtgaggtgaaaacccatttcaagggctgcagccagggtgaggcctctgtggacccctatggacgtggctggccacagaaagctgttaaagaaatgagggtggggatttctggggcataaggacaggaaaagggacacatacgtgtcaaccaccatttcaactgcaccccctccttcgagaggatgccatggccacactcagctgggccctaagctggcgcttccggggcagacagagggcgggcgggccgcgcgagtccagggcgggcgtgtgcttgcgagcggccgcaacgccgcgccgagcccgcgtccccggcgtctgggagcggaggtcgtcagggctgtatgcgtccgacggggacacggggactgcagcaccccggggctggcgtagctgtcgcgagcctgaaggccgcgcctgcgccgtggcggccgaactggcgctcaacagacgggcggggccgagccctgagaagccaggccccggcagcaaggaccccaaggccgacagcgtgcgggccatcagcgtgcgcaccctctacctggtcagcaccaccgtggacaggatgagtcacgtcctctggccatacctgctccagttcctcacccctgtgcgcttcactggggccctgactccgctctgcaggagcctcgtgcatctggcgcagaagaggcaggaggccggggccgacgccttcctcatccagtacgacgcccatggcttggaaggggttaccttctcagtgggcagccgcggtcagggctcaggtgtggttttcctctacgttgtgtcttccagcccctacctaggggacggacgtggggcagcggcgctgcgcctcctcagtgttctgcacccaaacattcaccctttgctgggtcagcattgggaaacgactgtcccgctgctgctggggtacctggatgagcacacagaagagaccctgccacaggaggagtgggaggagaagctgttgatgttcctgcgagacaccctggccatcatttctgacaacgcgtggatctgccagctgagcctggagctgtgcaggcagctgccctgctacgatgaggcaccccaggagaagaacttcctgtacaaatgcataggcaccaccctgggtgctgcttcaagtaaggaggtggtgaggaagcaccttcaagagctgctggagacggccagataccaggaggaggcagaacgcgagtgcgtgctcttccctgcccggggtaagtgtgctgccccccagggcctcgcctgctgcttcgggatctgtgccatctcccacctcgaggacacgctggcccagctggaggacttcgatcgaagtgagaacgaagtggagaaggtgaagagtgctctgatcctgtgctatgggcacgtggcggcccgggccccccgggagctggtgctggccaaggtagagtcagacatcctccggaacatctgccagcacttcagcaccaaggaggcgttcgagagcatcaccagggctccttccctggcctgggccctggacggcagtgggaagaagggaggcgtctgcgcctccgaggggccgggtcgtgggctgtcgccccccagggagttcagccagccccacccgtcccaggacagctggaacctcctctggctctgctccccagtgctcatgggggctgtacctccccggaccccagacccagccctgaagctgtgccttgtccagagtgtgtgcatggtcagccgcgccatctgcagcagcacccaggctggctccttccacttcacccggaaagcagagctggtggcacagatgatggagttcatcagggcagagcccccggactccttgaggacacctattcggaagaaagccatgctcacctgcacttacttggtgtatcctttcctgcctctgcacaggcccgtgcagctgcgtgtctccgtggagccagcgctggacgagcaggcccgggcggatgtgatccatggctgcctgcacagcatcatggccctgctgcctgagcccaaggaggaggacggaggctgccagaagtccctgtatctggagacactgcacgcccttgaggatctgctgacgagcctcctgcagcggaacatgaccccccaaggcctgcagatcatgattgagcacctgagcccatggatcaagtccccaagaggtcacgagcgggcgcgggccctgggcctgagcgccctcctgctgcgctacttcctggagcacctgcgtgtcagctggcgcccaagtagataccaggtttccatctgagcccaggatcctgtgcaagggccctggtgcccttccacaacctgggccttctcatcggcctcttctccccacggtgtgcggacctgtggcctgccacccgccaggaggccgtggactgtgtctactccctgctgtacctccagctcggctatgagggcttctcccgggactaccgcgatgacgtggcggagcggctcctcagcctcaaggacggcctcgtgcaccctgaccccgccattctcttccacacctgccacagtgtaggccagctggtcaaggtgctttgtctactgccatctgaagggaggatgaccctgggcaccgcgtcccctccccgacccatgcctgcctggtctactctgaggctcagctcacaacacaagcttgaattattgccaagcgcctccccccagaccagctcatcagcctcttgctaaccatgtttgaggccctgggagaccccgaaaagaactgctcccgagcagctaccgtcatgatcaactgcctgctgcaggagcggggcggtgtgctccaggagaaggtgcccgagatcgtgagcgtcctgcgctccaagcttcaggaggcccagggagagcacgtcctgccggccgcccagcacagcgtgtacctcctggccacccagcactgcgcagccgtggtgtccagcctcctgggcagccccttgcccttggacagccacacctgcatgctgtggcgggcgctggcggtggagcctcgcctagctgcccaggtcctggggctgctgctggagaagatgagtagggacgtccctttcaaggagagccgggccttcctgctgggccgcaccccagaccgcgtggccacgctgctgcctctctcggctacctgtgcactgtttgaggtcatgtccacgcctgcagcggggcccgcggtgctcgagctctacccccagctgtttgtggtgcttctgctgcgcgtcagctgcaccgtgggtgtccagctgccccggaacctgcaggcccaggaaaggaggggtgccagtccagccctagccaccaggaacctggaaccctgcagctctgcagtggacaccctgcggtccatgctactccgcagcggcagcgaggatgtggtacagcgcatggacctggagggaggctgggaactgctcaggacctcggcggggcatgaggagggggccaccaggttggccagggccatggctgagcacgcagggccccgactccccctggtgctgaagacgctggcatgcacacacagcagtgcgtatgagaaccagagggtgaccaccaccgccttcctggccgagctgctgaacagcaacgtggccaacgacctcatgctcttggactcgctgctggagagcctggcggctcgccagaaggacacatgcgccagcgtgcggaggctggtgctccgcggcctggccaacctggcctccggctgccctgacaaggtgcgaacccacggcccccagctcctcacagccatgattggcgggctggacgacggggacaaccctcacagcccagtggccctggaggccatgctgggccttgcgaggctggtgcacctggtggagtcctgggacctgcgctcagggctgctgcacgtggccatccgcatccggcctttcttcgacagtgagaagatggagttccggacggcatctatccgcctctttgggcaccttaacaaggtctgccacggagactgtgaggacgtcttcctggaccaggtggtgggcgggctggcgcccctgctgctgcacctgcaggaccctcaggccaccgtggccagcgcctgcaggtttgccctgcgcatgtgtggccccaatctggcatgtgaggagctctcagctgctttccagaaacacctgcaggagggccgagccctgcacttcggggagttcctcaacaccacctgcaagcacctgatgcaccatttcccagacctgctgggccgtctcctgaccacctgcctgttctacttcaagagcagctgggagaacgtccgagctgctgcacccctgttcaccgggttcctggtgctgcactcggagcccaggcagcagccgcaggtggacctggaccagctcattgcggcgctccagatcctgctgaaggacccggcccccgaggtgcggacgagggctgctgaggccctgggccgcctggtgaagctcgcctaaggctccggccagcacccccagcgaggagtatgcacccagacctgtgcctgagctccaagacagggcctcctgaggaccacagcctgggcacacgactggaggggcctggccccagaacaggcactgctggggaccaaacccaagcccttcagtgagggatgtgcccaataaactcatctgctcccagcgagtgactgacagggtgcgatgctgagcctcttaggggatgggccagagggtgccctggactggctgtgttgtccccactgtttttgcaaaattgagtgaggggaaggctcggcgctgtggtgggggcggctttgttggcaaccccaattcaagaaggtgggagcaccaggcagcacagggtaaaggctctgttgacttcagcacgaccaccccagccccaggcaggcagaacagctaggtgaagaggcggacagtcccgtctgcccccgaggagaagacccacggctgggtggggtggaagatgacgtccagcactcccagatctcgggtcagcacgtgtcccttcagcaccttgacgggcaccagcaaggggttctgcagaaggtcactgtggggacgaggagggctcagggcacggccagacaccactgccctggggagggggccaggcagggtcagcactcacttgtacaccatgccatggcagacgatgacactgccgtcgtccgagcctgacgcaaagagtgggtaccgcgggtggaaggccacagcccgcagagccttcttgtggtgtctggggggagggaaccaggttgaaggcaggctcgggctgaagggaggggctctgctggccgcctccacccccagctttcctcacctcagcatcctgtatggcttggtggaaagatccaggtcaaaccacaccagcttgctatcgtagctcccacagatgacgttgtcacctagggccaaaggctgtgatgcaggtgttcccgctctcacctgcagggtgcactgccctgcccgtcacctacacccctcacctgcagggtgca

SEQ ID NO: 5804 - protein, 694 aa, Homo sapiens; identical to SEQ ID NO: 5794

SEQ ID NO: 5805 - DNA, 3862 bp, Homo sapiens
agcctgagaagccaggccccggcagcaaggaccccaaggccgacagcgtgcgggccatcagcgtgcgcaccctctacctggtcagcaccaccgtggacaggatgagtcacgtcctctggccatacctgctccagttcctcacccctgtgcgcttcactggggccctgactccgctctgcaggagcctcgtgcatctggcgcagaagaggcaggaggccggggccgacgccttcctcatccagtacgacgcccatgcgagcctcccgtctccctatgctgtaaccggaagactgttggttgtgtcttccagcccctacctaggggacggacgtggggcagcggcgctgcgcctcctcagtgttctgcacccaaacattcaccctttgctgggtcagcattgggaaacgactgtcccgctgctgctggggtacctggatgagcacacagaagagaccctgccacaggaggagtgggaggagaagctgttgatgttcctgcgagacaccctggccatcatttctgacaacgcgtggatctgccagctgagcctggagctgtgcaggcagctgccctgctacgatgaggcaccccaggagaagaacttcctgtacaaatgcataggcaccaccctgggtgctgcttcaagtaaggaggtggtgaggaagcaccttcaagagctgctggagacggccagataccaggaggaggcagaacgcgagggcctcgcctgctgcttcgggatctgtgccatctcccacctcgaggacacgctggcccagctggaggacttcgtgaggtcagaggtcttcagaaaatccattggcattctcaacatttttaagattcaggtggtgccgtgcacggctgggtcacacctctgctgtcactgactggctctggcccttcttctgggaggatttcaggagtttctgagccgaggattcccgtcggggagtgtaattgtgtaactgaagtcccgctggttcctctggcctctcaggatcgaagtgagaacgaagtggagaaggtgaagagtgctctgatcctgtgctatgggcacgtggcggcccgggccccccgggagctggtgctggccaaggtagagtcagacatcctccggaacatctgccagcacttcagcaccaaggacccagccctgaagctgtgccttgtccagagtgtgtgcatggtcagccgcgccatctgcagcagcacccaggctggctccttccacttcacccggaaagcagagctggtggcacagatgatggagttcatcagggcagagcccccggactccttgaggacacctattcggaagaaagccatgctcacctgcacttacttggtctccgtggagccagcgctggacgagcaggcccgggcggatgtgatccatggctgcctgcacagcatcatggccctgctgcctgagcccaaggaggaggacggaggctgccagaagtccctgtatctggagacactgcacgcccttgaggatctgctgacgagcctcctgcagcggaacatgaccccccaaggcctgcagatcatgattgagcacctgagcccatggatcaagtccccaagaggtcacgagcgggcgcgggccctgggcctgagcgccctcctgctgcgctacttcctggagcacctgcgtgtcagcgccctggtgcccttccacaacctgggccttctcatcggcctcttctccccacggtgtgcggacctgtggcctgccacccgccaggaggccgtggactgtgtctactccctgctgtacctccagctcggctatgaggattattgccaagcgcctccccccagaccagctcatcagcctcttgctaaccatgtttgaggccctgggagaccccgaaaagaactgctcccgagcagctaccgtcatgatcaactgcctgctgcaggagcggggcggtgtgctccaggagaaggtgcccgagatcgtgagcgtcctgcgctccaagcttcaggaggcccagggagagcacgtcctgccggccgcccagcacagcgtgtacctcctggccacccagcactgcgcagccgtggtgtccagcctcctgggcagccccttgcccttggacagccacacctgcatgctgtggcgggcgctggcggtggagcctcgcctagctgcccaggtcctggggctgctgctggagaagatgagtagggacgtccctttcaaggagagccgggccttcctgctgggccgcaccccagaccgcgtggccacgctgctgcctctctcggctacctgtgcactgtttgaggtcatgtccacgcctgcagcggggcccgcggtgctcgagctctacccccagctgtttgtggtgcttctgctgcgcgtcagctgcaccgtgggtgtccagctgccccggaacctgcaggcccaggaaaggaggggtgccagtccagccctagccaccaggaacctggaaccctgcagctctgcagtggacaccctgcggtccatgctactccgcagcggcagcgaggatgtggtacagcgcatggacctggagggaggctgggaactgctcaggacctcggcggggcatgaggagggggccaccaggttggccagggccatggctgagcacgcagggccccgactccccctggtgctgaagacgctggcatgcacacacagcagtgcgtatgagaaccagagggtgaccaccaccgccttcctggccgagctgctgaacagcaacgtggccaacgacctcatgctcttggactcgctgctggagagcctggcggctcgccagaaggacacatgcgccagcgtgcggaggctggtgctccgcggcctggccaacctggcctccggctgccctgacaaggtgcgaacccacggcccccagctcctcacagccatgattggcgggctggacgacggggacaaccctcacagcccagtggccctggaggccatgctgggccttgcgaggctggtgcacctggtggagtcctgggacctgcgctcagggctgctgcacgtggccatccgcatccggcctttcttcgacagtgagaagatggagttccggacggcatctatccgcctctttgggcaccttaacaaggtctgccacggagactgtgaggacgtcttcctggaccaggtggtgggcgggctggcgcccctgctgctgcacctgcaggaccctcaggccaccgtggccagcgcctgcaggtttgccctgcgcatgtgtggccccaatctggcatgtgaggagctctcagctgctttccagaaacacctgcaggagggccgagccctgcacttcggggagttcctcaacaccacctgcaagcacctgatgcaccatttcccagacctgctgggccgtctcctgaccacctgcctgttctacttcaagagcagctgggagaacgtccgagctgctgcacccctgttcaccggtaagcaccaccccctgccccacccccacgccgcccggcagccccgcctgatgcccccacttcacagggttcctggtgctgcactcggagcccaggcagcagccgcaggtggacctggaccagctcattgcggcgctccagatcctgctgaaggacccggcccccgaggtgcggacgagggctgctgaggccctgggccgcctggtgaagctcgcctaaggctccggccagcacccccagcgaggagtatgcacccagacctgtgcctgagctccaagacagggcctcctgaggaccacagcctgggcacacgactggaggggcctggccccagaacaggcactgctggggaccaaacccaagcccttcagtgagggatgtgcccaataaactcatctgctcccag

SEQ ID NO: 5806 - protein, 615 aa, Homo sapiens
MRIIAKRLPPDQLISLLLTMFEALGDPEKNCSRAATVMINCLLQERGGVLQEKVPEIVSVLRSKLQEAQGEHVLPAAQHSVYLLATQHCAAVVSSLLGSPLPLDSHTCMLWRALAVEPRLAAQVLGLLLEKMSRDVPFKESRAFLLGRTPDRVATLLPLSATCALFEVMSTPAAGPAVLELYPQLFVVLLLRVSCTVGVQLPRNLQAQERRGASPALATRNLEPCSSAVDTLRSMLLRSGSEDVVQRMDLEGGWELLRTSAGHEEGATRLARAMAEHAGPRLPLVLKTLACTHSSAYENQRVTTTAFLAELLNSNVANDLMLLDSLLESLAARQKDTCASVRRLVLRGLANLASGCPDKVRTHGPQLLTAMIGGLDDGDNPHSPVALEAMLGLARLVHLVESWDLRSGLLHVAIRIRPFFDSEKMEFRTASIRLFGHLNKVCHGDCEDVFLDQVVGGLAPLLLHLQDPQATVASACRFALRMCGPNLACEELSAAFQKHLQEGRALHFGEFLNTTCKHLMHHFPDLLGRLLTTCLFYFKSSWENVRAAAPLFTGKHHPLPHPHAARQPRLMPPLHRVPGAALGAQAAAAGGPGPAHCGAPDPAEGPGPRGADEGC

SEQ ID NO: 5807 - DNA, 4700 bp, Homo sapiens
agcctgagaagccaggccccggcagcaaggaccccaaggccgacagcgtgcgggccatcagcgtgcgcaccctctacctggtcagcaccaccgtggacaggatgagtcacgtcctctggccatacctgctccagttcctcacccctgtgcgcttcactggggccctgactccgctctgcaggagcctcgtgcatctggcgcagaagaggcaggaggccggggccgacgccttcctcatccagtacgacgcccatgcgagcctcccgtctccctatgctgtaaccggaagactgttggttgtgtcttccagcccctacctaggggacggacgtggggcagcggcgctgcgcctcctcagtgttctgcacccaaacattcaccctttgctgggtcagcattgggaaacgactgtcccgctgctgctggggtacctggatgagcacacagaagagaccctgccacaggaggagtgggaggagaagctgttgatgttcctgcgagacaccctggccatcatttctgacaacgcgtggatctgccagctgagcctggagctgtgcaggcagctgccctgctacgatgaggcaccccaggagaagaacttcctgtacaaatgcataggcaccaccctgggtgctgcttcaagtaaggaggtggtgaggaagcaccttcaagagctgctggagacggccagataccaggaggaggcagaacgcgagggcctcgcctgctgcttcgggatctgtgccatctcccacctcgaggacacgctggcccagctggaggacttcgtgaggtcagaggtcttcagaaaatccattggcattctcaacatttttaagattcaggtggtgccgtgcacggctgggtcacacctctgctgtcactgactggctctggcccttcttctgggaggatttcaggagtttctgagccgaggattcccgtcggggagtgtaattgtgtaactgaagtcccgctggttcctctggcctctcaggatcgaagtgagaacgaagtggagaaggtgaagagtgctctgatcctgtgctatgggcacgtggcggcccgggccccccgggagctggtgctggccaaggtagagtcagacatcctccggaacatctgccagcacttcagcaccaaggacccagccctgaagctgtgccttgtccagagtgtgtgcatggtcagccgcgccatctgcagcagcacccaggctggctccttccacttcacccggaaagcagagctggtggcacagatgatggagttcatcagggcagagcccccggactccttgaggacacctattcggaagaaagccatgctcacctgcacttacttggtctccgtggagccagcgctggacgagcaggcccgggcggatgtgatccatggctgcctgcacagcatcatggccctgctgcctgagcccaaggaggaggacggaggctgccagaagtccctgtatctggagacactgcacgcccttgaggatctgctgacgagcctcctgcagcggaacatgaccccccaaggcctgcagatcatgattgagcacctgagcccatggatcaagtccccaagaggtcacgagcgggcgcgggccctgggcctgagcgccctcctgctgcgctacttcctggagcacctgcgtgtcagcgccctggtgcccttccacaacctgggccttctcatcggcctcttctccccacggtgtgcggacctgtggcctgccacccgccaggaggccgtggactgtgtctactccctgctgtacctccagctcggctatgaggattattgccaagcgcctccccccagaccagctcatcagcctcttgctaaccatgtttgaggccctgggagaccccgaaaagaactgctcccgagcagctaccgtcatgatcaactgcctgctgcaggagcggggcggtgtgctccaggagaaggtgcccgagatcgtgagcgtcctgcgctccaagcttcaggaggcccagggagagcacgtcctgccggccgcccagcacagcgtgtacctcctggccacccagcactgcgcagccgtggtgtccagcctcctgggcagccccttgcccttggacagccacacctgcatgctgtggcgggcgctggcggtggagcctcgcctagctgcccaggtcctggggctgctgctggagaagatgagtagggacgtccctttcaaggagagccgggccttcctgctgggccgcaccccagaccgcgtggccacgctgctgcctctctcggctacctgtgcactgtttgaggtcatgtccacgcctgcagcggggcccgcggtgctcgagctctacccccagctgtttgtggtgcttctgctgcgcgtcagctgcaccgtgggtgtccagctgccccggaacctgcaggcccaggaaaggaggggtgccagtccagccctagccaccaggaacctggaaccctgcagctctgcagtggacaccctgcggtccatgctactccgcagcggcagcgaggatgtggtacagcgcatggacctggagggaggctgggaactgctcaggacctcggcggggcatgaggagggggccaccaggttggccagggccatggctgagcacgcagggccccgactccccctggtgctgaagacgctggcatgcacacacagcagtgcgtatgagaaccagagggtgaccaccaccgccttcctggccgagctgctgaacagcaacgtggccaacgacctcatgctcttggactcgctgctggagagcctggcggctcgccagaaggacacatgcgccagcgtgcggaggctggtgctccgcggcctggccaacctggcctccggctgccctgacaaggtgcgaacccacggcccccagctcctcacagccatgattggcgggctggacgacggggacaaccctcacagcccagtggccctggaggccatgctgggccttgcgaggctggtgcacctggtggagtcctgggacctgcgctcagggctgctgcacgtggccatccgcatccggcctttcttcgacagtgagaagatggagttccggacggcatctatccgcctctttgggcaccttaacaaggtctgccacggagactgtgaggacgtcttcctggaccaggtggtgggcgggctggcgcccctgctgctgcacctgcaggaccctcaggccaccgtggccagcgcctgcaggtttgccctgcgcatgtgtggccccaatctggcatgtgaggagctctcagctgctttccagaaacacctgcaggagggccgagccctgcacttcggggagttcctcaacaccacctgcaagcacctgatgcaccatttcccagacctgctgggccgtctcctgaccacctgcctgttctacttcaagagcagctgggagaacgtccgagctgctgcacccctgttcaccggtaagcaccaccccctgccccacccccacgccgcccggcagccccgcctgatgcccccacttcacagggttcctggtgctgcactcggagcccaggcagcagccgcaggtggacctggaccagctcattgcggcgctccagatcctgctgaaggacccggcccccgaggtgcggacgagggctgctgaggccctgggccgcctggtgaagctcgcctaaggctccggccagcacccccagcgaggagtatgcacccagacctgtgcctgagctccaagacagggcctcctgaggaccacagcctgggcacacgactggaggggcctggccccagaacaggcactgctggggaccaaacccaagcccttcagtgagggatgtgcccaataaactcatctgctcccagcgagtgactgacagggtgcgatgctgagcctcttaggggatgggccagagggtgccctggactggctgtgttgtccccactgtttttgcaaaattgagtgaggggaaggctcggcgctgtggtgggggcggctttgttggcaaccccaattcaagaaggtgggagcaccaggcagcacagggtaaaggctctgttgacttcagcacgaccaccccagccccaggcaggcagaacagctaggtgaagaggcggacagtcccgtctgcccccgaggagaagacccacggctgggtggggtggaagatgacgtccagcactcccagatctcgggtcagcacgtgtcccttcagcaccttgacgggcaccagcaaggggttctgcagaaggtcactgtggggacgaggagggctcagggcacggccagacaccactgccctggggagggggccaggcagggtcagcactcacttgtacaccatgccatggcagacgatgacactgccgtcgtccgagcctgacgcaaagagtgggtaccgcgggtggaaggccacagcccgcagagccttcttgtggtgtctggggggagggaaccaggttgaaggcaggctcgggctgaagggaggggctctgctggccgcctccacccccagctttcctcacctcagcatcctgtatggcttggtggaaagatccaggtcaaaccacaccagcttgctatcgtagctcccacagatgacgttgtcacctagggccaaaggctgtgatgcaggtgttcccgctctcacctgcagggtgcactgccctgcccgtcacctacacccctcacctgcagggtgca

SEQ ID NO: 5808 - protein, 615 aa, Homo sapiens; identical to SEQ ID NO: 5806

SEQ ID NO: 5809 - DNA, 1348 bp, Homo sapiens; identical to SEQ ID NO: 5739

SEQ ID NO: 5810 - protein, 170 aa, Homo sapiens; identical to SEQ ID NO: 5740

SEQ ID NO: 5811 - DNA, 2700 bp, Homo sapiens; identical to SEQ ID NO: 5741

SEQ ID NO: 5812 - protein, 424 aa, Homo sapiens; identical to SEQ ID NO: 5742

SEQ ID NO: 5813 - DNA, 3149 bp, Homo sapiens
aggatcgaagtgagaacgaagtggagaaggtgaagagtgctctgatcctgtgctatgggcacgtggcggcccgggccccccgggagctggtgctggccaaggtagagtcagacatcctccggaacatctgccagcacttcagcaccaaggacccagccctgaagctgtgccttgtccagagtgtgtgcatggtcagccgcgccatctgcagcagcacccaggctggctccttccacttcacccggaaagcagagctggtggcacagatgatggagttcatcagggcagagcccccggactccttgaggacacctattcggaagaaagccatgctcacctgcacttacttggtctccgtggagccagcgctggacgagcaggcccgggcggatgtgatccatggctgcctgcacagcatcatggccctgctgcctgagcccaaggaggaggacggaggctgccagaagtccctgtatctggagacactgcacgcccttgaggatctgctgacgagcctcctgcagcggaacatgaccccccaaggcctgcagatcatgattgagcacctgagcccatggatcaagtccccaagaggtcacgagcgggcgcgggccctgggcctgagcgccctcctgctgcgctacttcctggagcacctgcgtgtcagctggcgcccaagtagataccaggtttccatctgagcccaggatcctgtgcaagggccctggtgcccttccacaacctgggccttctcatcggcctcttctccccacggtgtgcggacctgtggcctgccacccgccaggaggccgtggactgtgtctactccctgctgtacctccagctcggctatgagggcttctcccgggactaccgcgatgacgtggcggagcggctcctcagcctcaaggacggcctcgtgcaccctgaccccgccattctcttccacacctgccacagtgtaggccagctggtcaaggtgctttgtctactgccatctgaagggaggatgaccctgggcaccgcgtcccctccccgacccatgcctgcctggtctactctgaggctcagctcacaacacaagcttgaattattgccaagcgcctccccccagaccagctcatcagcctcttgctaaccatgtttgaggccctgggagaccccgaaaagaactgctcccgagcagctaccgtcatgatcaactgcctgctgcaggagcggggcggtgtgctccaggagaaggtgcccgagatcgtgagcgtcctgcgctccaagcttcaggaggcccagggagagcacgtcctgccggccgcccagcacagcgtgtacctcctggccacccagcactgcgcagccgtggtgtccagcctcctgggcagccccttgcccttggacagccacacctgcatgctgtggcgggcgctggcggtggagcctcgcctagctgcccaggtcctggggctgctgctggagaagatgagtagggacgtccctttcaaggagagccgggccttcctgctgggccgcaccccagaccgcgtggccacgctgctgcctctctcggctacctgtgcactgtttgaggtcatgtccacgcctgcagcggggcccgcggtgctcgagctctacccccagctgtttgtggtgcttctgctgcgcgtcagctgcaccgtgggtgtccagctgccccggaacctgcaggcccaggaaaggaggggtgccagtccagccctagccaccaggaacctggaaccctgcagctctgcagtggacaccctgcggtccatgctactccgcagcggcagcgaggatgtggtacagcgcatggacctggagggaggctgggaactgctcaggacctcggcggggcatgaggagggggccaccaggttggccagggccatggctgagcacgcagggccccgactccccctggtgctgaagacgctggcatgcacacacagcagtgcgtatgagaaccagagggtgaccaccaccgccttcctggccgagctgctgaacagcaacgtggccaacgacctcatgctcttggactcgctgctggagagcctggcggctcgccagaaggacacatgcgccagcgtgcggaggctggtgctccgcggcctggccaacctggcctccggctgccctgacaaggtgcgaacccacggcccccagctcctcacagccatgattggcgggctggacgacggggacaaccctcacagcccagtggccctggaggccatgctgggccttgcgaggctggtgcacctggtggagtcctgggacctgcgctcagggctgctgcacgtggccatccgcatccggcctttcttcgacagtgagaagatggagttccggacggcatctatccgcctctttgggcaccttaacaaggtctgccacggagactgtgaggacgtcttcctggaccaggtggtgggcgggctggcgcccctgctgctgcacctgcaggaccctcaggccaccgtggccagcgcctgcaggtttgccctgcgcatgtgtggccccaatctggcatgtgaggagctctcagctgctttccagaaacacctgcaggagggccgagccctgcacttcggggagttcctcaacaccacctgcaagcacctgatgcaccatttcccagacctgctgggccgtctcctgaccacctgcctgttctacttcaagagcagctgggagaacgtccgagctgctgcacccctgttcaccggtaagcaccaccccctgccccacccccacgccgcccggcagccccgcctgatgcccccacttcacagggttcctggtgctgcactcggagcccaggcagcagccgcaggtggacctggaccagctcattgcggcgctccagatcctgctgaaggacccggcccccgaggtgcggacgagggctgctgaggccctgggccgcctggtgaagctcgcctaaggctccggccagcacccccagcgaggagtatgcacccagacctgtgcctgagctccaagacagggcctcctgaggaccacagcctgggcacacgactggaggggcctggccccagaacaggcactgctggggaccaaacccaagcccttcagtgagggatgtgcccaataaactcatctgctcccag

SEQ ID NO: 5814 - protein, 596 aa, Homo sapiens
MFEALGDPEKNCSRAATVMINCLLQERGGVLQEKVPEIVSVLRSKLQEAQGEHVLPAAQHSVYLLATQHCAAVVSSLLGSPLPLDSHTCMLWRALAVEPRLAAQVLGLLLEKMSRDVPFKESRAFLLGRTPDRVATLLPLSATCALFEVMSTPAAGPAVLELYPQLFVVLLLRVSCTVGVQLPRNLQAQERRGASPALATRNLEPCSSAVDTLRSMLLRSGSEDVVQRMDLEGGWELLRTSAGHEEGATRLARAMAEHAGPRLPLVLKTLACTHSSAYENQRVTTTAFLAELLNSNVANDLMLLDSLLESLAARQKDTCASVRRLVLRGLANLASGCPDKVRTHGPQLLTAMIGGLDDGDNPHSPVALEAMLGLARLVHLVESWDLRSGLLHVAIRIRPFFDSEKMEFRTASIRLFGHLNKVCHGDCEDVFLDQVVGGLAPLLLHLQDPQATVASACRFALRMCGPNLACEELSAAFQKHLQEGRALHFGEFLNTTCKHLMHHFPDLLGRLLTTCLFYFKSSWENVRAAAPLFTGKHHPLPHPHAARQPRLMPPLHRVPGAALGAQAAAAGGPGPAHCGAPDPAEGPGPRGADEGC

SEQ ID NO: 5815 - DNA, 3094 bp, Homo sapiens; identical to SEQ ID NO: 5745

SEQ ID NO: 5816 - protein, 584 aa, Homo sapiens; identical to SEQ ID NO: 5746

SEQ ID NO: 5817 - DNA, 1282 bp, Homo sapiens
aggatcgaagtgagaacgaagtggagaaggtgaagagtgctctgatcctgtgctatgggcacgtggcggcccgggccccccgggagctggtgctggccaaggtagagtcagacatcctccggaacatctgccagcacttcagcaccaaggacccagccctgaagctgtgccttgtccagagtgtgtgcatggtcagccgcgccatctgcagcagcacccaggctggctccttccacttcacccggaaagcagagctggtggcacagatgatggagttcatcagggcagagcccccggactccttgaggacacctattcggaagaaagccatgctcacctgcacttacttggtctccgtggagccagcgctggacgagcaggcccgggcggatgtgatccatggctgcctgcacagcatcatggccctgctgcctgagcccaaggaggaggacggaggctgccagaagtccctgtatctggagacactgcacgcccttgaggatctgctgacgagcctcctgcagcggaacatgaccccccaaggcctgcagatcatgattgagcacctgagcccatggatcaagtccccaagaggtcacgagcgggcgcgggccctgggcctgagcgccctcctgctgcgctacttcctggagcacctgcgtgtcagctggcgcccaagtagataccaggtttccatctgagcccaggatcctgtgcaagggccctggtgcccttccacaacctgggccttctcatcggcctcttctccccacggtgtgcggacctgtggcctgccacccgccaggaggccgtggactgtgtctactccctgctgtacctccagctcggctatgagggcttctcccgggactaccgcgatgacgtggcggagcggctcctcagcctcaaggacggcctcgtgcaccctgaccccgccattctcttccacacctgccacagtgtaggccagattattgccaagcgcctccccccagaccagctcatcagcctcttgctaaccatgtttgaggccctgggagaccccgaaaagaactgctcccgagcagctaccgtcatgatcaactgcctgctgcaggagcggggcggtgtgctccaggagaaggtgcccgagatcgtgagcgtcctgcgctcctgaggaccacagcctgggcacacgactggaggggcctggccccagaacaggcactgctggggaccaaacccaagcccttcagtgagggatgtgcccaataaactcatctgctcccagcgagtgactgac

SEQ ID NO: 5818 - protein, 170 aa, Homo sapiens; identical to SEQ ID NO: 5740

SEQ ID NO: 5819 - DNA, 2922 bp, Homo sapiens; identical to SEQ ID NO: 5743

SEQ ID NO: 5820 - protein, 844 aa, Homo sapiens; identical to SEQ ID NO: 5744

SEQ ID NO: 5821 - DNA, 3920 bp, Homo sapiens; identical to SEQ ID NO: 5747

SEQ ID NO: 5822 - protein, 584 aa, Homo sapiens; identical to SEQ ID NO: 5746

SEQ ID NO: 5823 - DNA, 3748 bp, Homo sapiens; identical to SEQ ID NO: 5749

SEQ ID NO: 5824 - protein, 844 aa, Homo sapiens; identical to SEQ ID NO: 5744

SEQ ID NO: 5825 - DNA, 3564 bp, Homo sapiens; identical to SEQ ID NO: 5751

SEQ ID NO: 5826 - protein, 99 aa, Homo sapiens; identical to SEQ ID NO: 5752

SEQ ID NO: 5827 - DNA, 1664 bp, Homo sapiens; identical to SEQ ID NO: 5753

SEQ ID NO: 5828 - protein, 424 aa, Homo sapiens; identical to SEQ ID NO: 5742

SEQ ID NO: 5829 - DNA, 2058 bp, Homo sapiens; identical to SEQ ID NO: 5755

SEQ ID NO: 5830 - protein, 584 aa, Homo sapiens; identical to SEQ ID NO: 5746

SEQ ID NO: 5831 - DNA, 2884 bp, Homo sapiens; identical to SEQ ID NO: 5757

SEQ ID NO: 5832 - protein, 584 aa, Homo sapiens; identical to SEQ ID NO: 5746

SEQ ID NO: 5833 - DNA, 641 bp, Homo sapiens; identical to SEQ ID NO: 5759

SEQ ID NO: 5834 - protein, 86 aa, Homo sapiens; identical to SEQ ID NO: 5760

SEQ ID NO: 5835 - DNA, 1003 bp, Homo sapiens
tcttcgacagtgtaggctggttggggcagggggagggaagagggccccagcccttcctgcctcttactctgagctttagccccagccccaccctcctccctgtctcccacctcggctaggtgaccgtggagagcgcggacctgcagggctgctgctttgctgggcctggcagcccccacccgtaaggcccccacccgtcggggtgtttcctggcccgggtcaggcaagggcacccatcaatggcagggggctaggcaggcaggcctgcaggggcacagcctgtgaggagacgtatgctgcatgtccttcccaggagaagatggagttccggacggcatctatccgcctctttgggcaccttaacaaggtctgccacggagactgtgaggacgtcttcctggaccaggtggtgggcgggctggcgcccctgctgctgcacctgcaggaccctcaggccaccgtggccagcgcctgcaggtttgccctgcgcatgtgtggccccaatctggcatgtgaggagctctcagctgctttccagaaacacctgcaggagggccgagccctgcacttcggggagttcctcaacaccacctgcaagcacctgatgcaccatttcccagacctgctgggccgtctcctgaccacctgcctgttctacttcaagagcagctgggagaacgtccgagctgctgcacccctgttcaccggtaagcaccaccccctgccccacccccacgccgcccggcagccccgcctgatgcccccacttcacagggttcctggtgctgcactcggagcccaggcagcagccgcaggtggacctggaccagctcattgcgggtgagcacccctccacggggcccctccgctgggccctgctgaccctgtaggcacccgcagggactaagtgattttcctggatttcaggactttttccctgtcactggtgacctcatcgtctctagtaattcacggaaacttcttaactgttccaagagagctt

SEQ ID NO: 5836 - protein, 174 aa, Homo sapiens; identical to SEQ ID NO: 5762

SEQ ID NO: 5837 - DNA, 1058 bp, Homo sapiens; identical to SEQ ID NO: 5763

SEQ ID NO: 5838 - protein, 179 aa, Homo sapiens [sequence omitted]

SEQ ID NO: 5839 - DNA, 1884 bp, Homo sapiens; identical to SEQ ID NO: 5765

SEQ ID NO: 5840 - protein, 179 aa, Homo sapiens [sequence omitted]

SEQ ID NO: 5841 - DNA, 2242 bp, Homo sapiens
atgtgcgccagcgcctgcctgtgccaggccgtgtgcagggggcgggcacaggacatccggaacacggtgggcaacgtgcccttggagtggtacgatgacttcccccacgtgggctacgacctggatggcaggcgcatctacaagcccctgcggacccgggatgagctggaccagttcctggacaagatggacgatcctgactactggcgcaccgtgcaggacccgatgacagggcgggacctgagactgacggatgagcaggtggccctggtgcggcggctgcagagtggccagtttggggatgtgggcttcaacccctatgagccggctgtcgacttcttcagcggggacgtcatgatccacccggtgaccaaccgcccggccgacaagcgcagcttcatcccctccctggtggagaaggagaaggtctctcgcatggtgcacgccatcaagatgggctggatccagcctcgccggccccgagaccccacccccagcttctatgacctgtgggcccaggaggaccccaacgccgtgctcgggcgccacaagatgcacgtacctgctcccaagctggccctgccaggccacgccgagtcgtacaacccaccccctgaatacctgctcagcgaggaggagcgcttggcgtgggaacagcaggagccaggcgagaggaagctgagctttttgccacgcaagttcccgagcctgcgggccgtgcctgcctacggacgcttcatccaggaacgcttcgagcgctgccttgacctgtacctgtgcccacggcagcgcaagatgagggtgaatgtagaccctgaggacctcatccccaagctgcctcggccgagggacctgcagcccttccccacgtgccaggccctggtctacaggggccacagtgaccttgtccggtgcctcagtgtctctcctgggggccagtggctggtttcaggctctgacgacggctccctgcggctctgggaggtggccactgcccgctgtgtgaggactgttcccgtggggggcgtggtgaagagtgtggcctggaaccccagccccgctgtctgcctggtggctgcagccgtggaggactcggtgctgctgctgaacccagctctgggggaccggctggtggcgggcagcacagatcagctgttgagcgccttcgtcccgcctgaggagccccccttgcagccggcccgctggctggaggcctcagaggaggagcgccaagtgggcctgcggctgcgcatctgccacgggaagccagtgacgcaggtgacctggcacgggcgtggggactacctggccgtggtgctggccacccaaggccacacccaggtgctgattcaccagctgagccgtcgccgcagccagagtccgttccgccgcagccacggacaggtgcagcgagtggccttccaccctgcccggcccttcctgttggtggcgtcccagcgcagcgtccgcctctaccacctgctgcgccaggagctcaccaagaagctgatgcccaactgcaagtgggtgtccagcctggcggtgcaccctgcaggtgacaacgtcatctgtgggagctacgatagcaagctggtgtggtttgacctggatctttccaccaagccatacaggatgctgagacaccacaagaaggctctgcgggctgtggccttccacccgcggtacccactctttgcgtcaggctcggacgacggcagtgtcatcgtctgccatggcatggtgtacaatgaccttctgcagaaccccttgctggtgcccgtcaaggtgctgaagggacacgtgctgacccgagatctgggagtgctggacgtcatcttccaccccacccagccgtgggtcttctcctcgggggcagacgggactgtccgcctcttcacctagctgttctgcctgcctggggctggggtggtcgtgctgaagtcaacagagcctttaccctgtgctgcctggtgctcccaccttcttgaattggggttgccaacaaagccgcccccaccacagcgccgagccttcccctcactcaattttgcaaaaacagtggggacaacacagccagtccagggcaccctctggcccatcccctaagaggctcagcatcgcaccctgtcagtcactcgctgggagcagatgagtttattgggcacatccctcactgaagggcttgggtttggtccccagcagtgcctgttctggggccaggcccctccagtcgtgtgcccag

SEQ ID NO: 5842 - protein, 633 aa, Homo sapiens
MCASACLCQAVCRGRAQDIRNTVGNVPLEWYDDFPHVGYDLDGRRIYKPLRTRDELDQFLDKMDDPDYWRTVQDPMTGRDLRLTDEQVALVRRLQSGQFGDVGFNPYEPAVDFFSGDVMIHPVTNRPADKRSFIPSLVEKEKVSRMVHAIKMGWIQPRRPRDPTPSFYDLWAQEDPNAVLGRHKMHVPAPKLALPGHAESYNPPPEYLLSEEERLAWEQQEPGERKLSFLPRKFPSLRAVPAYGRFIQERFERCLDLYLCPRQRKMRVNVDPEDLIPKLPRPRDLQPFPTCQALVYRGHSDLVRCLSVSPGGQWLVSGSDDGSLRLWEVATARCVRTVPVGGVVKSVAWNPSPAVCLVAAAVEDSVLLLNPALGDRLVAGSTDQLLSAFVPPEEPPLQPARWLEASEEERQVGLRLRICHGKPVTQVTWHGRGDYLAVVLATQGHTQVLIHQLSRRRSQSPFRRSHGQVQRVAFHPARPFLLVASQRSVRLYHLLRQELTKKLMPNCKWVSSLAVHPAGDNVICGSYDSKLVWFDLDLSTKPYRMLRHHKKALRAVAFHPRYPLFASGSDDGSVIVCHGMVYNDLLQNPLLVPVKVLKGHVLTRDLGVLDVIFHPTQPWVFSSGADGTVRLFT

SEQ ID NO: 5843 - DNA, 1492 bp, Homo sapiens
ctcctgcgcacgcggcccggtcgctgtcggaagcggctgtgcgggtggcggccggcgcgcggtggggcatggcgggttcgcggggtgcggggcgcacggcggcgccgagcgtgcggccggagaagcggcggtctgagcccgaactggagcctgagcccgagccggagccccccctcctctgcacctctcctctcagccacagcaccggcagcgattctggcgtctccgacagcgaggagagtgtgttctcaggcctggaagattccggcagtgacagcagtgaggatgatgacgaaggcgacgaggagggagaggacggagcccttgatgacgagggccacagtgggattaaaaagaccactgaggagcaggtgcaggccagcactccttgcccgaggacagagatggcgagcgcccggattggggatgagtatgcggaggacagctctgatgaggaggacatccggaacacggtgggcaacgtgcccttggagtggtacgatgacttcccccacgtgggctacgacctggatggcaggcgcatctacaagcccctgcggacccgggatgagctggaccagttcctggacaagatggacgatcctgactactggcgcaccgtgcaggacccgatgacagggcgggacctgagactgacggatgagcaggtggccctggtgcggcggctgcagagtggccagtttggggatgtgggcttcaacccctatgagccggctgtcgacttcttcagcggggacgtcatgatccacccggtgaccaaccgcccggccgacaagcgcagcttcatcccctccctggtggagaaggagaaggtctctcgcatggtgcacgccatcaagatgggctggatccagcctcgccggccccgagaccccacccccagcttctatgacctgtgggcccaggaggaccccaacgccgtgctcgggcgccacaagatgcacgtacctgctcccaagctggccctgccaggccacgccgagtcgtacaacccaccccctgaatacctgctcagcgaggaggagcgcttggcgtgggaacagcaggagccaggcgagaggaagctgagctttttgccacgcaagttcccgagcctgcgggccgtgcctgcctacggacgcttcatccaggaacgcttcgagcgctgccttgacctgtacctgtgcccacggcagcgcaagatgagggtgaatgtagaccctgaggacctcatccccaagctgcctcggccgagggacctgcagcccttccccacgtgccaggccctggtctacaggggccacagtgaccttgtccggtgcctcagtgtctctcctgggggccagtggctggtttcaggctctgacgacggctccctgcggctctgggaggtggccactgcccgctgtgtgaggactgttcccgtggggggcgtggtgaagagtgtggcctggggtggtcgtgctgaagtcaacagagcctttaccctgtg

SEQ ID NO: 5844 - protein, 473 aa, Homo sapiens
MAGSRGAGRTAAPSVRPEKRRSEPELEPEPEPEPPLLCTSPLSHSTGSDSGVSDSEESVFSGLEDSGSDSSEDDDEGDEEGEDGALDDEGHSGIKKTTEEQVQASTPCPRTEMASARIGDEYAEDSSDEEDIRNTVGNVPLEWYDDFPHVGYDLDGRRIYKPLRTRDELDQFLDKMDDPDYWRTVQDPMTGRDLRLTDEQVALVRRLQSGQFGDVGFNPYEPAVDFFSGDVMIHPVTNRPADKRSFIPSLVEKEKVSRMVHAIKMGWIQPRRPRDPTPSFYDLWAQEDPNAVLGRHKMHVPAPKLALPGHAESYNPPPEYLLSEEERLAWEQQEPGERKLSFLPRKFPSLRAVPAYGRFIQERFERCLDLYLCPRQRKMRVNVDPEDLIPKLPRPRDLQPFPTCQALVYRGHSDLVRCLSVSPGGQWLVSGSDDGSLRLWEVATARCVRTVPVGGVVKSVAWGGRAEVNRAFT

SEQ ID NO: 5845 - DNA, 1928 bp, Homo sapiens; identical to SEQ ID NO: 5773

SEQ ID NO: 5846 - protein, 201 aa, Homo sapiens; identical to SEQ ID NO: 5774

SEQ ID NO: 5847 - DNA, 532 bp, Homo sapiens
ccagcccaaacagatctgcaccttctgcctcagcaaccagagaaagttgacagcacgcgcgagctcctggggcctgaacatctgggaaatttaattttacaatttcggctgtgcagcagtatgctcccctccccaaaacgcttgagggaagctggggagagccgggaaggaggtgccttggcgctggccacctgagatggcacccagcagggaggccagagaggcgcagactggcgctgggctctgccggggcctgacactcctccctcccctctgcagagcaaggaccgcgacagaaagacagcgattcgcagttaggaggtggccggcagcagccaggaggcagacgctgctgggggaggtggacgcccggggtgagtacagacaggcgccggcagcgggactctgcgctggccccagcacctgcccgggcccactggaactttctgcgctggcttttcttccggccactgtgtgatggcatcttgtgtttttgatatgataatataaagtctgaaaattttgtataatt

SEQ ID NO: 5848 - protein, 93 aa, Homo sapiens [sequence omitted]

SEQ ID NO: 5849 - DNA, 238 bp, Homo sapiens; identical to SEQ ID NO: 5777

SEQ ID NO: 5850 - protein, 49 aa, Homo sapiens; identical to SEQ ID NO: 5778

SEQ ID NO: 5851 - DNA, 911 bp, Homo sapiens
gtcgctgtcggaagcggctgtgcgggtggcggccggcgcgcggtggggcatggcgggttcgcggggtgcggggcgcacggcggcgccgagcgtgcggccggagaagcggcggtctgagcccgaactggagcctgagcccgagccggagccccccctcctctgcacctctcctctcagccacagcaccggcagcgattctggcgtctccgacagcgaggagagtgtgttctcaggcctggaagattccggcagtgacagcagtgaggatgatgacgaaggcgacgaggagggagaggacggagcccttgatgacgagggccacagtgggattaaaaagaccactgaggagcaggtgcagaagtttctgtttttatcagtttaatctgcttgtcacagtcaagaatgtgagaaaagactggatgcggtgagccaaacctgtaatcccagcactttgggaggccaaggtgggcggatcacttgaggagttcgagaccagcccggccaacatggtgaaacctcatgtgaattgcttgagcctgggaggcggaagttagagtaagctgagatcatgccactgcctccatcctgggtgacagagtgagtgggactctgtcttgaaagaaaaaagcactagtaagagaaggcctaagacctagtattaaagtaagagaaggcctaagacctggtatgaaagtgagagaaggccaaagacctggtattaaactgagggaaggccgaagacctggtattaaagtgagagaaggccaaagacctggtatgaaagtgagggaaggcctaagacctggtattaaactgagggaaggccgaagacctggtattaaactgagggaaggcctaagacctggtattaaactgagagaaggccgaagacctggtattaaagtgagaga

SEQ ID NO: 5852 - protein, 110 aa, Homo sapiens
MAGSRGAGRTAAPSVRPEKRRSEPELEPEPEPEPPLLCTSPLSHSTGSDSGVSDSEESVFSGLEDSGSDSSEDDDEGDEEGEDGALDDEGHSGIKKTTEEQVQKFLFLSV

SEQ ID NO: 5853 - DNA, 597 bp, Homo sapiens
ggcagcggcggcggcgggagcgcgcccgttgcaagatggcggcggccatgctgggccccggggctgtgtgtgcgcagcgggcggcggcgcggcccggaaggctggcgcggcgacggcgttagcccggccctcggcccctctttgcggccgctccctccgcctattccctccttgctcgagatggatctgcccgtgggccccggcgcggcggggcccagcaacgtcccggccttcctgaccaagctgtggaccctcgtgagcgacccggacaccgacgcgctcatctgctggagcccgttgcctggcagcaggcttgtttacatggtccgaccctgcaagaccggacagctccggtttgcagaagtaaatcagtgattgtctggagttggagatcagaatctgctgttcacatcccggctgtgacgtcgtgtccgaccgagtcttgctctgtcacccaggttggagtgcagtggtgcgatctcggctcactgcgacctccacctcccgggttcaagcaattctgcctcagcctcccgagtagccaggactacagagcgggaacagcttccacgtgttcgaccagggccagtttgccaa

SEQ ID NO: 5854 - protein, 64 aa, Homo sapiens
MDLPVGPGAAGPSNVPAFLTKLWTLVSDPDTDALICWSPLPGSRLVYMVRPCKTGQLRFAEVNQ

SEQ ID NO: 5855 - DNA, 581 bp, Homo sapiens
ggcagcggcggcggcgggagcgcgcccgttgcaagatggcggcggccatgctgggccccggggctgtgtgtgcgcagcgggcggcggcgcggcccggaaggctggcgcggcgacggcgttagcccggccctcggcccctctttgcggccgctccctccgcctattccctccttgctcgagatggatctgcccgtgggccccggcgcggcggggcccagcaacgtcccggccttcctgaccaagctgtggaccctcgtgagcgacccggacaccgacgcgctcatctgctggagcccgagacggggttttgccatgttgcccaggccagtctccaactcctgagcttgagcaacccacccgcctcggcttcccaaagtgctgggaccgcaggcgtgaaccagcgcagccggctggaaaactggaactctcatcggttgagagtggcagctctggagctcggactcccccacctccccaggatttgtcattgctgctgtttgtcgtggttatctgtcagagcgggaacagcttccacgtgttcgaccagggccagtttgccaaggaggtgctgcccaagtact

SEQ ID NO: 5856 - protein, 53 aa, Homo sapiens
MDLPVGPGAAGPSNVPAFLTKLWTLVSDPDTDALICWSPRRGFAMLPRPVSNS

SEQ ID NO: 5857 - DNA, 334 bp, Homo sapiens
ggcagcggcggcggcgggagcgcgcccgttgcaagatggcggcggccatgctgggccccggggctgtgtgtgcgcagcgggcggcggcgcggcccggaaggctggcgcggcgacggcgttagcccggccctcggcccctctttgcggccgctccctccgcctattccctccttgctcgagatggatctgcccgtgggccccggcgcggcggggcccagcaacgtcccggccttcctgaccaagctgtggaccctcgtgagcgacccggacaccgacgcgctcatctgctggagcccgatggcttccggaaagtggtccacatcgagcagggcgg

SEQ ID NO: 5858 - protein, 50 aa, Homo sapiens
MDLPVGPGAAGPSNVPAFLTKLWTLVSDPDTDALICWSPMASGKWSTSSR

SEQ ID NO: 5859 - DNA, 679 bp, Homo sapiens
ggcagcggcggcggcgggagcgcgcccgttgcaagatggcggcggccatgctgggccccggggctgtgtgtgcgcagcgggcggcggcgcggcccggaaggctggcgcggcgacggcgttagcccggccctcggcccctctttgcggccgctccctccgcctattccctccttgctcgagatggatctgcccgtgggccccggcgcggcggggcccagcaacgtcccggccttcctgaccaagctgtggaccctcgtgagcgacccggacaccgacgcgctcatctgctggagcccgagacggggttttgccatgttgcccaggccagtctccaactcctgagcttgagcaacccacccgcctcggcttcccaaagtgctgggaccgcaggcgtgaaccagcgcagccggctggaaaactggaactctcatcggttgagagtggcagctctggagctcggactcccccacctccccaggatttgtcattgctgctgtttgtcgtggttatctgtcagagcgggaacagcttccacgtgttcgaccagggccagtttgccaaggaggtgctgcccaagtacttcaagcacaacaacatggccagcttcgtgcggcagctcaacatgtatggcttccggaaagtggtccacatcgagcagggcggcctggtcaagccagag

SEQ ID NO: 5860 - protein, 53 aa, Homo sapiens; identical to SEQ ID NO: 5856

SEQ ID NO: 5861 - DNA, 668 bp, Homo sapiens
ggcagcggcggcggcgggagcgcgcccgttgcaagatggcggcggccatgctgggccccggggctgtgtgtgcgcagcgggcggcggcgcggcccggaaggctggcgcggcgacggcgttagcccggccctcggcccctctttgcggccgctccctccgcctattccctccttgctcgagatggatctgcccgtgggccccggcgcggcggggcccagcaacgtcccggccttcctgaccaagctgtggaccctcgtgagcgacccggacaccgacgcgctcatctgctggagcccgagcgggaacagcttccacgtgttcgaccagggccagtttgccaaggaggtgctgcccaagtacttcaagcacaacaacatggccagcttcgtgcggcagctcaacatgtatggcttccggaaagtggtccacatcgagcagggcggcctggtcaagccagagagagacgacacggagttccagcacccatgcttcctgcgtggccaggagcagctccttgagaacatcaagaggaaagtgaccagtgtgtccaccctgaagagtgaagacataaagatccgccaggacagcgtcaccaagctgctgacggacgtgcagctgatgaaggggaagcaggagtgcatggactccaagctcctggccatgaagca

SEQ ID NO: 5862 - protein, 161 aa, Homo sapiens
MDLPVGPGAAGPSNVPAFLTKLWTLVSDPDTDALICWSPSGNSFHVFDQGQFAKEVLPKYFKHNNMASFVRQLNMYGFRKVVHIEQGGLVKPERDDTEFQHPCFLRGQEQLLENIKRKVTSVSTLKSEDIKIRQDSVTKLLTDVQLMKGKQECMDSKLLAM

SEQ ID NO: 5863 - DNA, 2166 bp, Homo sapiens
ggcagcggcggcggcgggagcgcgcccgttgcaagatggcggcggccatgctgggccccggggctgtgtgtgcgcagcgggcggcggcgcggcccggaaggctggcgcggcgacggcgttagcccggccctcggcccctctttgcggccgctccctccgcctattccctccttgctcgagatggatctgcccgtgggccccggcgcggcggggcccagcaacgtcccggccttcctgaccaagctgtggaccctcgtgagcgacccggacaccgacgcgctcatctgctggagcccgagcgggaacagcttccacgtgttcgaccagggccagtttgccaaggaggtgctgcccaagtacttcaagcacaacaacatggccagcttcgtgcggcagctcaacatgtatggcttccggaaagtggtccacatcgagcagggcggcctggtcaagccagagagagacgacacggagttccagcacccatgcttcctgcgtggccaggagcagctccttgagaacatcaagaggaaagtgaccagtgtgtccaccctgaagagtgaagacataaagatccgccaggacagcgtcaccaagctgctgacggacgtgcagctgatgaaggggaagcaggagtgcatggactccaagctcctggccatgaagcatgagaatgaggctctgtggcgggaggtggccagccttcggcagaagcatgcccagcaacagaaagtcgtcaacaagctcattcagttcctgatctcactggtgcagtcaaaccggatcctgggggtgaagagaaagatccccctgatgctgaacgacagtggctcagcacattccatgcccaagtatagccggcagttctccctggagcacgtccacggctcgggcccctactcggccccctccccagcctacagcagctccagcctctacgcccctgatgctgtggccagctctggacccatcatctccgacatcaccgagctggctcctgccagccccatggcctcccccggcgggagcatagacgagaggcccctatccagcagccccctggtgcgtgtcaaggaggagccccccagcccgcctcagagcccccgggtagaggaggcgagtcccgggcgcccatcttccgtggacaccctcttgtccccgaccgccctcattgactccatcctgcgggagagtgaacctgcccccgcctccgtcacagccctcacggacgccaggggccacacggacaccgagggccggcctccctcccccccgcccacctccacccctgaaaagtgcctcagcgtagcctgcctggacaagaatgagctcagtgaccacttggatgctatggactccaacctggataacctgcagaccatgctgagcagccacggcttcagcgtggacaccagtgccctgctggacctgttcagcccctcggtgaccgtgcccgacatgagcctgcctgaccttgacagcagcctggccagtatccaagagctcctgtctccccaggagccccccaggcctcccgaggcagagaacagcagcccggattcagggaagcagctggtgcactacacagcgcagccgctgttcctgctggaccccggctccgtggacaccgggagcaacgacctgccggtgctgtttgagctgggagagggctcctacttctccgaaggggacggcttcgccgaggaccccaccatctccctgctgacaggctcggagcctcccaaagccaaggaccccactgtctcctagaggccccggaggagctgggccagccgcccacccccacccccagtgcagggctggtcttggggaggcagggcagcctcgcggtcttgggcactggtgggtcggccgccatagccccagtaggacaaacgggctcgggtctgggcagcacctctggtcaggagggtcaccctggcctgccagtctgccttcccccaaccccgtgtcctgtggtttggttggggcttcacagccacacctggactgaccctgcaggttgttcatagtcagaattgtattttggatttttacacaactgtcccgttccccgctccacagagatacacagatatatacacacagtggatggacggacaagacaggcagagatctataaacagacaggctctatgctatggc

SEQ ID NO: 5864 - protein, 529 aa, Homo sapiens; identical to SEQ ID NO: 789

SEQ ID NO: 5865 - DNA, 1154 bp, Homo sapiens
atgcctgacttcctgcttacacagagcctcaagagcgggaacagcttccacgtgttcgaccagggccagtttgccaaggaggtgctgcccaagtacttcaagcacaacaacatggccagcttcgtgcggcagctcaacatgtatggcttccggaaagtggtccacatcgagcagggcggcctggtcaagccagagagagacgacacggagttccagcacccatgcttcctgcgtggccaggagcagctccttgagaacatcaagaggaaagtgaccagtgtgtccaccctgaagagtgaagacataaagatccgccaggacagcgtcaccaagctgctgacggacgtgcagctgatgaaggggaagcaggagtgcatggactccaagctcctggccatgaagcactcattcagttcctgatctcactggtgcagtcaaaccggatcctgggggtgaagagaaagatccccctgatgctgaacgacagtggctcagcacattccatgcccaagtatagccggcagttctccctggagcacgtccacggctcgggcccctactcggccccctccccagcctacagcagctccagcctctacgcccctgatgctgtggccagctctggacccatcatctccgacatcaccgagctggctcctgccagccccatggcctcccccggcgggagcatagacgagaggcccctatccagcagccccctggtgcgtgtcaaggaggagccccccagcccgcctcagagcccccgggtagaggaggcgagtcccgggcgcccatcttccgtggacaccctcttgtccccgaccgccctcattgactccatcctgcgggagagtgaacctgcccccgcctccgtcacagccctcacggacgccaggggccacacggacaccgagggccggcctccctcccccccgcccacctccacccctgaaaagtgcctcagcgtagcctgcctggacaagaatgagctcagtgaccacttggatgctatggactccaacctggataacctgcagaccatgctgagcagccacggcttcagcgtggacaccagtgccctgctggacctgttcagcccctcggtgaccgtgcccgacatgagcctgcctgaccttgacagcagcctggccagt

SEQ ID NO: 5866 - protein, 226 aa, Homo sapiens
MLNDSGSAHSMPKYSRQFSLEHVHGSGPYSAPSPAYSSSSLYAPDAVASSGPIISDITELAPASPMASPGGSIDERPLSSSPLVRVKEEPPSPPQSPRVEEASPGRPSSVDTLLSPTALIDSILRESEPAPASVTALTDARGHTDTEGRPPSPPPTSTPEKCLSVACLDKNELSDHLDAMDSNLDNLQTMLSSHGFSVDTSALLDLFSPSVTVPDMSLPDLDSSLA

SEQ ID NO: 5867 - DNA, 1230 bp, Homo sapiens
atgcctgacttcctgcttacacagagcctcaagagcgggaacagcttccacgtgttcgaccagggccagtttgccaaggaggtgctgcccaagtacttcaagcacaacaacatggccagcttcgtgcggcagctcaacatgtatggcttccggaaagtggtccacatcgagcagggcggcctggtcaagccagagagagacgacacggagttccagcacccatgcttcctgcgtggccaggagcagctccttgagaacatcaagaggaaagtgaccagtgtgtccaccctgaagagtgaagacataaagatccgccaggacagcgtcaccaagctgctgacggacgtgcagctgatgaaggggaagcaggagtgcatggactccaagctcctggccatgaagcatgagaatgaggctctgtggcgggaggtggccagccttcggcagaagcatgcccagcaacagaaagtcgtcaacaagctcattcagttcctgatctcactggtgcagtcaaaccggatcctgggggtgaagagaaagatccccctgatgctgaacgacagtggctcagcacattccatgcccaagtatagccggcagttctccctggagcacgtccacggctcgggcccctactcggccccctccccagcctacagcagctccagcctctacgcccctgatgctgtggccagctctggacccatcatctccgacatcaccgagctggctcctgccagccccatggcctcccccggcgggagcatagacgagaggcccctatccagcagccccctggtgcgtgtcaaggaggagccccccagcccgcctcagagcccccgggtagaggaggcgagtcccgggcgcccatcttccgtggacaccctcttgtccccgaccgccctcattgactccatcctgcgggagagtgaacctgcccccgcctccgtcacagccctcacggacgccaggggccacacggacaccgagggccggcctccctcccccccgcccacctccacccctgaaaagtgcctcagcgtagcctgcctggacaagaatgagctcagtgaccacttggatgctatggactccaacctggataacctgcagaccatgctgagcagccacggcttcagcgtggacaccagtgccctgctggacctgttcagcccctcggtgaccgtgcccgacatgagcctgcctgaccttgacagcagcctggccagt

SEQ ID NO: 5868 - protein, 409 aa, Homo sapiens
MPDFLLTQSLKSGNSFHVFDQGQFAKEVLPKYFKHNNMASFVRQLNMYGFRKVVHIEQGGLVKPERDDTEFQHPCFLRGQEQLLENIKRKVTSVSTLKSEDIKIRQDSVTKLLTDVQLMKGKQECMDSKLLAMKHENEALWREVASLRQKHAQQQKVVNKLIQFLISLVQSNRILGVKRKIPLMLNDSGSAHSMPKYSRQFSLEHVHGSGPYSAPSPAYSSSSLYAPDAVASSGPIISDITELAPASPMASPGGSIDERPLSSSPLVRVKEEPPSPPQSPRVEEASPGRPSSVDTLLSPTALIDSILRESEPAPASVTALTDARGHTDTEGRPPSPPPTSTPEKCLSVACLDKNELSDHLDAMDSNLDNLQTMLSSHGFSVDTSALLDLFSPSVTVPDMSLPDLDSSLA

SEQ ID NO: 5869 - DNA, 2027 bp, Homo sapiens
atgcctgacttcctgcttacacagagcctcaagagcgggaacagcttccacgtgttcgaccagggccagtttgccaaggaggtgctgcccaagtacttcaagcacaacaacatggccagcttcgtgcggcagctcaacatgtatggcttccggaaagtggtccacatcgagcagggcggcctggtcaagccagagagagacgacacggagttccagcacccatgcttcctgcgtggccaggagcagctccttgagaacatcaagaggaaagtgaccagtgtgtccaccctgaagagtgaagacataaagatccgccaggacagcgtcaccaagctgctgacggacgtgcagctgatgaaggggaagcaggagtgcatggactccaagctcctggccatgaagcatgagaatgaggctctgtggcgggaggtggccagccttcggcagaagcatgcccagcaacagaaagtcgtcaacaagctcattcagttcctgatctcactggtgcagtcaaaccggatcctgggggtgaagagaaagatccccctgatgctgaacgacagtggctcagcacattccatgcccaagtatagccggcagttctccctggagcacgtccacggctcgggcccctactcggccccctccccagcctacagcagctccagcctctacgcccctgatgctgtggccagctctggacccatcatctccgacatcaccgagctggctcctgccagccccatggcctcccccggcgggagcatagacgagaggtgggggccgcatcaccccagccatcctgtcccccaatgaggcccctatccagcagccccctggtgcgtgtcaaggaggagccccccagcccgcctcagagcccccgggtagaggaggcgagtcccgggcgcccatcttccgtggacaccctcttgtccccgaccgccctcattgactccatcctgcgggagagtgaacctgcccccgcctccgtcacagccctcacggacgccaggggccacacggacaccgagggccggcctccctcccccccgcccacctccacccctgaaaagtgcctcagcgtagcctgcctggacaatttggctcgcactccacagatgtctagggtcgcccgcctcttcccctgcccctcttcctctccgcatggccaagtccagccagggaatgagctcagtgaccacttggatgctatggactccaacctggataacctgcagaccatgctgagcagccacggcttcagcgtggacaccagtgccctgctggacctgttcagcccctcggtgaccgtgcccgacatgagcctgcctgaccttgacagcagcctggccagtatccaagagctcctgtctccccaggagccccccaggcctcccgaggcagagaacagcagcccggattcagggaagcagctggtgcactacacagcgcagccgctgttcctgctggaccccggctccgtggacaccgggagcaacgacctgccggtgctgtttgagctgggagagggctcctacttctccgaaggggacggcttcgccgaggaccccaccatctccctgctgacaggctcggagcctcccaaagccaaggaccccactgtctcctagaggccccggaggagctgggccagccgcccacccccacccccagtgcagggctggtcttggggaggcagggcagcctcgcggtcttgggcactggtgggtcggccgccatagccccagtaggacaaacgggctcgggtctgggcagcacctctggtcaggagggtcaccctggcctgccagtctgccttcccccaaccccgtgtcctgtggtttggttggggcttcacagccacacctggactgaccctgcaggttgttcatagtcagaattgtattttggatttttacacaactgtcccgttccccgctccacagagatacacagatatatacacacagtggatggacggacaagacaggcagagatctataaacagacaggctctatgctatggc

SEQ ID NO: 5870 - protein, 272 aa, Homo sapiens
MRPLSSSPLVRVKEEPPSPPQSPRVEEASPGRPSSVDTLLSPTALIDSILRESEPAPASVTALTDARGHTDTEGRPPSPPPTSTPEKCLSVACLDNLARTPQMSRVARLFPCPSSSPHGQVQPGNELSDHLDAMDSNLDNLQTMLSSHGFSVDTSALLDLFSPSVTVPDMSLPDLDSSLASIQELLSPQEPPRPPEAENSSPDSGKQLVHYTAQPLFLLDPGSVDTGSNDLPVLFELGEGSYFSEGDGFAEDPTISLLTGSEPPKAKDPTVS

SEQ ID NO: 5871 - DNA, 1986 bp, Homo sapiens
atgcctgacttcctgcttacacagagcctcaagagcgggaacagcttccacgtgttcgaccagggccagtttgccaaggaggtgctgcccaagtacttcaagcacaacaacatggccagcttcgtgcggcagctcaacatgtatggcttccggaaagtggtccacatcgagcagggcggcctggtcaagccagagagagacgacacggagttccagcacccatgcttcctgcgtggccaggagcagctccttgagaacatcaagaggaaagtgaccagtgtgtccaccctgaagagtgaagacataaagatccgccaggacagcgtcaccaagctgctgacggacgtgcagctgatgaaggggaagcaggagtgcatggactccaagctcctggccatgaagcatgagaatgaggctctgtggcgggaggtggccagccttcggcagaagcatgcccagcaacagaaagtcgtcaacaagctcattcagttcctgatctcactggtgcagtcaaaccggatcctgggggtgaagagaaagatccccctgatgctgaacgacagtggctcagcacattccatgcccaagtatagccggcagttctccctggagcacgtccacggctcgggcccctactcggccccctccccagcctacagcagctccagcctctacgcccctgatgctgtggccagctctggacccatcatctccgacatcaccgagctggctcctgccagccccatggcctcccccggcgggagcatagacgagaggcccctatccagcagccccctggtgcgtgtcaaggaggagccccccagcccgcctcagagcccccgggtagaggaggcgagtcccgggcgcccatcttccgtggacaccctcttgtccccgaccgccctcattgactccatcctgcgggagagtgaacctgcccccgcctccgtcacagccctcacggacgccaggggccacacggacaccgagggccggcctccctcccccccgcccacctccacccctgaaaagtgcctcagcgtagcctgcctggacaatttggctcgcactccacagatgtctagggtcgcccgcctcttcccctgcccctcttcctctccgcatggccaagtccagccagggaatgagctcagtgaccacttggatgctatggactccaacctggataacctgcagaccatgctgagcagccacggcttcagcgtggacaccagtgccctgctggacctgttcagcccctcggtgaccgtgcccgacatgagcctgcctgaccttgacagcagcctggccagtatccaagagctcctgtctccccaggagccccccaggcctcccgaggcagagaacagcagcccggattcagggaagcagctggtgcactacacagcgcagccgctgttcctgctggaccccggctccgtggacaccgggagcaacgacctgccggtgctgtttgagctgggagagggctcctacttctccgaaggggacggcttcgccgaggaccccaccatctccctgctgacaggctcggagcctcccaaagccaaggaccccactgtctcctagaggccccggaggagctgggccagccgcccacccccacccccagtgcagggctggtcttggggaggcagggcagcctcgcggtcttgggcactggtgggtcggccgccatagccccagtaggacaaacgggctcgggtctgggcagcacctctggtcaggagggtcaccctggcctgccagtctgccttcccccaaccccgtgtcctgtggtttggttggggcttcacagccacacctggactgaccctgcaggttgttcatagtcagaattgtattttggatttttacacaactgtcccgttccccgctccacagagatacacagatatatacacacagtggatggacggacaagacaggcagagatctataaacagacaggctctatgctatggc

SEQ ID NO: 5872 - protein, 529 aa, Homo sapiens
MPDFLLTQSLKSGNSFHVFDQGQFAKEVLPKYFKHNNMASFVRQLNMYGFRKVVHIEQGGLVKPERDDTEFQHPCFLRGQEQLLENIKRKVTSVSTLKSEDIKIRQDSVTKLLTDVQLMKGKQECMDSKLLAMKHENEALWREVASLRQKHAQQQKVVNKLIQFLISLVQSNRILGVKRKIPLMLNDSGSAHSMPKYSRQFSLEHVHGSGPYSAPSPAYSSSSLYAPDAVASSGPIISDITELAPASPMASPGGSIDERPLSSSPLVRVKEEPPSPPQSPRVEEASPGRPSSVDTLLSPTALIDSILRESEPAPASVTALTDARGHTDTEGRPPSPPPTSTPEKCLSVACLDNLARTPQMSRVARLFPCPSSSPHGQVQPGNELSDHLDAMDSNLDNLQTMLSSHGFSVDTSALLDLFSPSVTVPDMSLPDLDSSLASIQELLSPQEPPRPPEAENSSPDSGKQLVHYTAQPLFLLDPGSVDTGSNDLPVLFELGEGSYFSEGDGFAEDPTISLLTGSEPPKAKDPTVS

SEQ ID NO: 5873 - DNA, 1910 bp, Homo sapiens
atgcctgacttcctgcttacacagagcctcaagagcgggaacagcttccacgtgttcgaccagggccagtttgccaaggaggtgctgcccaagtacttcaagcacaacaacatggccagcttcgtgcggcagctcaacatgtatggcttccggaaagtggtccacatcgagcagggcggcctggtcaagccagagagagacgacacggagttccagcacccatgcttcctgcgtggccaggagcagctccttgagaacatcaagaggaaagtgaccagtgtgtccaccctgaagagtgaagacataaagatccgccaggacagcgtcaccaagctgctgacggacgtgcagctgatgaaggggaagcaggagtgcatggactccaagctcctggccatgaagcactcattcagttcctgatctcactggtgcagtcaaaccggatcctgggggtgaagagaaagatccccctgatgctgaacgacagtggctcagcacattccatgcccaagtatagccggcagttctccctggagcacgtccacggctcgggcccctactcggccccctccccagcctacagcagctccagcctctacgcccctgatgctgtggccagctctggacccatcatctccgacatcaccgagctggctcctgccagccccatggcctcccccggcgggagcatagacgagaggcccctatccagcagccccctggtgcgtgtcaaggaggagccccccagcccgcctcagagcccccgggtagaggaggcgagtcccgggcgcccatcttccgtggacaccctcttgtccccgaccgccctcattgactccatcctgcgggagagtgaacctgcccccgcctccgtcacagccctcacggacgccaggggccacacggacaccgagggccggcctccctcccccccgcccacctccacccctgaaaagtgcctcagcgtagcctgcctggacaatttggctcgcactccacagatgtctagggtcgcccgcctcttcccctgcccctcttcctctccgcatggccaagtccagccagggaatgagctcagtgaccacttggatgctatggactccaacctggataacctgcagaccatgctgagcagccacggcttcagcgtggacaccagtgccctgctggacctgttcagcccctcggtgaccgtgcccgacatgagcctgcctgaccttgacagcagcctggccagtatccaagagctcctgtctccccaggagccccccaggcctcccgaggcagagaacagcagcccggattcagggaagcagctggtgcactacacagcgcagccgctgttcctgctggaccccggctccgtggacaccgggagcaacgacctgccggtgctgtttgagctgggagagggctcctacttctccgaaggggacggcttcgccgaggaccccaccatctccctgctgacaggctcggagcctcccaaagccaaggaccccactgtctcctagaggccccggaggagctgggccagccgcccacccccacccccagtgcagggctggtcttggggaggcagggcagcctcgcggtcttgggcactggtgggtcggccgccatagccccagtaggacaaacgggctcgggtctgggcagcacctctggtcaggagggtcaccctggcctgccagtctgccttcccccaaccccgtgtcctgtggtttggttggggcttcacagccacacctggactgaccctgcaggttgttcatagtcagaattgtattttggatttttacacaactgtcccgttccccgctccacagagatacacagatatatacacacagtggatggacggacaagacaggcagagatctataaacagacaggctctatgctatggc

SEQ ID NO: 5874 - protein, 346 aa, Homo sapiens
MLNDSGSAHSMPKYSRQFSLEHVHGSGPYSAPSPAYSSSSLYAPDAVASSGPIISDITELAPASPMASPGGSIDERPLSSSPLVRVKEEPPSPPQSPRVEEASPGRPSSVDTLLSPTALIDSILRESEPAPASVTALTDARGHTDTEGRPPSPPPTSTPEKCLSVACLDNLARTPQMSRVARLFPCPSSSPHGQVQPGNELSDHLDAMDSNLDNLQTMLSSHGFSVDTSALLDLFSPSVTVPDMSLPDLDSSLASIQELLSPQEPPRPPEAENSSPDSGKQLVHYTAQPLFLLDPGSVDTGSNDLPVLFELGEGSYFSEGDGFAEDPTISLLTGSEPPKAKDPTVS

SEQ ID NO: 5875 - DNA, 1943 bp, Homo sapiens
atgcctgacttcctgcttacacagagcctcaagagcgggaacagcttccacgtgttcgaccagggccagtttgccaaggaggtgctgcccaagtacttcaagcacaacaacatggccagcttcgtgcggcagctcaacatgtatggcttccggaaagtggtccacatcgagcagggcggcctggtcaagccagagagagacgacacggagttccagcacccatgcttcctgcgtggccaggagcagctccttgagaacatcaagaggaaagtgaccagtgtgtccaccctgaagagtgaagacataaagatccgccaggacagcgtcaccaagctgctgacggacgtgcagctgatgaaggggaagcaggagtgcatggactccaagctcctggccatgaagcatgagaatgaggctctgtggcgggaggtggccagccttcggcagaagcatgcccagcaacagaaagtcgtcaacaagctcattcagttcctgatctcactggtgcagtcaaaccggatcctgggggtgaagagaaagatccccctgatgctgaacgacagtggctcagcacattccatgcccaagtatagccggcagttctccctggagcacgtccacggctcgggcccctactcggccccctccccagcctacagcagctccagcctctacgcccctgatgctgtggccagctctggacccatcatctccgacatcaccgagctggctcctgccagccccatggcctcccccggcgggagcatagacgagaggtgggggccgcatcaccccagccatcctgtcccccaatgaggcccctatccagcagccccctggtgcgtgtcaaggaggagccccccagcccgcctcagagcccccgggtagaggaggcgagtcccgggcgcccatcttccgtggacaccctcttgtccccgaccgccctcattgactccatcctgcgggagagtgaacctgcccccgcctccgtcacagccctcacggacgccaggggccacacggacaccgagggccggcctccctcccccccgcccacctccacccctgaaaagtgcctcagcgtagcctgcctggacaagaatgagctcagtgaccacttggatgctatggactccaacctggataacctgcagaccatgctgagcagccacggcttcagcgtggacaccagtgccctgctggacctgttcagcccctcggtgaccgtgcccgacatgagcctgcctgaccttgacagcagcctggccagtatccaagagctcctgtctccccaggagccccccaggcctcccgaggcagagaacagcagcccggattcagggaagcagctggtgcactacacagcgcagccgctgttcctgctggaccccggctccgtggacaccgggagcaacgacctgccggtgctgtttgagctgggagagggctcctacttctccgaaggggacggcttcgccgaggaccccaccatctccctgctgacaggctcggagcctcccaaagccaaggaccccactgtctcctagaggccccggaggagctgggccagccgcccacccccacccccagtgcagggctggtcttggggaggcagggcagcctcgcggtcttgggcactggtgggtcggccgccatagccccagtaggacaaacgggctcgggtctgggcagcacctctggtcaggagggtcaccctggcctgccagtctgccttcccccaaccccgtgtcctgtggtttggttggggcttcacagccacacctggactgaccctgcaggttgttcatagtcagaattgtattttggatttttacacaactgtcccgttccccgctccacagagatacacagatatatacacacagtggatggacggacaagacaggcagagatctataaacagacaggctctatgctatggc

SEQ ID NO: 5876 - protein, 271 aa, Homo sapiens
MPDFLLTQSLKSGNSFHVFDQGQFAKEVLPKYFKHNNMASFVRQLNMYGFRKVVHIEQGGLVKPERDDTEFQHPCFLRGQEQLLENIKRKVTSVSTLKSEDIKIRQDSVTKLLTDVQLMKGKQECMDSKLLAMKHENEALWREVASLRQKHAQQQKVVNKLIQFLISLVQSNRILGVKRKIPLMLNDSGSAHSMPKYSRQFSLEHVHGSGPYSAPSPAYSSSSLYAPDAVASSGPIISDITELAPASPMASPGGSIDERWGPHHPSHPVPQ

SEQ ID NO: 5877 - DNA, 1807 bp, Homo sapiens
atgcctgacttcctgcttacacagagcctcaagagcgggaacagcttccacgtgttcgaccagggccagtttgccaaggaggtgctgcccaagtacttcaagcacaacaacatggccagcttcgtgcggcagctcaacatgtatggcttccggaaagtggtccacatcgagcagggcggcctggtcaagccagagagagacgacacggagttccagcacccatgcttcctgcgtggccaggagcagctccttgagaacatcaagaggaaagtgaccagtgtgtccaccctgaagagtgaagacataaagatccgccaggacagcgtcaccaagctgctgacggacgtgcagctgatgaaggggaagcaggagtgcatggactccaagctcctggccatgaagcatgagaatgaggctctgtggcgggaggtggccagccttcggcagaagcatgcccagcaacagaaagtcgtcaacaagctcattcagttcctgatctcactggtgcagtcaaaccggatcctgggggtgaagagaaagatccccctgatgctgaacgacagtggctcagcacattccatgcccaagtatagccggcagttctccctggagcacgtccacggctcgggcccctactcggccccctccccagcctacagcagctccagcctctacgcccctgatgctgtggccagctctggacccatcatctccgacatcaccgagctggctcctgccagccccatggcctcccccggcgggagcatagacgagagccctcacggacgccaggggccacacggacaccgagggccggcctccctcccccccgcccacctccacccctgaaaagtgcctcagcgtagcctgcctggacaatttggctcgcactccacagatgtctagggtcgcccgcctcttcccctgcccctcttcctctccgcatggccaagtccagccagggaatgagctcagtgaccacttggatgctatggactccaacctggataacctgcagaccatgctgagcagccacggcttcagcgtggacaccagtgccctgctggacctgttcagcccctcggtgaccgtgcccgacatgagcctgcctgaccttgacagcagcctggccagtatccaagagctcctgtctccccaggagccccccaggcctcccgaggcagagaacagcagcccggattcagggaagcagctggtgcactacacagcgcagccgctgttcctgctggaccccggctccgtggacaccgggagcaacgacctgccggtgctgtttgagctgggagagggctcctacttctccgaaggggacggcttcgccgaggaccccaccatctccctgctgacaggctcggagcctcccaaagccaaggaccccactgtctcctagaggccccggaggagctgggccagccgcccacccccacccccagtgcagggctggtcttggggaggcagggcagcctcgcggtcttgggcactggtgggtcggccgccatagccccagtaggacaaacgggctcgggtctgggcagcacctctggtcaggagggtcaccctggcctgccagtctgccttcccccaaccccgtgtcctgtggtttggttggggcttcacagccacacctggactgaccctgcaggttgttcatagtcagaattgtattttggatttttacacaactgtcccgttccccgctccacagagatacacagatatatacacacagtggatggacggacaagacaggcagagatctataaacagacaggctctatgctatggc

SEQ ID NO: 5878 - protein, 282 aa, Homo sapiens
MPDFLLTQSLKSGNSFHVFDQGQFAKEVLPKYFKHNNMASFVRQLNMYGFRKVVHIEQGGLVKPERDDTEFQHPCFLRGQEQLLENIKRKVTSVSTLKSEDIKIRQDSVTKLLTDVQLMKGKQECMDSKLLAMKHENEALWREVASLRQKHAQQQKVVNKLIQFLISLVQSNRILGVKRKIPLMLNDSGSAHSMPKYSRQFSLEHVHGSGPYSAPSPAYSSSSLYAPDAVASSGPIISDITELAPASPMASPGGSIDESPHGRQGPHGHRGPASLPPAHLHP

SEQ ID NO: 5879 - DNA, 1826 bp, Homo sapiens
atgcctgacttcctgcttacacagagcctcaagagcgggaacagcttccacgtgttcgaccagggccagtttgccaaggaggtgctgcccaagtacttcaagcacaacaacatggccagcttcgtgcggcagctcaacatgtatggcttccggaaagtggtccacatcgagcagggcggcctggtcaagccagagagagacgacacggagttccagcacccatgcttcctgcgtggccaggagcagctccttgagaacatcaagaggaaagtgaccagtgtgtccaccctgaagagtgaagacataaagatccgccaggacagcgtcaccaagctgctgacggacgtgcagctgatgaaggggaagcaggagtgcatggactccaagctcctggccatgaagcactcattcagttcctgatctcactggtgcagtcaaaccggatcctgggggtgaagagaaagatccccctgatgctgaacgacagtggctcagcacattccatgcccaagtatagccggcagttctccctggagcacgtccacggctcgggcccctactcggccccctccccagcctacagcagctccagcctctacgcccctgatgctgtggccagctctggacccatcatctccgacatcaccgagctggctcctgccagccccatggcctcccccggcgggagcatagacgagaggcccctatccagcagccccctggtgcgtgtcaaggaggagccccccagcccgcctcagagcccccgggtagaggaggcgagtcccgggcgcccatcttccgtggacaccctcttgtccccgaccgccctcattgactccatcctgcgggagagtgaacctgcccccgcctccgtcacagccctcacggacgccaggggccacacggacaccgagggccggcctccctcccccccgcccacctccacccctgaaaagtgcctcagcgtagcctgcctggacaagaatgagctcagtgaccacttggatgctatggactccaacctggataacctgcagaccatgctgagcagccacggcttcagcgtggacaccagtgccctgctggacctgttcagcccctcggtgaccgtgcccgacatgagcctgcctgaccttgacagcagcctggccagtatccaagagctcctgtctccccaggagccccccaggcctcccgaggcagagaacagcagcccggattcagggaagcagctggtgcactacacagcgcagccgctgttcctgctggaccccggctccgtggacaccgggagcaacgacctgccggtgctgtttgagctgggagagggctcctacttctccgaaggggacggcttcgccgaggaccccaccatctccctgctgacaggctcggagcctcccaaagccaaggaccccactgtctcctagaggccccggaggagctgggccagccgcccacccccacccccagtgcagggctggtcttggggaggcagggcagcctcgcggtcttgggcactggtgggtcggccgccatagccccagtaggacaaacgggctcgggtctgggcagcacctctggtcaggagggtcaccctggcctgccagtctgccttcccccaaccccgtgtcctgtggtttggttggggcttcacagccacacctggactgaccctgcaggttgttcatagtcagaattgtattttggatttttacacaactgtcccgttccccgctccacagagatacacagatatatacacacagtggatggacggacaagacaggcagagatctataaacagacaggctctatgctatggc

SEQ ID NO: 5880 - protein, 318 aa, Homo sapiens
MLNDSGSAHSMPKYSRQFSLEHVHGSGPYSAPSPAYSSSSLYAPDAVASSGPIISDITELAPASPMASPGGSIDERPLSSSPLVRVKEEPPSPPQSPRVEEASPGRPSSVDTLLSPTALIDSILRESEPAPASVTALTDARGHTDTEGRPPSPPPTSTPEKCLSVACLDKNELSDHLDAMDSNLDNLQTMLSSHGFSVDTSALLDLFSPSVTVPDMSLPDLDSSLASIQELLSPQEPPRPPEAENSSPDSGKQLVHYTAQPLFLLDPGSVDTGSNDLPVLFELGEGSYFSEGDGFAEDPTISLLTGSEPPKAKDPTVS

SEQ ID NO: 5881 - DNA, 1902 bp, Homo sapiens
atgcctgacttcctgcttacacagagcctcaagagcgggaacagcttccacgtgttcgaccagggccagtttgccaaggaggtgctgcccaagtacttcaagcacaacaacatggccagcttcgtgcggcagctcaacatgtatggcttccggaaagtggtccacatcgagcagggcggcctggtcaagccagagagagacgacacggagttccagcacccatgcttcctgcgtggccaggagcagctccttgagaacatcaagaggaaagtgaccagtgtgtccaccctgaagagtgaagacataaagatccgccaggacagcgtcaccaagctgctgacggacgtgcagctgatgaaggggaagcaggagtgcatggactccaagctcctggccatgaagcatgagaatgaggctctgtggcgggaggtggccagccttcggcagaagcatgcccagcaacagaaagtcgtcaacaagctcattcagttcctgatctcactggtgcagtcaaaccggatcctgggggtgaagagaaagatccccctgatgctgaacgacagtggctcagcacattccatgcccaagtatagccggcagttctccctggagcacgtccacggctcgggcccctactcggccccctccccagcctacagcagctccagcctctacgcccctgatgctgtggccagctctggacccatcatctccgacatcaccgagctggctcctgccagccccatggcctcccccggcgggagcatagacgagaggcccctatccagcagccccctggtgcgtgtcaaggaggagccccccagcccgcctcagagcccccgggtagaggaggcgagtcccgggcgcccatcttccgtggacaccctcttgtccccgaccgccctcattgactccatcctgcgggagagtgaacctgcccccgcctccgtcacagccctcacggacgccaggggccacacggacaccgagggccggcctccctcccccccgcccacctccacccctgaaaagtgcctcagcgtagcctgcctggacaagaatgagctcagtgaccacttggatgctatggactccaacctggataacctgcagaccatgctgagcagccacggcttcagcgtggacaccagtgccctgctggacctgttcagcccctcggtgaccgtgcccgacatgagcctgcctgaccttgacagcagcctggccagtatccaagagctcctgtctccccaggagccccccaggcctcccgaggcagagaacagcagcccggattcagggaagcagctggtgcactacacagcgcagccgctgttcctgctggaccccggctccgtggacaccgggagcaacgacctgccggtgctgtttgagctgggagagggctcctacttctccgaaggggacggcttcgccgaggaccccaccatctccctgctgacaggctcggagcctcccaaagccaaggaccccactgtctcctagaggccccggaggagctgggccagccgcccacccccacccccagtgcagggctggtcttggggaggcagggcagcctcgcggtcttgggcactggtgggtcggccgccatagccccagtaggacaaacgggctcgggtctgggcagcacctctggtcaggagggtcaccctggcctgccagtctgccttcccccaaccccgtgtcctgtggtttggttggggcttcacagccacacctggactgaccctgcaggttgttcatagtcagaattgtattttggatttttacacaactgtcccgttccccgctccacagagatacacagatatatacacacagtggatggacggacaagacaggcagagatctataaacagacaggctctatgctatggc

SEQ ID NO: 5882 - protein, 501 aa, Homo sapiens
MPDFLLTQSLKSGNSFHVFDQGQFAKEVLPKYFKHNNMASFVRQLNMYGFRKVVHIEQGGLVKPERDDTEFQHPCFLRGQEQLLENIKRKVTSVSTLKSEDIKIRQDSVTKLLTDVQLMKGKQECMDSKLLAMKHENEALWREVASLRQKHAQQQKVVNKLIQFLISLVQSNRILGVKRKIPLMLNDSGSAHSMPKYSRQFSLEHVHGSGPYSAPSPAYSSSSLYAPDAVASSGPIISDITELAPASPMASPGGSIDERPLSSSPLVRVKEEPPSPPQSPRVEEASPGRPSSVDTLLSPTALIDSILRESEPAPASVTALTDARGHTDTEGRPPSPPPTSTPEKCLSVACLDKNELSDHLDAMDSNLDNLQTMLSSHGFSVDTSALLDLFSPSVTVPDMSLPDLDSSLASIQELLSPQEPPRPPEAENSSPDSGKQLVHYTAQPLFLLDPGSVDTGSNDLPVLFELGEGSYFSEGDGFAEDPTISLLTGSEPPKAKDPTVS

SEQ ID NO: 5883 - DNA, 3458 bp, Homo sapiens
agcgcaggggtgcgggaggcagacctgcagatggcgggaccccagcaggaggaccctgtgatgaaggacggggcgtcctgtgctggccaagggcatggcgtgggaccctgcaagcctgggggccggggagcagccgcctcttccatgggggagggtccttgtgggtatgaacctggggtccccatggaagaaccgtgaagccggagctgtactccacgtgtgtcgggcgcagggagccctgtggggacacagggtctcccttagaccaaggccactcggccacccaggcatgggctctgagggggcagggcagggtctgaccatggccaagccccgcagcagcctcctggagcagtggccgctcttcaggggttctggtcccgccctgaggcagagctgcccccttccctgttatgtgcagatggcttccggaaagtggtccacatcgagcagggcggcctggtcaagccagagagagacgacacggagttccagcacccatgcttcctgcgtggccaggagcagctccttgagaacatcaagaggaaagtgaccagtgtgtccaccctgaagagtgaagacataaagatccgccaggacagcgtcaccaagctgctgacggacgtgcagctgatgaaggggaagcaggagtgcatggactccaagctcctggccatgaagcagtaggtcccacaccagcattatgggccacagcgggtcctggcgcccaccaagaggccccgggtgctgtgggggcagggccctgaccggggccaggtgctcagctccaccctcccgctccacgcacatctaccctgggcctctgccccagccccgccgcccgtggctgctgcaacagctctggggccagccgttttccatgtgcagaagggggttgggagggtcccctgctctgcacatccccagcgccctctgggccattggcttctgcctggctccgagcttggcgggacccaccagcctacttttgaggacaagccttgcacagcagacccgtcccacccgcctcgggcctggggtcagacccacctcaggcccttcctggaaccgctgtcccacactcgcctgggcccatggagctagcccccagcccctcctcaccgggaccctgcggctctggggaaaccttagcaggagcctaacacacggtggcacctgagaaactgaggcaagcccacctcggaaggccagctcaggtctcacgtccactttggggctccaggcatgcgggaaccccaatgccagtacggcttcctcggctccgtgcagcaggcgctcttgacccccacgtcatggaggaggccttggcctcagactctcctgcatggggtctagcaggagccaccggctttgtgattcctggagtccggccacgtggacctggcctaccaagaagactcacaggcttgacagggcccagcctcccagagcagcaggagcgcggtcatggccctgctcacctggctggggacagctcttccccacccctgagccacctccaggcctggcgagggccctgagcacctacaggacatgggacagccagtgtcgcagcctgaagaaccgtcctcccttaacctggctgctcaggccttggaagggcggcccaagggtctgctcctggcctgtgtccaaggcagccctccaggtgtttgccaggatggatgccaggatccgggtgcacctggctcgcatggatccatccccaacaccctacgtgacaccaggtgtccccggcagggaggggcagtgggaccagcaagccctggccctggcccccagtccctccacacacaagttctcatcctggggtgggccaggccagacatggtcacacttacccctgctcctgcatgggggacagggagggtctgtggggctccctcagccctggggctcatgggattgggccccactgacccagcctggtctgttgcagtgagaatgaggctctgtggcgggaggtggccagccttcggcagaagcatgcccagcaacagaaagtcgtcaacaagctcattcagttcctgatctcactggtgcagtcaaaccggatcctgggggtgaagagaaagatccccctgatgctgaacgacagtggctcagcacattccatgcccaagtatagccggcagttctccctggagcacgtccacggctcgggcccctactcggccccctccccagcctacagcagctccagcctctacgcccctgatgctgtggccagctctggacccatcatctccgacatcaccgagctggctcctgccagccccatggcctcccccggcgggagcatagacgagaggcccctatccagcagccccctggtgcgtgtcaaggaggagccccccagcccgcctcagagcccccgggtagaggaggcgagtcccgggcgcccatcttccgtggacaccctcttgtccccgaccgccctcattgactccatcctgcgggagagtgaacctgcccccgcctccgtcacagccctcacggacgccaggggccacacggacaccgagggccggcctccctcccccccgcccacctccacccctgaaaagtgcctcagcgtagcctgcctggacaagaatgagctcagtgaccacttggatgctatggactccaacctggataacctgcagaccatgctgagcagccacggcttcagcgtggacaccagtgccctgctggacctgttcagcccctcggtgaccgtgcccgacatgagcctgcctgaccttgacagcagcctggccagtatccaagagctcctgtctccccaggagccccccaggcctcccgaggcagagaacagcagcccggattcagggaagcagctggtgcactacacagcgcagccgctgttcctgctggaccccggctccgtggacaccgggagcaacgacctgccggtgctgtttgagctgggagagggctcctacttctccgaaggggacggcttcgccgaggaccccaccatctccctgctgacaggctcggagcctcccaaagccaaggaccccactgtctcctagaggccccggaggagctgggccagccgcccacccccacccccagtgcagggctggtcttggggaggcagggcagcctcgcggtcttgggcactggtgggtcggccgccatagccccagtaggacaaacgggctcgggtctgggcagcacctctggtcaggagggtcaccctggcctgccagtctgccttcccccaaccccgtgtcctgtggtttggttggggcttcacagccacacctggactgaccctgcaggttgttcatagtcagaattgtattttggatttttacacaactgtcccgttccccgctccacagagatacacagatatatacacacagtggatggacggacaagacaggcagagatctataaacagacaggctctatgctatggc

SEQ ID NO: 5884 - protein, 318 aa, Homo sapiens; identical to SEQ ID NO: 5880

SEQ ID NO: 5885 - DNA, 2342 bp, Homo sapiens
tgaggcaagcccacctcggaaggccagctcaggtctcacgtccactttggggctccaggcatgcgggaaccccaatgccagtacggcttcctcggctccgtgcagcaggcgctcttgacccccacgtcatggaggaggccttggcctcagactctcctgcatggggtctagcaggagccaccggctttgtgattcctggagtccggccacgtggacctggcctaccaagaagactcacaggcttgacagggcccagcctcccagagcagcaggagcgcggtcatggccctgctcacctggctggggacagctcttccccacccctgagccacctccaggcctggcgagggccctgagcacctacaggacatgggacagccagtgtcgcagcctgaagaaccgtcctcccttaacctggctgctcaggccttggaagggcggcccaagggtctgctcctggcctgtgtccaaggcagccctccaggtgtttgccaggatggatgccaggatccgggtgcacctggctcgcatggatccatccccaacaccctacgtgacaccaggtgtccccggcagggaggggcagtgggaccagcaagccctggccctggcccccagtccctccacacacaagttctcatcctggggtgggccaggccagacatggtcacacttacccctgctcctgcatgggggacagggagggtctgtggggctccctcagccctggggctcatgggattgggccccactgacccagcctggtctgttgcagtgagaatgaggctctgtggcgggaggtggccagccttcggcagaagcatgcccagcaacagaaagtcgtcaacaagctcattcagttcctgatctcactggtgcagtcaaaccggatcctgggggtgaagagaaagatccccctgatgctgaacgacagtggctcagcacattccatgcccaagtatagccggcagttctccctggagcacgtccacggctcgggcccctactcggccccctccccagcctacagcagctccagcctctacgcccctgatgctgtggccagctctggacccatcatctccgacatcaccgagctggctcctgccagccccatggcctcccccggcgggagcatagacgagaggcccctatccagcagccccctggtgcgtgtcaaggaggagccccccagcccgcctcagagcccccgggtagaggaggcgagtcccgggcgcccatcttccgtggacaccctcttgtccccgaccgccctcattgactccatcctgcgggagagtgaacctgcccccgcctccgtcacagccctcacggacgccaggggccacacggacaccgagggccggcctccctcccccccgcccacctccacccctgaaaagtgcctcagcgtagcctgcctggacaagaatgagctcagtgaccacttggatgctatggactccaacctggataacctgcagaccatgctgagcagccacggcttcagcgtggacaccagtgccctgctggacctgttcagcccctcggtgaccgtgcccgacatgagcctgcctgaccttgacagcagcctggccagtgtgcgtaggcgggcggggggtgagggggaacgagaccagcgggagtgctcacaataccgtctccaccccacagatccaagagctcctgtctccccaggagccccccaggcctcccgaggcagagaacagcagcccggattcagggaagcagctggtgcactacacagcgcagccgctgttcctgctggaccccggctccgtggacaccgggagcaacgacctgccggtgctgtttgagctgggagagggctcctacttctccgaaggggacggcttcgccgaggaccccaccatctccctgctgacaggctcggagcctcccaaagccaaggaccccactgtctcctagaggccccggaggagctgggccagccgcccacccccacccccagtgcagggctggtcttggggaggcagggcagcctcgcggtcttgggcactggtgggtcggccgccatagccccagtaggacaaacgggctcgggtctgggcagcacctctggtcaggagggtcaccctggcctgccagtctgccttcccccaaccccgtgtcctgtggtttggttggggcttcacagccacacctggactgaccctgcaggttgttcatagtcagaattgtattttggatttttacacaactgtcccgttccccgctccacagagatacacagatatatacacacagtggatggacggacaagacaggcagagatctataaacagacaggctctatgcta

SEQ ID NO: 5886 - protein, 305 aa, Homo sapiens
MLNDSGSAHSMPKYSRQFSLEHVHGSGPYSAPSPAYSSSSLYAPDAVASSGPIISDITELAPASPMASPGGSIDERPLSSSPLVRVKEEPPSPPQSPRVEEASPGRPSSVDTLLSPTALIDSILRESEPAPASVTALTDARGHTDTEGRPPSPPPTSTPEKCLSVACLDKNELSDHLDAMDSNLDNLQTMLSSHGFSVDTSALLDLFSPSVTVPDMSLPDLDSSLASVRRRAGGEGERDQRECSQYRLHPTDPRAPVSPGAPQASRGREQQPGFREAAGALHSAAAVPAGPRLRGHREQRPAGAV

SEQ ID NO: 5887 - DNA, 935 bp, Homo sapiens
ccaggggccacacggacaccgagggccggcctccctcccccccgcccacctccacccctgaaaagtgcctcagcgtagcctgcctggacaagaatgagctcagtgaccacttggatgctatggactccaacctggataacctgcagaccatgctgagcagccacggcttcagcgtggacaccagtgccctgctggacctgttcagcccctcggtgaccgtgcccgacatgagcctgcctgaccttgacagcagcctggccagtatccaagagctcctgtctccccaggagccccccaggcctcccgaggcagagaacagcagcccggattcagggaagcagctggtgcactacacagcgcagccgctgttcctgctggaccccggctccgtggacaccgggagcaacgacctgccggtgctgtttgagctgggagagggctcctacttctccgaaggggacggcttcgccgaggaccccaccatctccctgctgacaggctcggagcctcccaaagccaaggaccccactgtctcctagaggccccggaggagctgggccagccgcccacccccacccccagtgcagggctggtcttggggaggcagggcagcctcgcggtcttgggcactggtgggtcggccgccatagccccagtaggacaaacgggctcgggtctgggcagcacctctggtcaggagggtcaccctggcctgccagtctgccttcccccaaccccgtgtcctgtggtttggttggggcttcacagccacacctggactgaccctgcaggttgttcatagtcagaattgtattttggatttttacacaactgtcccgttccccgctccacagagatacacagatatatacacacagtggatggacggacaagacaggcagagatctataaacagacaggctctatgctatggc

SEQ ID NO: 5888 - protein, 139 aa, Homo sapiens [sequence omitted]

SEQ ID NO: 5889 - DNA, 1722 bp, Homo sapiens
gtatcttgcagtttggctcgcactccacagatgtctagggtcgcccgcctcttcccctgcccctcttcctctccgcatggccaagtccagccagggttagcgctgaccccactggggagggaggagggctctgccagcgctcgggccctcccacacagccgtggaccagacccagcctggccgggcatgagcgtcgggcctgggcggcagcagccgagacccctctgtggcgggggctcagtgtcgtcatggctcccctggccacgggcctgtggtcattgcctgtgacagggatgacagggacaggcctccctgctctggcacggcctctggtgttggcaggatccagactgcggtgctgactgcacttcctgtcaggcagggtctccagggcacctctgggacccagcctggctgtccgtcccatagcccaggtgtgccctgtggcctagggctttcttggtcacagccaccagaccgtgggtctcatccccacagcagcaccagggcagggactgagccacccacacactgagcagagccccacctgttttcccagtgcaacgggaaacctcaccaaccctgaacactgaaatccctgatccttgtgctggagctgaatacgccccttgtctcctgggtccactgccaccaaggcccccaggccctcatggcaaagggatgcccagcataggcccagccgcacccctgcagggcacagagcctccactgccttccaggccgtcctcgaatgcgctgccccctccagcctgtgcaggcgtacacgggggtgcagcctggggggtacagtcaaggggagcccttctcccacaggagggcattggggtgtggggcctggggcactggttcaggtaccgccttatcccgggccaggaatgagctcagtgaccacttggatgctatggactccaacctggataacctgcagaccatgctgagcagccacggcttcagcgtggacaccagtgccctgctggacctgttcagcccctcggtgaccgtgcccgacatgagcctgcctgaccttgacagcagcctggccagtgtgcgtaggcgggcggggggtgagggggaacgagcagagaacagcagcccggattcagggaagcagctggtgcactacacagcgcagccgctgttcctgctggaccccggctccgtggacaccgggagcaacgacctgccggtgctgtttgagctgggagagggctcctacttctccgaaggggacggcttcgccgaggaccccaccatctccctgctgacaggctcggagcctcccaaagccaaggaccccactgtctcctagaggccccggaggagctgggccagccgcccacccccacccccagtgcagggctggtcttggggaggcagggcagcctcgcggtcttgggcactggtgggtcggccgccatagccccagtaggacaaacgggctcgggtctgggcagcacctctggtcaggagggtcaccctggcctgccagtctgccttcccccaaccccgtgtcctgtggtttggttggggcttcacagccacacctggactgaccctgcaggttgttcatagtcagaattgtattttggatttttacacaactgtcccgttccccgctccacagagatacacagatatatacacacagtggatggacggacaagacaggcagagatctataaacagacaggctctatgcta

SEQ ID NO: 5890 - protein, 192 aa, Homo sapiens
MRCPLQPVQAYTGVQPGGYSQGEPFSHRRALGCGAWGTGSGTALSRARNELSDHLDAMDSNLDNLQTMLSSHGFSVDTSALLDLFSPSVTVPDMSLPDLDSSLASVRRRAGGEGERAENSSPDSGKQLVHYTAQPLFLLDPGSVDTGSNDLPVLFELGEGSYFSEGDGFAEDPTISLLTGSEPPKAKDPTVS

SEQ ID NO: 5891 - DNA, 1163 bp, Homo sapiens
ggcacagagcctccactgccttccaggccgtcctcgaatgcgctgccccctccagcctgtgcaggcgtacacgggggtgcagcctggggggtacagtcaaggggagcccttctcccacaggagggcattggggtgtggggcctggggcactggttcaggtaccgccttatcccgggccaggaatgagctcagtgaccacttggatgctatggactccaacctggataacctgcagaccatgctgagcagccacggcttcagcgtggacaccagtgccctgctggacctgttcagcccctcggtgaccgtgcccgacatgagcctgcctgaccttgacagcagcctggccagtgtgcgtaggcgggcggggggtgagggggaacgagaccagcgggagtgctcacaataccgtctccaccccacagatccaagagctcctgtctccccaggagccccccaggcctcccgaggcagagaacagcagcccggattcaggtgagccaagtcccaccggccccacctctgcccccaaccccccaccgccttgacacccccacccccgcagggaagcagctggtgcactacacagcgcagccgctgttcctgctggaccccggctccgtggacaccgggagcaacgacctgccggtgctgtttgagctgggagagggctcctacttctccgaaggggacggcttcgccgaggaccccaccatctccctgctgacaggctcggagcctcccaaagccaaggaccccactgtctcctagaggccccggaggagctgggccagccgcccacccccacccccagtgcagggctggtcttggggaggcagggcagcctcgcggtcttgggcactggtgggtcggccgccatagccccagtaggacaaacgggctcgggtctgggcagcacctctggtcaggagggtcaccctggcctgccagtctgccttcccccaaccccgtgtcctgtggtttggttggggcttcacagccacacctggactgaccctgcaggttgttcatagtcagaattgtattttggatttttacacaactgtcccgttccccgctccacagagatacacagatatatacacacagtggatggacggacaagacaggcagagatctataaacagacaggctctatgcta

SEQ ID NO: 5892 - protein, 153 aa, Homo sapiens [sequence omitted]

SEQ ID NO: 5893 - DNA, 863 bp, Homo sapiens
ccactgcccagcgcaggcccccttcccttcctccaccaggctgagtggagaaccctaaagctacgggacaggctcccgttccccgtgcctacacagggtgctggctctggcagaaagacagtgtgcccgccccgcatcacctgtccgagtgcgaacaccttgggaagggggttcctggtggtcctgtgacaaccagagacccccagggccaaggaggccactgcagcccggcccttctgtgccctgggcccctcctcattgcagcaccacccaccgcaccaccctgggacagaggaaacacatggaggccatagcatagagcctgtctgtttatagatctctgcctgtcttgtccgtccatccactgtgtgtatatatctgtgtatctctgtggagcggggaacgggacagttgtgtaaaaatccaaaatacaattctgactatgaacaacctgcagggtcagtccaggtgtggctgtgaagccccaaccaaaccacaggacacggggttgggggaaggcagactggcaggccagggtgaccctcctgaccagaggtgctgcccagacccgagcccgtttgtcctactggggctatggcggccgacccaccagtgcccaagaccgcgaggctgccctgcctccccaagaccagccctgcactgggggtgggggtgggcggctggcccagctcctccggggcctctaggagacagtggggtccttggctttgggaggctccgagcctgtcagcagggagatggtggggtcctcggcgaagccgtccccttcggagaagtaggagccctctcccagctcaaacagcaccggcaggtcgttgctcccggtgtccacggagccgggg

SEQ ID NO: 5894 - protein, 139 aa, Homo sapiens
MNNLQGQSRCGCEAPTKPQDTGLGEGRLAGQGDPPDQRCCPDPSPFVLLGLWRPTHQCPRPRGCPASPRPALHWGWGWAAGPAPPGPLGDSGVLGFGRLRACQQGDGGVLGEAVPFGEVGALSQLKQHRQVVAPGVHGA

SEQ ID NO: 5895 - DNA, 4368 bp, Homo sapiens
cgcctcaggtcggccgcggactacaaatggacgagagaggcggccgtccattagttagcggctccggagcaacgcagccgttgtccttgaggccgacgggcctgacgcgggcgggttgaacgcgctggtgaggcggtcacccgggctacggcggccggcagggggcagtggcggccgttgtctagggcccggaggtggggccgcgcgcctcgggcgctacgaacccggcaggcccacgcttggctgcggccgggtgcgggctgaggccatgggcgaccgcggcagctcccggcgccggaggacagggtcgcggccctcgagccacggcggcggcgggcctgcggcggcggaagaggaggtgcgggacgccgctgcgggccccgacgtgggagccgcgggggacgcgccagccccggcccccaacaaggacggagacgccggcgtgggcagcggccactgggagctgaggtgccatcgcctgcaggattctttattcagctctgacagtggcttcagcaactaccgtggcatcctgaactggtgtgtggtgatgctgatcttgagcaatgcccggttatttctggagaacctcatcaagtatggcatcctggtggaccccatccaggtggtttctctgttcctgaaggatccctatagctggcccgccccatgcctggttattgcggccaatgtctttgctgtggctgcattccaggttgagaagcgcctggcggtgggtgccctgacggagcaggcgggactgctgctgcacgtggccaacctggccaccattctgtgtttcccagcggctgtggtcttactggttgagtctatcactccagtgggctccctgctggcgctgatggcgcacaccatcctcttcctcaagctcttctcctaccgcgacgtcaactcatggtgccgcagggccagggccaaggctggtgaggggctgccaggggctggggctgcctgctggggggctgggcagcagcagggccccaccagccccctcccactctgctgtgctcgtagcctctgcagggaagaaggccagcagtgctgctgccccgcacaccgtgagctacccggacaatctgacctaccgcgatctctactacttcctcttcgcccccaccttgtgctacgagctcaactttccccgctctccccgcatccggaagcgctttctgctgcgacggatccttgagatgctgttcttcacccagctccaggtggggctgatccagcagtggatggtccccaccatccagaactccatgaagcccttcaaggtgagtggctcaggtgctcttgcagctggggtggctggggagtgaccaggagcatggctagctgaagggcttgtttctgcaggacatggactactcacgcatcatcgagcgcctcctgaagctggcggtccccaatcacctcatctggctcatcttcttctactggctcttccactcctgcctgaatgccgtggctgagctcatgcagtttggagaccgggagttctaccgggactggtggaactccgagtctgtcacctacttctggcagaactggaacatccctgtgcacaagtggtgcatcaggtaggtggggtgtgtgtgtgtgtgatgtggaacatggctgtgaacctgaaccgctttccatgccccctcctctgcagacacttctacaagcccatgcttcgacggggcagcagcaagtggatggccaggacaggggtgttcctggcctcggccttcttccacgagtacctggtgagcgtccctctgcgaatgttccgcctctgggcgttcacgggcatgatggctcagatcccactggcctggttcgtgggccgctttttccagggcaactatggcaacgcagctgtgtggctgtcgctcatcatcggacagccaatagccgtcctcatgtacgtccacgactactacgtgctcaactatgaggccccagcggcagaggcctgagctgcacctgagggcctggcttctcactgccacctcacacccgctgccagagcccacctctcctcctaggcctcgagtgctggggatgggcctggctgcacagcatcctcctctggtcccagggaggcctctctgcccctatggggctctgtcctgcacccctcagggatggcgacagcaggccagacacagtctgatgccagctgggagtcttgctgaccctgccccgggtccgagggtgtcaataaagtgctgtccagtgacctcttcagcctgccaggggcctggggcctggtggggggtatggccacacccacaagggcgagtgccagagctgtgtggacagctgtcccaggacctgccggggagcagcagctccactgcagcagggcgggcatggccggtagggggagtgcaaggccaggcagacgcccccattccccacactcccctacctagaaaagctcagctcaggcgtcctctcctggtgctactcctgctgggtgtgcgggaatcggcactctggccctcagtgcaggatggtcaacttgcacccaccgtgctcagcttcagcttgggaagaggtcggccctgggtttgcgggaagtgggctccagccaggatggcccagggatgggcagtccacagggcctttctggtgtgggtctggtgagccgaggggctacggtacacaatggctatgtccatggctattcgccttggggcagggctcggtttggcagcctctttccttcacttggaacctgggcagccaggtgggctggtggctctcagctgccctccacgaggttggggcacccctgatccccaggcctgccttgccctctgctcttctggcaccaggctgggcagtgcagacagcgcagccctgcagccttcaggacaccttgttcccaggccctgcaatccaccaagctggatagatggggccccccttgatggtagcgggaggtcaggggtaaccccagggccctgctgctgccttaccttgctggggtgactgcttgattaaagaccccaagactggaccaggccctggtgtccccagacctgcagctatggcccaacaaggcaggtgtttgaggaggccctgcacagggtcccaggactgcaccaggggcctcatcagcaacctgctgaactggtggtgtgaggggagggtgggctcccttggtggtatcctccctctaccccagtgggggctggtgggccctgagatggaggcatctccttgggccctgctgaggatggcagtagtgggtgagctcctggtggggggatgggtgtggggccgactcctccatcccacatgggctcctgtgcctctccctatcagttggccagtggagctcgagaacaaactgttgctgccagataaagcagcaaagcctgctccactgcccagcgcaggcccccttcccttcctccaccaggctgagtggagaaccctaaagctacgggacaggctcccgttccccgtgcctacacagggtgctggctctggcagaaagacagtgtgcccgccccgcatcacctgtccgagtgcgaacaccttgggaagggggttcctggtggtcctgtgacaaccagagacccccagggccaaggtgaggcgcccacccctggtccctcaataaagaactgcaagcacatgctggtcctggggagtcgggcaggcacggagctagctgcaagcatccgtcttcccccaggaggccactgcagcccggcccttctgtgccctgggcccctcctcattgcagcaccacccaccgcaccaccctgggacagaggaaacacatggaggccatagcatagagcctgtctgtttatagatctctgcctgtcttgtccgtccatccactgtgtgtatatatctgtgtatctctgtggagcggggaacgggacagttgtgtaaaaatccaaaatacaattctgactatgaacaacctgcagggtcagtccaggtgtggctgtgaagccccaaccaaaccacaggacacggggttgggggaaggcagactggcaggccagggtgaccctcctgaccagaggtgctgcccagacccgagcccgtttgtcctactggggctatggcggccgacccaccagtgcccaagaccgcgaggctgccctgcctccccaagaccagccctgcactgggggtgggggtgggcggctggcccagctcctccggggcctctaggagacagtggggtccttggctttgggaggctccgagcctgtcagcagggagatggtggggtcctcggcgaagccgtccccttcggagaagtaggagccctctcccagctcaaacagcaccggcaggtcgttgctcccggtgtccacggagccgggg

SEQ ID NO: 5896 - protein, 313 aa, Homo sapiens [sequence omitted]

SEQ ID NO: 5897 - DNA, 4118 bp, Homo sapiens
cgcctcaggtcggccgcggactacaaatggacgagagaggcggccgtccattagttagcggctccggagcaacgcagccgttgtccttgaggccgacgggcctgacgcgggcgggttgaacgcgctggtgaggcggtcacccgggctacggcggccggcagggggcagtggcggccgttgtctagggcccggaggtggggccgcgcgcctcgggcgctacgaacccggcaggcccacgcttggctgcggccgggtgcgggctgaggccatgggcgaccgcggcagctcccggcgccggaggacagggtcgcggccctcgagccacggcggcggcgggcctgcggcggcggaagaggaggtgcgggacgccgctgcgggccccgacgtgggagccgcgggggacgcgccagccccggcccccaacaaggacggagacgccggcgtgggcagcggccactgggagctgaggtgccatcgcctgcaggattctttattcagctctgacagtggcttcagcaactaccgtggcatcctgaactggtgtgtggtgatgctgatcttgagcaatgcccggttatttctggagaacctcatcaagtatggcatcctggtggaccccatccaggtggtttctctgttcctgaaggatccctatagctggcccgccccatgcctggttattgcggccaatgtctttgctgtggctgcattccaggttgagaagcgcctggcggtgggtgccctgacggagcaggcgggactgctgctgcacgtggccaacctggccaccattctgtgtttcccagcggctgtggtcttactggttgagtctatcactccagtgggctccctgctggcgctgatggcgcacaccatcctcttcctcaagctcttctcctaccgcgacgtcaactcatggtgccgcagggccagggccaaggctgcctctgcagggaagaaggccagcagtgctgctgccccgcacaccgtgagctacccggacaatctgacctaccgcgatctctactacttcctcttcgcccccaccttgtgctacgagctcaactttccccgctctccccgcatccggaagcgctttctgctgcgacggatccttgagatgctgttcttcacccagctccaggtggggctgatccagcagtggatggtccccaccatccagaactccatgaagcccttcaaggacatggactactcacgcatcatcgagcgcctcctgaagctggcggtccccaatcacctcatctggctcatcttcttctactggctcttccactcctgcctgaatgccgtggctgagctcatgcagtttggagaccgggagttctaccgggactggtggaactccgagtctgtcacctacttctggcagaactggaacatccctgtgcacaagtggtgcatcagacacttctacaagcccatgcttcgacggggcagcagcaagtggatggccaggacaggggtgttcctggcctcggccttcttccacgagtacctggtgagcgtccctctgcgaatgttccgcctctgggcgttcacgggcatgatggctcagatcccactggcctggttcgtgggccgctttttccagggcaactatggcaacgcagctgtgtggctgtcgctcatcatcggacagccaatagccgtcctcatgtacgtccacgactactacgtgctcaactatgaggccccagcggcagaggcctgagctgcacctgagggcctggcttctcactgccacctcacacccgctgccagagcccacctctcctcctaggcctcgagtgctggggatgggcctggctgcacagcatcctcctctggtcccagggaggcctctctgcccctatggggctctgtcctgcacccctcagggatggcgacagcaggccagacacagtctgatgccagctgggagtcttgctgaccctgccccgggtccgagggtgtcaataaagtgctgtccagtgacctcttcagcctgccaggggcctggggcctggtggggggtatggccacacccacaagggcgagtgccagagctgtgtggacagctgtcccaggacctgccggggagcagcagctccactgcagcagggcgggcatggccggtagggggagtgcaaggccaggcagacgcccccattccccacactcccctacctagaaaagctcagctcaggcgtcctctcctggtgctactcctgctgggtgtgcgggaatcggcactctggccctcagtgcaggatggtcaacttgcacccaccgtgctcagcttcagcttgggaagaggtcggccctgggtttgcgggaagtgggctccagccaggatggcccagggatgggcagtccacagggcctttctggtgtgggtctggtgagccgaggggctacggtacacaatggctatgtccatggctattcgccttggggcagggctcggtttggcagcctctttccttcacttggaacctgggcagccaggtgggctggtggctctcagctgccctccacgaggttggggcacccctgatccccaggcctgccttgccctctgctcttctggcaccaggctgggcagtgcagacagcgcagccctgcagccttcaggacaccttgttcccaggccctgcaatccaccaagctggatagatggggccccccttgatggtagcgggaggtcaggggtaaccccagggccctgctgctgccttaccttgctggggtgactgcttgattaaagaccccaagactggaccaggccctggtgtccccagacctgcagctatggcccaacaaggcaggtgtttgaggaggccctgcacagggtcccaggactgcaccaggggcctcatcagcaacctgctgaactggtggtgtgaggggagggtgggctcccttggtggtatcctccctctaccccagtgggggctggtgggccctgagatggaggcatctccttgggccctgctgaggatggcagtagtgggtgagctcctggtggggggatgggtgtggggccgactcctccatcccacatgggctcctgtgcctctccctatcagttggccagtggagctcgagaacaaactgttgctgccagataaagcagcaaagcctgctccactgcccagcgcaggcccccttcccttcctccaccaggctgagtggagaaccctaaagctacgggacaggctcccgttccccgtgcctacacagggtgctggctctggcagaaagacagtgtgcccgccccgcatcacctgtccgagtgcgaacaccttgggaagggggttcctggtggtcctgtgacaaccagagacccccagggccaaggtgaggcgcccacccctggtccctcaataaagaactgcaagcacatgctggtcctggggagtcgggcaggcacggagctagctgcaagcatccgtcttcccccaggaggccactgcagcccggcccttctgtgccctgggcccctcctcattgcagcaccacccaccgcaccaccctgggacagaggaaacacatggaggccatagcatagagcctgtctgtttatagatctctgcctgtcttgtccgtccatccactgtgtgtatatatctgtgtatctctgtggagcggggaacgggacagttgtgtaaaaatccaaaatacaattctgactatgaacaacctgcagggtcagtccaggtgtggctgtgaagccccaaccaaaccacaggacacggggttgggggaaggcagactggcaggccagggtgaccctcctgaccagaggtgctgcccagacccgagcccgtttgtcctactggggctatggcggccgacccaccagtgcccaagaccgcgaggctgccctgcctccccaagaccagccctgcactgggggtgggggtgggcggctggcccagctcctccggggcctctaggagacagtggggtccttggctttgggaggctccgagcctgtcagcagggagatggtggggtcctcggcgaagccgtccccttcggagaagtaggagccctctcccagctcaaacagcaccggcaggtcgttgctcccggtgtccacggagccgggg

SEQ ID NO: 5898 - protein, 488 aa, Homo sapiens; identical to SEQ ID NO: 791

SEQ ID NO: 5899 - DNA, 4277 bp, Homo sapiens
cgcctcaggtcggccgcggactacaaatggacgagagaggcggccgtccattagttagcggctccggagcaacgcagccgttgtccttgaggccgacgggcctgacgcgggcgggttgaacgcgctggtgaggcggtcacccgggctacggcggccggcagggggcagtggcggccgttgtctagggcccggaggtggggccgcgcgcctcgggcgctacgaacccggcaggcccacgcttggctgcggccgggtgcgggctgaggccatgggcgaccgcggcagctcccggcgccggaggacagggtcgcggccctcgagccacggcggcggcgggcctgcggcggcggaagaggaggtgcgggacgccgctgcgggccccgacgtgggagccgcgggggacgcgccagccccggcccccaacaaggacggagacgccggcgtgggcagcggccactgggagctgaggtgccatcgcctgcaggattctttattcagctctgacagtggcttcagcaactaccgtggcatcctgaactggtgtgtggtgatgctgatcttgagcaatgcccggttatttctggagaacctcatcaagtatggcatcctggtggaccccatccaggtggtttctctgttcctgaaggatccctatagctggcccgccccatgcctggttattgcggccaatgtctttgctgtggctgcattccaggttgagaagcgcctggcggtgggtgccctgacggagcaggcgggactgctgctgcacgtggccaacctggccaccattctgtgtttcccagcggctgtggtcttactggttgagtctatcactccagtgggctccctgctggcgctgatggcgcacaccatcctcttcctcaagctcttctcctaccgcgacgtcaactcatggtgccgcagggccagggccaaggctgcctctgcagggaagaaggccagcagtgctgctgccccgcacaccgtgagctacccggacaatctgacctaccgcgatctctactacttcctcttcgcccccaccttgtgctacgagctcaactttccccgctctccccgcatccggaagcgctttctgctgcgacggatccttgagatgctgttcttcacccagctccaggtggggctgatccagcagtggatggtccccaccatccagaactccatgaagcccttcaaggtgagtggctcaggtgctcttgcagctggggtggctggggagtgaccaggagcatggctagctgaagggcttgtttctgcaggacatggactactcacgcatcatcgagcgcctcctgaagctggcggtccccaatcacctcatctggctcatcttcttctactggctcttccactcctgcctgaatgccgtggctgagctcatgcagtttggagaccgggagttctaccgggactggtggaactccgagtctgtcacctacttctggcagaactggaacatccctgtgcacaagtggtgcatcaggtaggtggggtgtgtgtgtgtgtgatgtggaacatggctgtgaacctgaaccgctttccatgccccctcctctgcagacacttctacaagcccatgcttcgacggggcagcagcaagtggatggccaggacaggggtgttcctggcctcggccttcttccacgagtacctggtgagcgtccctctgcgaatgttccgcctctgggcgttcacgggcatgatggctcagatcccactggcctggttcgtgggccgctttttccagggcaactatggcaacgcagctgtgtggctgtcgctcatcatcggacagccaatagccgtcctcatgtacgtccacgactactacgtgctcaactatgaggccccagcggcagaggcctgagctgcacctgagggcctggcttctcactgccacctcacacccgctgccagagcccacctctcctcctaggcctcgagtgctggggatgggcctggctgcacagcatcctcctctggtcccagggaggcctctctgcccctatggggctctgtcctgcacccctcagggatggcgacagcaggccagacacagtctgatgccagctgggagtcttgctgaccctgccccgggtccgagggtgtcaataaagtgctgtccagtgacctcttcagcctgccaggggcctggggcctggtggggggtatggccacacccacaagggcgagtgccagagctgtgtggacagctgtcccaggacctgccggggagcagcagctccactgcagcagggcgggcatggccggtagggggagtgcaaggccaggcagacgcccccattccccacactcccctacctagaaaagctcagctcaggcgtcctctcctggtgctactcctgctgggtgtgcgggaatcggcactctggccctcagtgcaggatggtcaacttgcacccaccgtgctcagcttcagcttgggaagaggtcggccctgggtttgcgggaagtgggctccagccaggatggcccagggatgggcagtccacagggcctttctggtgtgggtctggtgagccgaggggctacggtacacaatggctatgtccatggctattcgccttggggcagggctcggtttggcagcctctttccttcacttggaacctgggcagccaggtgggctggtggctctcagctgccctccacgaggttggggcacccctgatccccaggcctgccttgccctctgctcttctggcaccaggctgggcagtgcagacagcgcagccctgcagccttcaggacaccttgttcccaggccctgcaatccaccaagctggatagatggggccccccttgatggtagcgggaggtcaggggtaaccccagggccctgctgctgccttaccttgctggggtgactgcttgattaaagaccccaagactggaccaggccctggtgtccccagacctgcagctatggcccaacaaggcaggtgtttgaggaggccctgcacagggtcccaggactgcaccaggggcctcatcagcaacctgctgaactggtggtgtgaggggagggtgggctcccttggtggtatcctccctctaccccagtgggggctggtgggccctgagatggaggcatctccttgggccctgctgaggatggcagtagtgggtgagctcctggtggggggatgggtgtggggccgactcctccatcccacatgggctcctgtgcctctccctatcagttggccagtggagctcgagaacaaactgttgctgccagataaagcagcaaagcctgctccactgcccagcgcaggcccccttcccttcctccaccaggctgagtggagaaccctaaagctacgggacaggctcccgttccccgtgcctacacagggtgctggctctggcagaaagacagtgtgcccgccccgcatcacctgtccgagtgcgaacaccttgggaagggggttcctggtggtcctgtgacaaccagagacccccagggccaaggtgaggcgcccacccctggtccctcaataaagaactgcaagcacatgctggtcctggggagtcgggcaggcacggagctagctgcaagcatccgtcttcccccaggaggccactgcagcccggcccttctgtgccctgggcccctcctcattgcagcaccacccaccgcaccaccctgggacagaggaaacacatggaggccatagcatagagcctgtctgtttatagatctctgcctgtcttgtccgtccatccactgtgtgtatatatctgtgtatctctgtggagcggggaacgggacagttgtgtaaaaatccaaaatacaattctgactatgaacaacctgcagggtcagtccaggtgtggctgtgaagccccaaccaaaccacaggacacggggttgggggaaggcagactggcaggccagggtgaccctcctgaccagaggtgctgcccagacccgagcccgtttgtcctactggggctatggcggccgacccaccagtgcccaagaccgcgaggctgccctgcctccccaagaccagccctgcactgggggtgggggtgggcggctggcccagctcctccggggcctctaggagacagtggggtccttggctttgggaggctccgagcctgtcagcagggagatggtggggtcctcggcgaagccgtccccttcggagaagtaggagccctctcccagctcaaacagcaccggcaggtcgttgctcccggtgtccacggagccgggg

SEQ ID NO: 5900 - protein, 326 aa, Homo sapiens
MGDRGSSRRRRTGSRPSSHGGGGPAAAEEEVRDAAAGPDVGAAGDAPAPAPNKDGDAGVGSGHWELRCHRLQDSLFSSDSGFSNYRGILNWCVVMLILSNARLFLENLIKYGILVDPIQVVSLFLKDPYSWPAPCLVIAANVFAVAAFQVEKRLAVGALTEQAGLLLHVANLATILCFPAAVVLLVESITPVGSLLALMAHTILFLKLFSYRDVNSWCRRARAKAASAGKKASSAAAPHTVSYPDNLTYRDLYYFLFAPTLCYELNFPRSPRIRKRFLLRRILEMLFFTQLQVGLIQQWMVPTIQNSMKPFKVSGSGALAAGVAGE

SEQ ID NO: 5901 - DNA, 3627 bp, Homo sapiens
aggccccgcctcaggtcggccgcggactacaaatggacgagagaggcggccgtccattagttagcggctccggagcaacgcagccgttgtccttgaggccgacgggcctgacgcgggcgggttgaacgcgctggtgaggcggtcacccgggctacggcggccggcagggggcagtggcggccgttgtctagggcccggaggtggggccgcgcgcctcgggcgctacgaacccggcaggcccacgcttggctgcggccgggtgcgggctgaggccatgggcgaccgcggcagctcccggcgccggaggacagggtcgcggccctcgagccacggcggcggcgggcctgcggcggcggaagaggaggtgcgggacgccgctgcgggccccgacgtgggagccgcgggggacgcgccagccccggcccccaacaaggacggagacgccggcgtgggcagcggccactgggagctgaggtgccatcgcctgcaggattctttattcagctctgacagtggcttcagcaactaccgtggcatcctgaactggtgtgtggtgatgctgatcttgagcaatgcccggttatttctggagaacctcatcaagtatggcatcctggtggaccccatccaggtggtttctctgttcctgaaggatccctatagctggcccgccccatgcctggttattgcggccaatgtctttgctgtggctgcattccaggttgagaagcgcctggcggtgggtgccctgacggagcaggcgggactgctgctgcacgtggccaacctggccaccattctgtgtttcccagcggctgtggtcttactggttgagtctatcactccagtgggctccctgctggcgctgatggcgcacaccatcctcttcctcaagctcttctcctaccgcgacgtcaactcatggtgccgcagggccagggccaaggctgcccatgcttcgacggggcagcagcaagtggatggccaggacaggggtgttcctggcctcggccttcttccacgagtacctggtgagcgtccctctgcgaatgttccgcctctgggcgttcacgggcatgatggctcagatcccactggcctggttcgtgggccgctttttccagggcaactatggcaacgcagctgtgtggctgtcgctcatcatcggacagccaatagccgtcctcatgtacgtccacgactactacgtgctcaactatgaggccccagcggcagaggcctgagctgcacctgagggcctggcttctcactgccacctcacacccgctgccagagcccacctctcctcctaggcctcgagtgctggggatgggcctggctgcacagcatcctcctctggtcccagggaggcctctctgcccctatggggctctgtcctgcacccctcagggatggcgacagcaggccagacacagtctgatgccagctgggagtcttgctgaccctgccccgggtccgagggtgtcaataaagtgctgtccagtgacctcttcagcctgccaggggcctggggcctggtggggggtatggccacacccacaagggcgagtgccagagctgtgtggacagctgtcccaggacctgccggggagcagcagctccactgcagcagggcgggcatggccggtagggggagtgcaaggccaggcagacgcccccattccccacactcccctacctagaaaagctcagctcaggcgtcctctcctggtgctactcctgctgggtgtgcgggaatcggcactctggccctcagtgcaggatggtcaacttgcacccaccgtgctcagcttcagcttgggaagaggtcggccctgggtttgcgggaagtgggctccagccaggatggcccagggatgggcagtccacagggcctttctggtgtgggtctggtgagccgaggggctacggtacacaatggctatgtccatggctattcgccttggggcagggctcggtttggcagcctctttccttcacttggaacctgggcagccaggtgggctggtggctctcagctgccctccacgaggttggggcacccctgatccccaggcctgccttgccctctgctcttctggcaccaggctgggcagtgcagacagcgcagccctgcagccttcaggacaccttgttcccaggccctgcaatccaccaagctggatagatggggccccccttgatggtagcgggaggtcaggggtaaccccagggccctgctgctgccttaccttgctggggtgactgcttgattaaagaccccaagactggaccaggccctggtgtccccagacctgcagctatggcccaacaaggcaggtgtttgaggaggccctgcacagggtcccaggactgcaccaggggcctcatcagcaacctgctgaactggtggtgtgaggggagggtgggctcccttggtggtatcctccctctaccccagtgggggctggtgggccctgagatggaggcatctccttgggccctgctgaggatggcagtagtgggtgagctcctggtggggggatgggtgtggggccgactcctccatcccacatgggctcctgtgcctctccctatcagttggccagtggagctcgagaacaaactgttgctgccagataaagcagcaaagcctgctccactgcccagcgcaggcccccttcccttcctccaccaggctgagtggagaaccctaaagctacgggacaggctcccgttccccgtgcctacacagggtgctggctctggcagaaagacagtgtgcccgccccgcatcacctgtccgagtgcgaacaccttgggaagggggttcctggtggtcctgtgacaaccagagacccccagggccaaggtgaggcgcccacccctggtccctcaataaagaactgcaagcacatgctggtcctggggagtcgggcaggcacggagctagctgcaagcatccgtcttcccccaggaggccactgcagcccggcccttctgtgccctgggcccctcctcattgcagcaccacccaccgcaccaccctgggacagaggaaacacatggaggccatagcatagagcctgtctgtttatagatctctgcctgtcttgtccgtccatccactgtgtgtatatatctgtgtatctctgtggagcggggaacgggacagttgtgtaaaaatccaaaatacaattctgactatgaacaacctgcagggtcagtccaggtgtggctgtgaagccccaaccaaaccacaggacacggggttgggggaaggcagactggcaggccagggtgaccctcctgaccagaggtgctgcccagacccgagcccgtttgtcctactggggctatggcggccgacccaccagtgcccaagaccgcgaggctgccctgcctccccaagaccagccctgcactgggggtgggggtgggcggctggcccagctcctccggggcctctaggagacagtggggtccttggctttgggaggctccgagcctgtcagcagggagatggtggggtcctcggcgaagccgtccccttcggagaagtaggagccctctcccagctcaaacagcaccggcaggtcgttgctcccggtgtccacggagccgggg

SEQ ID NO: 5902 - protein, 315 aa, Homo sapiens
MGDRGSSRRRRTGSRPSSHGGGGPAAAEEEVRDAAAGPDVGAAGDAPAPAPNKDGDAGVGSGHWELRCHRLQDSLFSSDSGFSNYRGILNWCVVMLILSNARLFLENLIKYGILVDPIQVVSLFLKDPYSWPAPCLVIAANVFAVAAFQVEKRLAVGALTEQAGLLLHVANLATILCFPAAVVLLVESITPVGSLLALMAHTILFLKLFSYRDVNSWCRRARAKAAHASTGQQQVDGQDRGVPGLGLLPRVPGERPSANVPPLGVHGHDGSDPTGLVRGPLFPGQLWQRSCVAVAHHRTANSRPHVRPRLLRAQL

SEQ ID NO: 5903 - DNA, 315 bp, Homo sapiens
ggggctgatccagcaggtaagtggggtagggcagggttgggtgtagctgggcatggtgtgaagccccaaccaaaccacaggacacggggttgggggaaggcagactggcaggccagggtgaccctcctgaccagaggtgctgcccagacccgagcccgtttgtcctactggggctatggcggccgacccaccagtgcccaagaccgcgaggctgccctgcctccccaagaccagccctgcactgggggtgggggtgggcggctggcccagctcctccggggcctctaggagacagtggggtccttggctttggga

SEQ ID NO: 5904 - protein, 45 aa, Homo sapiens
MAADPPVPKTARLPCLPKTSPALGVGVGGWPSSSGASRRQWGPWL

SEQ ID NO: 5905 - DNA, 3862 bp, Homo sapiens
cgcctcaggtcggccgcggactacaaatggacgagagaggcggccgtccattagttagcggctccggagcaacgcagccgttgtccttgaggccgacgggcctgacgcgggcgggttgaacgcgctggtgaggcggtcacccgggctacggcggccggcagggggcagtggcggccgttgtctagggcccggaggtggggccgcgcgcctcgggcgctacgaacccggcaggcccacgcttggctgcggccgggtgcgggctgaggccatgggcgaccgcggcagctcccggcgccggaggacagggtcgcggccctcgagccacggcggcggcgggcctgcggcggcggaagaggaggtgcgggacgccgctgcgggccccgacgtgggagccgcgggggacgcgccagccccggcccccaacaaggacggagacgccggcgtgggcagcggccactgggagctgaggtgccatcgcctgcaggattctttattcagctctgacagtggcttcagcaactaccgtggcatcctgaactggtgtgtggtgatgctgatcttgagcaatgcccggttatttctggagaacctcatcaagtatggcatcctggtggaccccatccaggtggtttctctgttcctgaaggatccctatagctggcccgccccatgcctggttattgcggccaatgtctttgctgtggctgcattccaggttgagaagcgcctggcggtgggtgccctgacggagcaggcgggactgctgctgcacgtggccaacctggccaccattctgtgtttcccagcggctgtggtcttactggttgagtctatcactccagtgggctccctgctggcgctgatggcgcacaccatcctcttcctcaagctcttctcctaccgcgacgtcaactcatggtgccgcagggccagggccaaggctgcctctgcagggaagaaggccagcagtgctgctgccccgcacaccgtgagctacccggacaatctgacctaccgcgatctctactacttcctcttcgcccccaccttgtgctacgagctcaactttccccgctctccccgcatccggaagcgctttctgctgcgacggatccttgagatgctgttcttcacccagctccaggtggggctgatccagcagtggatggtccccaccatccagaactccatgaagcccttcaaggtgagtggctcaggtgctcttgcagctggggtggctggggagtgaccaggagcatggctagctgaagggcttgtttctgcaggacatggactactcacgcatcatcgagcgcctcctgaagctggcggtccccaatcacctcatctggctcatcttcttctactggctcttccactcctgcctgaatgccgtggctgagctcatgcagtttggagaccgggagttctaccgggactggtggaactccgagtctgtcacctacttctggcagaactggaacatccctgtgcacaagtggtgcatcaggtaggtggggtgtgtgtgtgtgtgatgtggaacatggctgtgaacctgaaccgctttccatgccccctcctctgcagacacttctacaagcccatgcttcgacggggcagcagcaagtggatggccaggacaggggtgttcctggcctcggccttcttccacgagtacctggtgagcgtccctctgcgaatgttccgcctctgggcgttcacgggcatgatggctcagatcccactggcctggttcgtgggccgctttttccagggcaactatggcaacgcagctgtgtggctgtcgctcatcatcggacagccaatagccgtcctcatgtacgtccacgactactacgtgctcaactatgaggccccagcggcagaggcctgagctgcacctgagggcctggcttctcactgccacctcacacccgctgccagagcccacctctcctcctaggcctcgagtgctggggatgggcctggctgcacagcatcctcctctggtcccagggaggcctctctgcccctatggggctctgtcctgcacccctcagggatggcgacagcaggccagacacagtctgatgccagctgggagtcttgctgaccctgccccgggtccgagggtgtcaataaagtgctgtccagtgacctcttcagcctgccaggggcctggggcctggtggggggtatggccacacccacaagggcgagtgccagagctgtgtggacagctgtcccaggacctgccggggagcagcagctccactgcagcagggcgggcatggccggtagggggagtgcaaggccaggcagacgcccccattccccacactcccctacctagaaaagctcagctcaggcgtcctctcctggtgctactcctgctgggtgtgcgggaatcggcactctggccctcagtgcaggatggtcaacttgcacccaccgtgctcagcttcagcttgggaagaggtcggccctgggtttgcgggaagtgggctccagccaggatggcccagggatgggcagtccacagggcctttctggtgtgggtctggtgagccgaggggctacggtacacaatggctatgtccatggctattcgccttggggcagggctcggtttggcagcctctttccttcacttggaacctgggcagccaggtgggctggtggctctcagctgccctccacgaggttggggcacccctgatccccaggcctgccttgccctctgctcttctggcaccaggctgggcagtgcagacagcgcagccctgcagccttcaggacaccttgttcccaggccctgcaatccaccaagctggatagatggggccccccttgatggtagcgggaggtcaggggtaaccccagggccctgctgctgccttaccttgctggggtgactgcttgattaaagaccccaagactggaccaggccctggtgtccccagacctgcagctatggcccaacaaggcaggtgtttgaggaggccctgcacagggtcccaggactgcaccaggggcctcatcagcaacctgctgaactggtggtgtgaggggagggtgggctcccttggtggtatcctccctctaccccagtgggggctggtgggccctgagatggaggcatctccttgggccctgctgaggatggcagtagtgggtgagctcctggtggggggatgggtgtggggccgactcctccatcccacatgggctcctgtgcctctccctatcagttggccagtggagctcgagaacaaactgttgctgccagataaagcagcaaagcctgctccactgcccagcgcaggcccccttcccttcctccaccaggctgagtggagaaccctaaagctacgggacaggctcccgttccccgtgcctacacagggtgctggctctggcagaaagacagtgtgcccgccccgcatcacctgtccgagtgcgaacaccttgggaagggggttcctggtggtcctgtgacaaccagagacccccagggccaaggtgaggcgcccacccctggtccctcaataaagaactgcaagcacatgctggtcctggggagtcgggcaggcacggagctagctgcaagcatccgtcttcccccaggaggccactgcagcccggcccttctgtgccctgggcccctcctcattgcagcaccacccaccgcaccaccctgggacagaggaaacacatggaggccatagcatagagcctgtctgtttatagatctctgcctgtcttgtccgtccatccactgtgtgtatatatctgtgtatctctgtggagcggggaacgggacagttgtgtaaaaatccaaaatacaattctgactatgaac

SEQ ID NO: 5906 - protein, 326 aa, Homo sapiens; identical to SEQ ID NO: 5900

SEQ ID NO: 5907 - DNA, 3953 bp, Homo sapiens
cgcctcaggtcggccgcggactacaaatggacgagagaggcggccgtccattagttagcggctccggagcaacgcagccgttgtccttgaggccgacgggcctgacgcgggcgggttgaacgcgctggtgaggcggtcacccgggctacggcggccggcagggggcagtggcggccgttgtctagggcccggaggtggggccgcgcgcctcgggcgctacgaacccggcaggcccacgcttggctgcggccgggtgcgggctgaggccatgggcgaccgcggcagctcccggcgccggaggacagggtcgcggccctcgagccacggcggcggcgggcctgcggcggcggaagaggaggtgcgggacgccgctgcgggccccgacgtgggagccgcgggggacgcgccagccccggcccccaacaaggacggagacgccggcgtgggcagcggccactgggagctgaggtgccatcgcctgcaggattctttattcagctctgacagtggcttcagcaactaccgtggcatcctgaactggtgtgtggtgatgctgatcttgagcaatgcccggttatttctggagaacctcatcaagtatggcatcctggtggaccccatccaggtggtttctctgttcctgaaggatccctatagctggcccgccccatgcctggttattgcggccaatgtctttgctgtggctgcattccaggttgagaagcgcctggcggtgggtgccctgacggagcaggcgggactgctgctgcacgtggccaacctggccaccattctgtgtttcccagcggctgtggtcttactggttgagtctatcactccagtgggctccctgctggcgctgatggcgcacaccatcctcttcctcaagctcttctcctaccgcgacgtcaactcatggtgccgcagggccagggccaaggctggtgaggggctgccaggggctggggctgcctgctggggggctgggcagcagcagggccccaccagccccctcccactctgctgtgctcgtagcctctgcagggaagaaggccagcagtgctgctgccccgcacaccgtgagctacccggacaatctgacctaccgcgatctctactacttcctcttcgcccccaccttgtgctacgagctcaactttccccgctctccccgcatccggaagcgctttctgctgcgacggatccttgagatgctgttcttcacccagctccaggtggggctgatccagcagtggatggtccccaccatccagaactccatgaagcccttcaaggtgagtggctcaggtgctcttgcagctggggtggctggggagtgaccaggagcatggctagctgaagggcttgtttctgcaggacatggactactcacgcatcatcgagcgcctcctgaagctggcggtccccaatcacctcatctggctcatcttcttctactggctcttccactcctgcctgaatgccgtggctgagctcatgcagtttggagaccgggagttctaccgggactggtggaactccgagtctgtcacctacttctggcagaactggaacatccctgtgcacaagtggtgcatcaggtaggtggggtgtgtgtgtgtgtgatgtggaacatggctgtgaacctgaaccgctttccatgccccctcctctgcagacacttctacaagcccatgcttcgacggggcagcagcaagtggatggccaggacaggggtgttcctggcctcggccttcttccacgagtacctggtgagcgtccctctgcgaatgttccgcctctgggcgttcacgggcatgatggctcagatcccactggcctggttcgtgggccgctttttccagggcaactatggcaacgcagctgtgtggctgtcgctcatcatcggacagccaatagccgtcctcatgtacgtccacgactactacgtgctcaactatgaggccccagcggcagaggcctgagctgcacctgagggcctggcttctcactgccacctcacacccgctgccagagcccacctctcctcctaggcctcgagtgctggggatgggcctggctgcacagcatcctcctctggtcccagggaggcctctctgcccctatggggctctgtcctgcacccctcagggatggcgacagcaggccagacacagtctgatgccagctgggagtcttgctgaccctgccccgggtccgagggtgtcaataaagtgctgtccagtgacctcttcagcctgccaggggcctggggcctggtggggggtatggccacacccacaagggcgagtgccagagctgtgtggacagctgtcccaggacctgccggggagcagcagctccactgcagcagggcgggcatggccggtagggggagtgcaaggccaggcagacgcccccattccccacactcccctacctagaaaagctcagctcaggcgtcctctcctggtgctactcctgctgggtgtgcgggaatcggcactctggccctcagtgcaggatggtcaacttgcacccaccgtgctcagcttcagcttgggaagaggtcggccctgggtttgcgggaagtgggctccagccaggatggcccagggatgggcagtccacagggcctttctggtgtgggtctggtgagccgaggggctacggtacacaatggctatgtccatggctattcgccttggggcagggctcggtttggcagcctctttccttcacttggaacctgggcagccaggtgggctggtggctctcagctgccctccacgaggttggggcacccctgatccccaggcctgccttgccctctgctcttctggcaccaggctgggcagtgcagacagcgcagccctgcagccttcaggacaccttgttcccaggccctgcaatccaccaagctggatagatggggccccccttgatggtagcgggaggtcaggggtaaccccagggccctgctgctgccttaccttgctggggtgactgcttgattaaagaccccaagactggaccaggccctggtgtccccagacctgcagctatggcccaacaaggcaggtgtttgaggaggccctgcacagggtcccaggactgcaccaggggcctcatcagcaacctgctgaactggtggtgtgaggggagggtgggctcccttggtggtatcctccctctaccccagtgggggctggtgggccctgagatggaggcatctccttgggccctgctgaggatggcagtagtgggtgagctcctggtggggggatgggtgtggggccgactcctccatcccacatgggctcctgtgcctctccctatcagttggccagtggagctcgagaacaaactgttgctgccagataaagcagcaaagcctgctccactgcccagcgcaggcccccttcccttcctccaccaggctgagtggagaaccctaaagctacgggacaggctcccgttccccgtgcctacacagggtgctggctctggcagaaagacagtgtgcccgccccgcatcacctgtccgagtgcgaacaccttgggaagggggttcctggtggtcctgtgacaaccagagacccccagggccaaggtgaggcgcccacccctggtccctcaataaagaactgcaagcacatgctggtcctggggagtcgggcaggcacggagctagctgcaagcatccgtcttcccccaggaggccactgcagcccggcccttctgtgccctgggcccctcctcattgcagcaccacccaccgcaccaccctgggacagaggaaacacatggaggccatagcatagagcctgtctgtttatagatctctgcctgtcttgtccgtccatccactgtgtgtatatatctgtgtatctctgtggagcggggaacgggacagttgtgtaaaaatccaaaatacaattctgactatgaac

SEQ ID NO: 5908 - protein, 313 aa, Homo sapiens [sequence omitted]

SEQ ID NO: 5909 - DNA, 3703 bp, Homo sapiens
cgcctcaggtcggccgcggactacaaatggacgagagaggcggccgtccattagttagcggctccggagcaacgcagccgttgtccttgaggccgacgggcctgacgcgggcgggttgaacgcgctggtgaggcggtcacccgggctacggcggccggcagggggcagtggcggccgttgtctagggcccggaggtggggccgcgcgcctcgggcgctacgaacccggcaggcccacgcttggctgcggccgggtgcgggctgaggccatgggcgaccgcggcagctcccggcgccggaggacagggtcgcggccctcgagccacggcggcggcgggcctgcggcggcggaagaggaggtgcgggacgccgctgcgggccccgacgtgggagccgcgggggacgcgccagccccggcccccaacaaggacggagacgccggcgtgggcagcggccactgggagctgaggtgccatcgcctgcaggattctttattcagctctgacagtggcttcagcaactaccgtggcatcctgaactggtgtgtggtgatgctgatcttgagcaatgcccggttatttctggagaacctcatcaagtatggcatcctggtggaccccatccaggtggtttctctgttcctgaaggatccctatagctggcccgccccatgcctggttattgcggccaatgtctttgctgtggctgcattccaggttgagaagcgcctggcggtgggtgccctgacggagcaggcgggactgctgctgcacgtggccaacctggccaccattctgtgtttcccagcggctgtggtcttactggttgagtctatcactccagtgggctccctgctggcgctgatggcgcacaccatcctcttcctcaagctcttctcctaccgcgacgtcaactcatggtgccgcagggccagggccaaggctgcctctgcagggaagaaggccagcagtgctgctgccccgcacaccgtgagctacccggacaatctgacctaccgcgatctctactacttcctcttcgcccccaccttgtgctacgagctcaactttccccgctctccccgcatccggaagcgctttctgctgcgacggatccttgagatgctgttcttcacccagctccaggtggggctgatccagcagtggatggtccccaccatccagaactccatgaagcccttcaaggacatggactactcacgcatcatcgagcgcctcctgaagctggcggtccccaatcacctcatctggctcatcttcttctactggctcttccactcctgcctgaatgccgtggctgagctcatgcagtttggagaccgggagttctaccgggactggtggaactccgagtctgtcacctacttctggcagaactggaacatccctgtgcacaagtggtgcatcagacacttctacaagcccatgcttcgacggggcagcagcaagtggatggccaggacaggggtgttcctggcctcggccttcttccacgagtacctggtgagcgtccctctgcgaatgttccgcctctgggcgttcacgggcatgatggctcagatcccactggcctggttcgtgggccgctttttccagggcaactatggcaacgcagctgtgtggctgtcgctcatcatcggacagccaatagccgtcctcatgtacgtccacgactactacgtgctcaactatgaggccccagcggcagaggcctgagctgcacctgagggcctggcttctcactgccacctcacacccgctgccagagcccacctctcctcctaggcctcgagtgctggggatgggcctggctgcacagcatcctcctctggtcccagggaggcctctctgcccctatggggctctgtcctgcacccctcagggatggcgacagcaggccagacacagtctgatgccagctgggagtcttgctgaccctgccccgggtccgagggtgtcaataaagtgctgtccagtgacctcttcagcctgccaggggcctggggcctggtggggggtatggccacacccacaagggcgagtgccagagctgtgtggacagctgtcccaggacctgccggggagcagcagctccactgcagcagggcgggcatggccggtagggggagtgcaaggccaggcagacgcccccattccccacactcccctacctagaaaagctcagctcaggcgtcctctcctggtgctactcctgctgggtgtgcgggaatcggcactctggccctcagtgcaggatggtcaacttgcacccaccgtgctcagcttcagcttgggaagaggtcggccctgggtttgcgggaagtgggctccagccaggatggcccagggatgggcagtccacagggcctttctggtgtgggtctggtgagccgaggggctacggtacacaatggctatgtccatggctattcgccttggggcagggctcggtttggcagcctctttccttcacttggaacctgggcagccaggtgggctggtggctctcagctgccctccacgaggttggggcacccctgatccccaggcctgccttgccctctgctcttctggcaccaggctgggcagtgcagacagcgcagccctgcagccttcaggacaccttgttcccaggccctgcaatccaccaagctggatagatggggccccccttgatggtagcgggaggtcaggggtaaccccagggccctgctgctgccttaccttgctggggtgactgcttgattaaagaccccaagactggaccaggccctggtgtccccagacctgcagctatggcccaacaaggcaggtgtttgaggaggccctgcacagggtcccaggactgcaccaggggcctcatcagcaacctgctgaactggtggtgtgaggggagggtgggctcccttggtggtatcctccctctaccccagtgggggctggtgggccctgagatggaggcatctccttgggccctgctgaggatggcagtagtgggtgagctcctggtggggggatgggtgtggggccgactcctccatcccacatgggctcctgtgcctctccctatcagttggccagtggagctcgagaacaaactgttgctgccagataaagcagcaaagcctgctccactgcccagcgcaggcccccttcccttcctccaccaggctgagtggagaaccctaaagctacgggacaggctcccgttccccgtgcctacacagggtgctggctctggcagaaagacagtgtgcccgccccgcatcacctgtccgagtgcgaacaccttgggaagggggttcctggtggtcctgtgacaaccagagacccccagggccaaggtgaggcgcccacccctggtccctcaataaagaactgcaagcacatgctggtcctggggagtcgggcaggcacggagctagctgcaagcatccgtcttcccccaggaggccactgcagcccggcccttctgtgccctgggcccctcctcattgcagcaccacccaccgcaccaccctgggacagaggaaacacatggaggccatagcatagagcctgtctgtttatagatctctgcctgtcttgtccgtccatccactgtgtgtatatatctgtgtatctctgtggagcggggaacgggacagttgtgtaaaaatccaaaatacaattctgactatgaac

SEQ ID NO: 5910 - protein, 488 aa, Homo sapiens; identical to SEQ ID NO: 791

SEQ ID NO: 5911 - DNA, 3212 bp, Homo sapiens
aggccccgcctcaggtcggccgcggactacaaatggacgagagaggcggccgtccattagttagcggctccggagcaacgcagccgttgtccttgaggccgacgggcctgacgcgggcgggttgaacgcgctggtgaggcggtcacccgggctacggcggccggcagggggcagtggcggccgttgtctagggcccggaggtggggccgcgcgcctcgggcgctacgaacccggcaggcccacgcttggctgcggccgggtgcgggctgaggccatgggcgaccgcggcagctcccggcgccggaggacagggtcgcggccctcgagccacggcggcggcgggcctgcggcggcggaagaggaggtgcgggacgccgctgcgggccccgacgtgggagccgcgggggacgcgccagccccggcccccaacaaggacggagacgccggcgtgggcagcggccactgggagctgaggtgccatcgcctgcaggattctttattcagctctgacagtggcttcagcaactaccgtggcatcctgaactggtgtgtggtgatgctgatcttgagcaatgcccggttatttctggagaacctcatcaagtatggcatcctggtggaccccatccaggtggtttctctgttcctgaaggatccctatagctggcccgccccatgcctggttattgcggccaatgtctttgctgtggctgcattccaggttgagaagcgcctggcggtgggtgccctgacggagcaggcgggactgctgctgcacgtggccaacctggccaccattctgtgtttcccagcggctgtggtcttactggttgagtctatcactccagtgggctccctgctggcgctgatggcgcacaccatcctcttcctcaagctcttctcctaccgcgacgtcaactcatggtgccgcagggccagggccaaggctgcccatgcttcgacggggcagcagcaagtggatggccaggacaggggtgttcctggcctcggccttcttccacgagtacctggtgagcgtccctctgcgaatgttccgcctctgggcgttcacgggcatgatggctcagatcccactggcctggttcgtgggccgctttttccagggcaactatggcaacgcagctgtgtggctgtcgctcatcatcggacagccaatagccgtcctcatgtacgtccacgactactacgtgctcaactatgaggccccagcggcagaggcctgagctgcacctgagggcctggcttctcactgccacctcacacccgctgccagagcccacctctcctcctaggcctcgagtgctggggatgggcctggctgcacagcatcctcctctggtcccagggaggcctctctgcccctatggggctctgtcctgcacccctcagggatggcgacagcaggccagacacagtctgatgccagctgggagtcttgctgaccctgccccgggtccgagggtgtcaataaagtgctgtccagtgacctcttcagcctgccaggggcctggggcctggtggggggtatggccacacccacaagggcgagtgccagagctgtgtggacagctgtcccaggacctgccggggagcagcagctccactgcagcagggcgggcatggccggtagggggagtgcaaggccaggcagacgcccccattccccacactcccctacctagaaaagctcagctcaggcgtcctctcctggtgctactcctgctgggtgtgcgggaatcggcactctggccctcagtgcaggatggtcaacttgcacccaccgtgctcagcttcagcttgggaagaggtcggccctgggtttgcgggaagtgggctccagccaggatggcccagggatgggcagtccacagggcctttctggtgtgggtctggtgagccgaggggctacggtacacaatggctatgtccatggctattcgccttggggcagggctcggtttggcagcctctttccttcacttggaacctgggcagccaggtgggctggtggctctcagctgccctccacgaggttggggcacccctgatccccaggcctgccttgccctctgctcttctggcaccaggctgggcagtgcagacagcgcagccctgcagccttcaggacaccttgttcccaggccctgcaatccaccaagctggatagatggggccccccttgatggtagcgggaggtcaggggtaaccccagggccctgctgctgccttaccttgctggggtgactgcttgattaaagaccccaagactggaccaggccctggtgtccccagacctgcagctatggcccaacaaggcaggtgtttgaggaggccctgcacagggtcccaggactgcaccaggggcctcatcagcaacctgctgaactggtggtgtgaggggagggtgggctcccttggtggtatcctccctctaccccagtgggggctggtgggccctgagatggaggcatctccttgggccctgctgaggatggcagtagtgggtgagctcctggtggggggatgggtgtggggccgactcctccatcccacatgggctcctgtgcctctccctatcagttggccagtggagctcgagaacaaactgttgctgccagataaagcagcaaagcctgctccactgcccagcgcaggcccccttcccttcctccaccaggctgagtggagaaccctaaagctacgggacaggctcccgttccccgtgcctacacagggtgctggctctggcagaaagacagtgtgcccgccccgcatcacctgtccgagtgcgaacaccttgggaagggggttcctggtggtcctgtgacaaccagagacccccagggccaaggtgaggcgcccacccctggtccctcaataaagaactgcaagcacatgctggtcctggggagtcgggcaggcacggagctagctgcaagcatccgtcttcccccaggaggccactgcagcccggcccttctgtgccctgggcccctcctcattgcagcaccacccaccgcaccaccctgggacagaggaaacacatggaggccatagcatagagcctgtctgtttatagatctctgcctgtcttgtccgtccatccactgtgtgtatatatctgtgtatctctgtggagcggggaacgggacagttgtgtaaaaatccaaaatacaattctgactatgaac

SEQ ID NO: 5912 - protein, 315 aa, Homo sapiens; identical to SEQ ID NO: 5902

SEQ ID NO: 5913 - DNA, 2250 bp, Homo sapiens
cgcctcaggtcggccgcggactacaaatggacgagagaggcggccgtccattagttagcggctccggagcaacgcagccgttgtccttgaggccgacgggcctgacgcgggcgggttgaacgcgctggtgaggcggtcacccgggctacggcggccggcagggggcagtggcggccgttgtctagggcccggaggtggggccgcgcgcctcgggcgctacgaacccggcaggcccacgcttggctgcggccgggtgcgggctgaggccatgggcgaccgcggcagctcccggcgccggaggacagggtcgcggccctcgagccacggcggcggcgggcctgcggcggcggaagaggaggtgcgggacgccgctgcgggccccgacgtgggagccgcgggggacgcgccagccccggcccccaacaaggacggagacgccggcgtgggcagcggccactgggagctgaggtgccatcgcctgcaggattctttattcagctctgacagtggcttcagcaactaccgtggcatcctgaactggtgtgtggtgatgctgatcttgagcaatgcccggttatttctggagaacctcatcaagtatggcatcctggtggaccccatccaggtggtttctctgttcctgaaggatccctatagctggcccgccccatgcctggttattgcggccaatgtctttgctgtggctgcattccaggttgagaagcgcctggcggtgggtgccctgacggagcaggcgggactgctgctgcacgtggccaacctggccaccattctgtgtttcccagcggctgtggtcttactggttgagtctatcactccagtgggctccctgctggcgctgatggcgcacaccatcctcttcctcaagctcttctcctaccgcgacgtcaactcatggtgccgcagggccagggccaaggctggtgaggggctgccaggggctggggctgcctgctggggggctgggcagcagcagggccccaccagccccctcccactctgctgtgctcgtagcctctgcagggaagaaggccagcagtgctgctgccccgcacaccgtgagctacccggacaatctgacctaccgcgatctctactacttcctcttcgcccccaccttgtgctacgagctcaactttccccgctctccccgcatccggaagcgctttctgctgcgacggatccttgagatgctgttcttcacccagctccaggtggggctgatccagcagtggatggtccccaccatccagaactccatgaagcccttcaaggtgagtggctcaggtgctcttgcagctggggtggctggggagtgaccaggagcatggctagctgaagggcttgtttctgcaggacatggactactcacgcatcatcgagcgcctcctgaagctggcggtccccaatcacctcatctggctcatcttcttctactggctcttccactcctgcctgaatgccgtggctgagctcatgcagtttggagaccgggagttctaccgggactggtggaactccgagtctgtcacctacttctggcagaactggaacatccctgtgcacaagtggtgcatcaggtaggtggggtgtgtgtgtgtgtgatgtggaacatggctgtgaacctgaaccgctttccatgccccctcctctgcagacacttctacaagcccatgcttcgacggggcagcagcaagtggatggccaggacaggggtgttcctggcctcggccttcttccacgagtacctggtgagcgtccctctgcgaatgttccgcctctgggcgttcacgggcatgatggctcagatcccactggcctggttcgtgggccgctttttccagggcaactatggcaacgcagctgtgtggctgtcgctcatcatcggacagccaatagccgtcctcatgtacgtccacgactactacgtgctcaactatgaggccccagcggcagaggcctgagctgcacctgagggcctggcttctcactgccacctcacacccgctgccagagcccacctctcctcctaggcctcgagtgctggggatgggcctggctgcacagcatcctcctctggtcccagggaggcctctctgcccctatggggctctgtcctgcacccctcagggatggcgacagcaggccagacacagtctgatgccagctgggagtcttgctgaccctgccccgggtccgagggtgtcaataaagtgctgtccagtgacc

SEQ ID NO: 5914 - protein, 313 aa, Homo sapiens [sequence omitted]

SEQ ID NO: 5915 - DNA, 2159 bp, Homo sapiens
cgcctcaggtcggccgcggactacaaatggacgagagaggcggccgtccattagttagcggctccggagcaacgcagccgttgtccttgaggccgacgggcctgacgcgggcgggttgaacgcgctggtgaggcggtcacccgggctacggcggccggcagggggcagtggcggccgttgtctagggcccggaggtggggccgcgcgcctcgggcgctacgaacccggcaggcccacgcttggctgcggccgggtgcgggctgaggccatgggcgaccgcggcagctcccggcgccggaggacagggtcgcggccctcgagccacggcggcggcgggcctgcggcggcggaagaggaggtgcgggacgccgctgcgggccccgacgtgggagccgcgggggacgcgccagccccggcccccaacaaggacggagacgccggcgtgggcagcggccactgggagctgaggtgccatcgcctgcaggattctttattcagctctgacagtggcttcagcaactaccgtggcatcctgaactggtgtgtggtgatgctgatcttgagcaatgcccggttatttctggagaacctcatcaagtatggcatcctggtggaccccatccaggtggtttctctgttcctgaaggatccctatagctggcccgccccatgcctggttattgcggccaatgtctttgctgtggctgcattccaggttgagaagcgcctggcggtgggtgccctgacggagcaggcgggactgctgctgcacgtggccaacctggccaccattctgtgtttcccagcggctgtggtcttactggttgagtctatcactccagtgggctccctgctggcgctgatggcgcacaccatcctcttcctcaagctcttctcctaccgcgacgtcaactcatggtgccgcagggccagggccaaggctgcctctgcagggaagaaggccagcagtgctgctgccccgcacaccgtgagctacccggacaatctgacctaccgcgatctctactacttcctcttcgcccccaccttgtgctacgagctcaactttccccgctctccccgcatccggaagcgctttctgctgcgacggatccttgagatgctgttcttcacccagctccaggtggggctgatccagcagtggatggtccccaccatccagaactccatgaagcccttcaaggtgagtggctcaggtgctcttgcagctggggtggctggggagtgaccaggagcatggctagctgaagggcttgtttctgcaggacatggactactcacgcatcatcgagcgcctcctgaagctggcggtccccaatcacctcatctggctcatcttcttctactggctcttccactcctgcctgaatgccgtggctgagctcatgcagtttggagaccgggagttctaccgggactggtggaactccgagtctgtcacctacttctggcagaactggaacatccctgtgcacaagtggtgcatcaggtaggtggggtgtgtgtgtgtgtgatgtggaacatggctgtgaacctgaaccgctttccatgccccctcctctgcagacacttctacaagcccatgcttcgacggggcagcagcaagtggatggccaggacaggggtgttcctggcctcggccttcttccacgagtacctggtgagcgtccctctgcgaatgttccgcctctgggcgttcacgggcatgatggctcagatcccactggcctggttcgtgggccgctttttccagggcaactatggcaacgcagctgtgtggctgtcgctcatcatcggacagccaatagccgtcctcatgtacgtccacgactactacgtgctcaactatgaggccccagcggcagaggcctgagctgcacctgagggcctggcttctcactgccacctcacacccgctgccagagcccacctctcctcctaggcctcgagtgctggggatgggcctggctgcacagcatcctcctctggtcccagggaggcctctctgcccctatggggctctgtcctgcacccctcagggatggcgacagcaggccagacacagtctgatgccagctgggagtcttgctgaccctgccccgggtccgagggtgtcaataaagtgctgtccagtgacc

SEQ ID NO: 5916 - protein, 326 aa, Homo sapiens; identical to SEQ ID NO: 5900

SEQ ID NO: 5917 - DNA, 2000 bp, Homo sapiens
cgcctcaggtcggccgcggactacaaatggacgagagaggcggccgtccattagttagcggctccggagcaacgcagccgttgtccttgaggccgacgggcctgacgcgggcgggttgaacgcgctggtgaggcggtcacccgggctacggcggccggcagggggcagtggcggccgttgtctagggcccggaggtggggccgcgcgcctcgggcgctacgaacccggcaggcccacgcttggctgcggccgggtgcgggctgaggccatgggcgaccgcggcagctcccggcgccggaggacagggtcgcggccctcgagccacggcggcggcgggcctgcggcggcggaagaggaggtgcgggacgccgctgcgggccccgacgtgggagccgcgggggacgcgccagccccggcccccaacaaggacggagacgccggcgtgggcagcggccactgggagctgaggtgccatcgcctgcaggattctttattcagctctgacagtggcttcagcaactaccgtggcatcctgaactggtgtgtggtgatgctgatcttgagcaatgcccggttatttctggagaacctcatcaagtatggcatcctggtggaccccatccaggtggtttctctgttcctgaaggatccctatagctggcccgccccatgcctggttattgcggccaatgtctttgctgtggctgcattccaggttgagaagcgcctggcggtgggtgccctgacggagcaggcgggactgctgctgcacgtggccaacctggccaccattctgtgtttcccagcggctgtggtcttactggttgagtctatcactccagtgggctccctgctggcgctgatggcgcacaccatcctcttcctcaagctcttctcctaccgcgacgtcaactcatggtgccgcagggccagggccaaggctgcctctgcagggaagaaggccagcagtgctgctgccccgcacaccgtgagctacccggacaatctgacctaccgcgatctctactacttcctcttcgcccccaccttgtgctacgagctcaactttccccgctctccccgcatccggaagcgctttctgctgcgacggatccttgagatgctgttcttcacccagctccaggtggggctgatccagcagtggatggtccccaccatccagaactccatgaagcccttcaaggacatggactactcacgcatcatcgagcgcctcctgaagctggcggtccccaatcacctcatctggctcatcttcttctactggctcttccactcctgcctgaatgccgtggctgagctcatgcagtttggagaccgggagttctaccgggactggtggaactccgagtctgtcacctacttctggcagaactggaacatccctgtgcacaagtggtgcatcagacacttctacaagcccatgcttcgacggggcagcagcaagtggatggccaggacaggggtgttcctggcctcggccttcttccacgagtacctggtgagcgtccctctgcgaatgttccgcctctgggcgttcacgggcatgatggctcagatcccactggcctggttcgtgggccgctttttccagggcaactatggcaacgcagctgtgtggctgtcgctcatcatcggacagccaatagccgtcctcatgtacgtccacgactactacgtgctcaactatgaggccccagcggcagaggcctgagctgcacctgagggcctggcttctcactgccacctcacacccgctgccagagcccacctctcctcctaggcctcgagtgctggggatgggcctggctgcacagcatcctcctctggtcccagggaggcctctctgcccctatggggctctgtcctgcacccctcagggatggcgacagcaggccagacacagtctgatgccagctgggagtcttgctgaccctgccccgggtccgagggtgtcaataaagtgctgtccagtgacc

SEQ ID NO: 5918 - protein, 488 aa, Homo sapiens; identical to SEQ ID NO: 791

SEQ ID NO: 5919 - DNA, 1509 bp, Homo sapiens
aggccccgcctcaggtcggccgcggactacaaatggacgagagaggcggccgtccattagttagcggctccggagcaacgcagccgttgtccttgaggccgacgggcctgacgcgggcgggttgaacgcgctggtgaggcggtcacccgggctacggcggccggcagggggcagtggcggccgttgtctagggcccggaggtggggccgcgcgcctcgggcgctacgaacccggcaggcccacgcttggctgcggccgggtgcgggctgaggccatgggcgaccgcggcagctcccggcgccggaggacagggtcgcggccctcgagccacggcggcggcgggcctgcggcggcggaagaggaggtgcgggacgccgctgcgggccccgacgtgggagccgcgggggacgcgccagccccggcccccaacaaggacggagacgccggcgtgggcagcggccactgggagctgaggtgccatcgcctgcaggattctttattcagctctgacagtggcttcagcaactaccgtggcatcctgaactggtgtgtggtgatgctgatcttgagcaatgcccggttatttctggagaacctcatcaagtatggcatcctggtggaccccatccaggtggtttctctgttcctgaaggatccctatagctggcccgccccatgcctggttattgcggccaatgtctttgctgtggctgcattccaggttgagaagcgcctggcggtgggtgccctgacggagcaggcgggactgctgctgcacgtggccaacctggccaccattctgtgtttcccagcggctgtggtcttactggttgagtctatcactccagtgggctccctgctggcgctgatggcgcacaccatcctcttcctcaagctcttctcctaccgcgacgtcaactcatggtgccgcagggccagggccaaggctgcccatgcttcgacggggcagcagcaagtggatggccaggacaggggtgttcctggcctcggccttcttccacgagtacctggtgagcgtccctctgcgaatgttccgcctctgggcgttcacgggcatgatggctcagatcccactggcctggttcgtgggccgctttttccagggcaactatggcaacgcagctgtgtggctgtcgctcatcatcggacagccaatagccgtcctcatgtacgtccacgactactacgtgctcaactatgaggccccagcggcagaggcctgagctgcacctgagggcctggcttctcactgccacctcacacccgctgccagagcccacctctcctcctaggcctcgagtgctggggatgggcctggctgcacagcatcctcctctggtcccagggaggcctctctgcccctatggggctctgtcctgcacccctcagggatggcgacagcaggccagacacagtctgatgccagctgggagtcttgctgaccctgccccgggtccgagggtgtcaataaagtgctgtccagtgacc

SEQ ID NO: 5920 - protein, 315 aa, Homo sapiens; identical to SEQ ID NO: 5902

SEQ ID NO: 5921 - DNA, 3552 bp, Homo sapiens; identical to SEQ ID NO: 792

SEQ ID NO: 5922 - protein, 348 aa, Homo sapiens; identical to SEQ ID NO: 793

SEQ ID NO: 5923 - DNA, 196 bp, Homo sapiens
gggatccggaggggcaacggaggagacgcagggcagcaaggagagaggacaccactcgcgcggcagcatccaaaggccagagtggggacccgcgctgcctcctaccctcgcctcgcatcctctgccaaatccgaattcttccagcccagcttcccgggctctgtcctccatatcgaataataatgacacatatcga

SEQ ID NO: 5924 - protein, 64 aa, Homo sapiens
GSGGATEETQGSKERGHHSRGSIQRPEWGPALPPTLASHPLPNPNSSSPASRALSSISNNNDTY

SEQ ID NO: 5925 - DNA, 7452 bp, Homo sapiens
gacagacgaggtttgcgcttggctgggcatgttccgcggctactctgcggcgcgccaggcccccgctttccgcaccccgcgaccctagaagccaccgaaccgccggcgggccatggccactctgccgagcgcagagcgccgcgcgttcgcgctcaagatcaacaggtattcttcagcggaaataaggaaacagtttactctcccaccaaaccttggccagtaccatcgacagagcataagtacctctggcttcccctctcttcaactacctcagttttatgaccctgtggagccagtggactttgaaggacttctgatgacacacctgaacagcctggatgtgcagcttgcccaggagctcggggacttcactgatgacgacttggacgtggtgttcacgccaaaggaatgtaggactttgcagccctctttgccggaggaaggggttgaactggaccctcatgtcagggactgtgttcagacctacatccgtgagtggctaatcgtgaaccggaaaaaccaaggaagtccagaaatctgtggctttaaaaagactggatctcgaaaagattttcacaagacgcttccgaaacagacgtttgagtcggaaaccttggagtgcagtgaacccgctgctcaggcaggcccccgccacttaaacgtgctgtgcgacgtgtctgggaaaggccccgtcactgcctgtgactttgacctccgcagcctgcagcctgacaagcggctagaaaacctcctgcagcaagtgagtgccgaggactttgagaagcagaacgaggaggcccggaggaccaataggcaggccgagctctttgccctttacccatcagtggacgaggaggatgctgtggaaatacgtccagtaccagaatgtcccaaggaacacctgggcaacagaatattggtcaagttgctgaccttgaagttcgagattgaaattgagcccctgtttgccagcattgccctctacgatgttaaagaaaggaaaaagatctcagaaaattttcactgtgacctgaactctgaccagttcaaaggatttctgcgagctcacacgccttcagtggccgcatcaagtcaggcgagatctgcagtcttctcagtcacctacccgtcctcagacatctacctggtagtcaagattgaaaaagtcctgcagcagggagagattggagactgtgcagagccctacacggttatcaaagaaagtgatggtggaaagagtaaagaaaagattgaaaaactaaaactccaagctgaatccttctgccagcgtttggggaaataccggatgccctttgcctgggcacccataagcttatcaagcttcttcaatgtctccacccttgagagggaggtaactgatgtggactctgtggttgggagaagctcagtgggtgaacggaggacattggcccaatctagaaggctttctgaaagagccctctccttggaggaaaatggggttggatccaacttcaaaacctccactctgagcgttagcagctttttcaagcaggaaggagatcgccttagcgatgaagacttattcaagtttttagctgactacaaaagatcatcatccttacagagacgagtcaagtcaattccaggcttgctaagactggagatttctacagctccagagatcatcaattgctgtctgactcctgaaatgctgcccgtgaaaccctttcctgaaaaccggacacgcccgcacaaagagattttggaatttccaacacgagaagtatatgtccctcacactgtgtacagaaaccttctctatgtctacccacagaggctgaactttgtaaacaaactagcatcagcccggaacattacaataaagatccagtttatgtgtggagaagatgctagcaatgcgatgccggtcatctttggaaaatccagcgggcctgaatttctgcaggaagtgtacacagctgttacataccataataagtctcctgacttttatgaagaagtgaaaattaagctccccgctaagctcacagtaaatcaccacctcctgttcaccttctaccatatcagctgtcagcagaagcaaggagcctccgtggaaactctcctgggatattcatggctgccaattctcttaaatgaacgtcttcaaactggatcctactgtctcccagttgccttggaaaaattgccacccaactactccatgcattctgctgagaaagtcccattacagaatcctcccattaagtgggctgaaggacataagggagtatttaatattgaagtgcaagctgtttcttctgtacacacccaggacaaccacctggagaagttcttcaccctctgccactccctggagagccaggtgaccttccccatccgcgtgctggatcagaaaatcagcgagatggcgctggagcatgagctgaagctcagcatcatctgcctgaactcctcccgcctggagccgctcgtgctcttcctgcacctggtgctggacaagctcttccagctgtccgtgcagcccatggtcatcgctggccagacagccaacttctcccagtttgccttcgagtccgtggtggccatcgccaacagtctgcacaacagcaaggacctgagcaaggaccagcatgggaggaactgcctgctggcttcctacgtgcactacgtcttccgcctgccagaggtgcaaagggatgtgcccaagtcaggcgctcccactgccctcctagaccctcggagctaccacacgtatggccgcacatcagctgctgctgtgagttcaaagctgctgcaggcccgggtgatgagcagcagtaacccagacctcgcggggacacactccgcagcagacgaggaagtgaagaacatcatgtcttcaaagatcgccgatcgcaactgcagccgaatgtcttactattgctctggcagtagtgatgctccaagttcacctgcagccccaaggccagccagcaaaaagcatttccatgaggagcttgcccttcagatggtggtcagcaccggaatggtgagagaaacagtcttcaagtatgcctggttcttctttgagcttctggtgaaaagcatggcccagcacgtacataacatggacaaacgggacagttttcggaggactcgtttttctgaccgtttcatggatgacataactactattgttaatgtggtcacctcggaaattgcagcccttttagtaaaaccacagaaggaaaatgaacaggcggaaaagatgaacatcagcctggctttcttcttgtatgaccttctctccctcatggatcggggctttgtgtttaacctcatcagacattattgcagccagctgtcagccaagctcagtaaccttccaacgctcatttccatgaggctagagttcctgagaatcctctgtagccatgagcattacctcaatctgaaccttttttttatgaatgctgatactgctccaacatctccttgtccttccatatcttcccagaactcaagctcctgctccagcttccaggaccagaagatcgccagcatgttcgatctgacttccgagtaccgccagcagcacttcctcaccgggctcctcttcacagaactggctgctgccctggatgccgaaggggaaggaatcagcaaagtacaaaggaaagctgtcagtgcaattcacagcctgctaagttctcacgacctggacccacgctgtgtcaaaccagaggtgaaggtcaaaatcgccgccctttacctacctttagttggcatcattttggatgctttgccacagctctgtgactttacagttgcagatactcgcagataccgcaccagtggctcggatgaagaacaagaaggagccggtgccattaaccagaatgtggctctggccatagcagggaataatttcaatttgaaaacaagtggaatagtgctgtcttccttgccctataagcagtacaacatgctgaacgcggacactactcgcaacctcatgatctgcttcctctggatcatgaaaaatgctgatcagagcctcattaggaagtggattgctgacctgccatcaacgcagctcaacaggattttagatctacttttcatctgtgtgttatgttttgagtataagggaaaacagagttctgacaaagtcagtacccaagtcctgcagaagtcaagggatgtcaaggcccggctggaagaggctttgctccgtggggaaggggccagaggggagatgatgcgccgccgggctccagggaacgaccgatttccaggcctaaatgaaaatttgagatggaagaaagagcagacacattggcggcaagctaatgagaagctagataaaacaaaggccgagttagatcaagaagccttgatcagtggcaatctggctacagaagcacatttaatcatcctggatatgcaggaaaacattatccaggcgagctcggctctggactgtaaagacagcctgctgggaggtgttctgagggtgctggtgaattctctgaactgtgatcagagtaccacctacctgactcactgctttgcaacactccgtgctctcatcgccaagtttggagacttactctttgaagaggaggtggaacagtgtttcgacctatgtcaccaagtcctgcaccactgcagcagcagcatggatgtcacccggagccaagcctgtgccaccctttacctcctcatgaggttcagttttggagccaccagtaattttgcaagagtaaagatgcaagtaaccatgtccctggcatctttggtgggaagagcaccagactttaatgaagagcacctgagaagatccttgaggacaattttggcctattcagaagaggacacagccatgcagatgactccttttcccacccaggtggaggaacttctctgtaatctgaatagcatcttatatgacacagtgaaaatgagggaatttcaggaagatcctgagatgcttatggatctcatgtacagaattgccaagagttaccaggcatctcctgatctgcggctgacctggctccagaacatggcagagaaacacaccaagaagaagtgctacacggaggctgccatgtgcctggtgcacgccgctgcgttagtggctgagtatctgagcatgctggaggaccacagctacctgcccgtgggcagtgtcagcttccagaatatttcttccaatgtgctggaggagtctgtggtctctgaggacaccctgtcacctgacgaggatggggtgtgcgcaggccagtacttcaccgagagtggcctggtaggcctcctggagcaggccgcggagctcttcagcacgggaggcttatatgagacagttaatgaggtctacaagctggtcatccccatcctagaagcgcatcgagaattccggaagctgacactcactcacagcaagctgcagagagccttcgacagcatcgttaacaaggatcataagagaatgtttggaacctacttccgagttggtttctttggatccaaatttggggatttggatgaacaggagtttgtctacaaagagcctgcaattaccaagcttcctgagatctcacatagactagaggcattttatggtcaatgttttggtgcagaatttgtggaagtgattaaagactccactcctgtggacaaaaccaagttggatcctaacaaggcctacatacagatcacttttgtggagccctactttgatgagtatgagatgaaagacagggtcacatactttgagaagaatttcaacctccggaggttcatgtacaccaccccgttcaccctggaggggcggcctcggggagagctgcatgagcagtacagaaggaacacagtcctgaccactatgcacgccttcccctacatcaagaccaggatcagcgtcatccagaaggaggagtttgttttgacaccgattgaagttgccattgaagacatgaagaagaagaccctgcagttagcagttgccattaaccaggagccgcctgatgcaaagatgcttcagatggtgctgcaaggctctgtgggagctactgtaaatcagggaccactggaagtagcccaagtgtttttggctgaaattcctgctgatccaaaactctatcgacatcacaacaagttgaggttatgctttaaggaattcatcatgagatgtggtgaagctgtagagaaaaacaagcgtctcatcacggcagaccagagggaatatcagcaggaactcaaaaagaactataacaagctaaaagagaacctcaggccaatgatcgagcggaaaattccagaactgtacaagccaatattcagagttgagagtcaaaagagggactccttccacagatctagtttcaggaaatgtgaaacccagttgtcacagggcagctaagaaaagccatcttcattcgtggagactgtggccctgcaaccctggagaaggacttgctggtacttaaaaaatgggacatttgccacccaggactgactgtacactccctgatcagccagcactctggaagctttgggatcccaggaaccatggaattattcccaaatggactctgaccagatttttgccatactggggggtggcgggatggaggatgggtactcaggcatgactgcgtatttattaaagtgtgtttttccacaatgtaccaaacaaggcataagcagcttctcctgctgactggccaatcactgcccatctgagagatgatttcctctggcccatatttgaatttattggagtaactcaaattgcctgaggaaaaatggaaaaattatccaccagtcgattcaaactgaatttcactctttataggaaggcagggcaaacttgtaggagtacgaaacattttcaataaatctacaaagggaagccttactacaattccaaaaatcatcatggttggaaatttgggaggagattatttgtgaacttgttacccttttggtaatggtggactaattgctgtatagttatttttgttttattattactgttacattaatttaacatgcatttatagaagaatacattcaaagcactgatgtaggagatacacggtacttggagcagtcagccagaaatcacagatactgctttcacttaaatggaaacaattctccgataatgctttgctttttttcttatgtcactcttgtgtactatctatttttctcctctctgggaccaagtttctttttataaagcaataatatctctgttttcatttcagaacattgtgctgtctgtcagcatatgtatatcagctacaaaatatattcaactttgacttcttttgacaaaggactttaggaaaaagaggaacaaagacattatttgagaattaaattatatatttttaatatgactgtgaccttgactgataataaagatgtaataagaattgcaagctaaatgtt

SEQ ID NO: 5926 - protein, 2099 aa, Homo sapiens
MATLPSAERRAFALKINRYSSAEIRKQFTLPPNLGQYHRQSISTSGFPSLQLPQFYDPVEPVDFEGLLMTHLNSLDVQLAQELGDFTDDDLDVVFTPKECRTLQPSLPEEGVELDPHVRDCVQTYIREWLIVNRKNQGSPEICGFKKTGSRKDFHKTLPKQTFESETLECSEPAAQAGPRHLNVLCDVSGKGPVTACDFDLRSLQPDKRLENLLQQVSAEDFEKQNEEARRTNRQAELFALYPSVDEEDAVEIRPVPECPKEHLGNRILVKLLTLKFEIEIEPLFASIALYDVKERKKISENFHCDLNSDQFKGFLRAHTPSVAASSQARSAVFSVTYPSSDIYLVVKIEKVLQQGEIGDCAEPYTVIKESDGGKSKEKIEKLKLQAESFCQRLGKYRMPFAWAPISLSSFFNVSTLEREVTDVDSVVGRSSVGERRTLAQSRRLSERALSLEENGVGSNFKTSTLSVSSFFKQEGDRLSDEDLFKFLADYKRSSSLQRRVKSIPGLLRLEISTAPEIINCCLTPEMLPVKPFPENRTRPHKEILEFPTREVYVPHTVYRNLLYVYPQRLNFVNKLASARNITIKIQFMCGEDASNAMPVIFGKSSGPEFLQEVYTAVTYHNKSPDFYEEVKIKLPAKLTVNHHLLFTFYHISCQQKQGASVETLLGYSWLPILLNERLQTGSYCLPVALEKLPPNYSMHSAEKVPLQNPPIKWAEGHKGVFNIEVQAVSSVHTQDNHLEKFFTLCHSLESQVTFPIRVLDQKISEMALEHELKLSIICLNSSRLEPLVLFLHLVLDKLFQLSVQPMVIAGQTANFSQFAFESVVAIANSLHNSKDLSKDQHGRNCLLASYVHYVFRLPEVQRDVPKSGAPTALLDPRSYHTYGRTSAAAVSSKLLQARVMSSSNPDLAGTHSAADEEVKNIMSSKIADRNCSRMSYYCSGSSDAPSSPAAPRPASKKHFHEELALQMVVSTGMVRETVFKYAWFFFELLVKSMAQHVHNMDKRDSFRRTRFSDRFMDDITTIVNVVTSEIAALLVKPQKENEQAEKMNISLAFFLYDLLSLMDRGFVFNLIRHYCSQLSAKLSNLPTLISMRLEFLRILCSHEHYLNLNLFFMNADTAPTSPCPSISSQNSSSCSSFQDQKIASMFDLTSEYRQQHFLTGLLFTELAAALDAEGEGISKVQRKAVSAIHSLLSSHDLDPRCVKPEVKVKIAALYLPLVGIILDALPQLCDFTVADTRRYRTSGSDEEQEGAGAINQNVALAIAGNNFNLKTSGIVLSSLPYKQYNMLNADTTRNLMICFLWIMKNADQSLIRKWIADLPSTQLNRILDLLFICVLCFEYKGKQSSDKVSTQVLQKSRDVKARLEEALLRGEGARGEMMRRRAPGNDRFPGLNENLRWKKEQTHWRQANEKLDKTKAELDQEALISGNLATEAHLIILDMQENIIQASSALDCKDSLLGGVLRVLVNSLNCDQSTTYLTHCFATLRALIAKFGDLLFEEEVEQCFDLCHQVLHHCSSSMDVTRSQACATLYLLMRFSFGATSNFARVKMQVTMSLASLVGRAPDFNEEHLRRSLRTILAYSEEDTAMQMTPFPTQVEELLCNLNSILYDTVKMREFQEDPEMLMDLMYRIAKSYQASPDLRLTWLQNMAEKHTKKKCYTEAAMCLVHAAALVAEYLSMLEDHSYLPVGSVSFQNISSNVLEESVVSEDTLSPDEDGVCAGQYFTESGLVGLLEQAAELFSTGGLYETVNEVYKLVIPILEAHREFRKLTLTHSKLQRAFDSIVNKDHKRMFGTYFRVGFFGSKFGDLDEQEFVYKEPAITKLPEISHRLEAFYGQCFGAEFVEVIKDSTPVDKTKLDPNKAYIQITFVEPYFDEYEMKDRVTYFEKNFNLRRFMYTTPFTLEGRPRGELHEQYRRNTVLTTMHAFPYIKTRISVIQKEEFVLTPIEVAIEDMKKKTLQLAVAINQEPPDAKMLQMVLQGSVGATVNQGPLEVAQVFLAEIPADPKLYRHHNKLRLCFKEFIMRCGEAVEKNKRLITADQREYQQELKKNYNKLKENLRPMIERKIPELYKPIFRVESQKRDSFHRSSFRKCETQLSQGS

SEQ ID NO: 5927 - DNA, 7237 bp, Homo sapiens
cattttgtctcctgtaacaatttacgcgccgtgtaactgtgaatctttcaaagcctcagttttatgaccctgtggagccagtggactttgaaggacttctgatgacacacctgaacagcctggatgtgcagcttgcccaggagctcggggacttcactgatgacgacttggacgtggtgttcacgccaaaggaatgtaggactttgcagccctctttgccggaggaaggggttgaactggaccctcatgtcagggactgtgttcagacctacatccgtgagtggctaatcgtgaaccggaaaaaccaaggaagtccagaaatctgtggctttaaaaagactggatctcgaaaagattttcacaagacgcttccgaaacagacgtttgagtcggaaaccttggagtgcagtgaacccgctgctcaggcaggcccccgccacttaaacgtgctgtgcgacgtgtctgggaaaggccccgtcactgcctgtgactttgacctccgcagcctgcagcctgacaagcggctagaaaacctcctgcagcaagtgagtgccgaggactttgagaagcagaacgaggaggcccggaggaccaataggcaggccgagctctttgccctttacccatcagtggacgaggaggatgctgtggaaatacgtccagtaccagaatgtcccaaggaacacctgggcaacagaatattggtcaagttgctgaccttgaagttcgagattgaaattgagcccctgtttgccagcattgccctctacgatgttaaagaaaggaaaaagatctcagaaaattttcactgtgacctgaactctgaccagttcaaaggatttctgcgagctcacacgccttcagtggccgcatcaagtcaggcgagatctgcagtcttctcagtcacctacccgtcctcagacatctacctggtagtcaagattgaaaaagtcctgcagcagggagagattggagactgtgcagagccctacacggttatcaaagaaagtgatggtggaaagagtaaagaaaagattgaaaaactaaaactccaagctgaatccttctgccagcgtttggggaaataccggatgccctttgcctgggcacccataagcttatcaagcttcttcaatgtctccacccttgagagggaggtaactgatgtggactctgtggttgggagaagctcagtgggtgaacggaggacattggcccaatctagaaggctttctgaaagagccctctccttggaggaaaatggggttggatccaacttcaaaacctccactctgagcgttagcagctttttcaagcaggaaggagatcgccttagcgatgaagacttattcaagtttttagctgactacaaaagatcatcatccttacagagacgagtcaagtcaattccaggcttgctaagactggagatttctacagctccagagatcatcaattgctgtctgactcctgaaatgctgcccgtgaaaccctttcctgaaaaccggacacgcccgcacaaagagattttggaatttccaacacgagaagtatatgtccctcacactgtgtacagaaaccttctctatgtctacccacagaggctgaactttgtaaacaaactagcatcagcccggaacattacaataaagatccagtttatgtgtggagaagatgctagcaatgcgatgccggtcatctttggaaaatccagcgggcctgaatttctgcaggaagtgtacacagctgttacataccataataagtctcctgacttttatgaagaagtgaaaattaagctccccgctaagctcacagtaaatcaccacctcctgttcaccttctaccatatcagctgtcagcagaagcaaggagcctccgtggaaactctcctgggatattcatggctgccaattctcttaaatgaacgtcttcaaactggatcctactgtctcccagttgccttggaaaaattgccacccaactactccatgcattctgctgagaaagtcccattacagaatcctcccattaagtgggctgaaggacataagggagtatttaatattgaagtgcaagctgtttcttctgtacacacccaggacaaccacctggagaagttcttcaccctctgccactccctggagagccaggtgaccttccccatccgcgtgctggatcagaaaatcagcgagatggcgctggagcatgagctgaagctcagcatcatctgcctgaactcctcccgcctggagccgctcgtgctcttcctgcacctggtgctggacaagctcttccagctgtccgtgcagcccatggtcatcgctggccagacagccaacttctcccagtttgccttcgagtccgtggtggccatcgccaacagtctgcacaacagcaaggacctgagcaaggaccagcatgggaggaactgcctgctggcttcctacgtgcactacgtcttccgcctgccagaggtgcaaagggatgtgcccaagtcaggcgctcccactgccctcctagaccctcggagctaccacacgtatggccgcacatcagctgctgctgtgagttcaaagctgctgcaggcccgggtgatgagcagcagtaacccagacctcgcggggacacactccgcagcagacgaggaagtgaagaacatcatgtcttcaaagatcgccgatcgcaactgcagccgaatgtcttactattgctctggcagtagtgatgctccaagttcacctgcagccccaaggccagccagcaaaaagcatttccatgaggagcttgcccttcagatggtggtcagcaccggaatggtgagagaaacagtcttcaagtatgcctggttcttctttgagcttctggtgaaaagcatggcccagcacgtacataacatggacaaacgggacagttttcggaggactcgtttttctgaccgtttcatggatgacataactactattgttaatgtggtcacctcggaaattgcagcccttttagtaaaaccacagaaggaaaatgaacaggcggaaaagatgaacatcagcctggctttcttcttgtatgaccttctctccctcatggatcggggctttgtgtttaacctcatcagacattattgcagccagctgtcagccaagctcagtaaccttccaacgctcatttccatgaggctagagttcctgagaatcctctgtagccatgagcattacctcaatctgaaccttttttttatgaatgctgatactgctccaacatctccttgtccttccatatcttcccagaactcaagctcctgctccagcttccaggaccagaagatcgccagcatgttcgatctgacttccgagtaccgccagcagcacttcctcaccgggctcctcttcacagaactggctgctgccctggatgccgaaggggaaggaatcagcaaagtacaaaggaaagctgtcagtgcaattcacagcctgctaagttctcacgacctggacccacgctgtgtcaaaccagaggtgaaggtcaaaatcgccgccctttacctacctttagttggcatcattttggatgctttgccacagctctgtgactttacagttgcagatactcgcagataccgcaccagtggctcggatgaagaacaagaaggagccggtgccattaaccagaatgtggctctggccatagcagggaataatttcaatttgaaaacaagtggaatagtgctgtcttccttgccctataagcagtacaacatgctgaacgcggacactactcgcaacctcatgatctgcttcctctggatcatgaaaaatgctgatcagagcctcattaggaagtggattgctgacctgccatcaacgcagctcaacaggattttagatctacttttcatctgtgtgttatgttttgagtataagggaaaacagagttctgacaaagtcagtacccaagtcctgcagaagtcaagggatgtcaaggcccggctggaagaggctttgctccgtggggaaggggccagaggggagatgatgcgccgccgggctccagggaacgaccgatttccaggcctaaatgaaaatttgagatggaagaaagagcagacacattggcggcaagctaatgagaagctagataaaacaaaggccgagttagatcaagaagccttgatcagtggcaatctggctacagaagcacatttaatcatcctggatatgcaggaaaacattatccaggcgagctcggctctggactgtaaagacagcctgctgggaggtgttctgagggtgctggtgaattctctgaactgtgatcagagtaccacctacctgactcactgctttgcaacactccgtgctctcatcgccaagtttggagacttactctttgaagaggaggtggaacagtgtttcgacctatgtcaccaagtcctgcaccactgcagcagcagcatggatgtcacccggagccaagcctgtgccaccctttacctcctcatgaggttcagttttggagccaccagtaattttgcaagagtaaagatgcaagtaaccatgtccctggcatctttggtgggaagagcaccagactttaatgaagagcacctgagaagatccttgaggacaattttggcctattcagaagaggacacagccatgcagatgactccttttcccacccaggtggaggaacttctctgtaatctgaatagcatcttatatgacacagtgaaaatgagggaatttcaggaagatcctgagatgcttatggatctcatgtacagaattgccaagagttaccaggcatctcctgatctgcggctgacctggctccagaacatggcagagaaacacaccaagaagaagtgctacacggaggctgccatgtgcctggtgcacgccgctgcgttagtggctgagtatctgagcatgctggaggaccacagctacctgcccgtgggcagtgtcagcttccagaatatttcttccaatgtgctggaggagtctgtggtctctgaggacaccctgtcacctgacgaggatggggtgtgcgcaggccagtacttcaccgagagtggcctggtaggcctcctggagcaggccgcggagctcttcagcacgggaggcttatatgagacagttaatgaggtctacaagctggtcatccccatcctagaagcgcatcgagaattccggaagctgacactcactcacagcaagctgcagagagccttcgacagcatcgttaacaaggatcataagagaatgtttggaacctacttccgagttggtttctttggatccaaatttggggatttggatgaacaggagtttgtctacaaagagcctgcaattaccaagcttcctgagatctcacatagactagaggcattttatggtcaatgttttggtgcagaatttgtggaagtgattaaagactccactcctgtggacaaaaccaagttggatcctaacaaggcctacatacagatcacttttgtggagccctactttgatgagtatgagatgaaagacagggtcacatactttgagaagaatttcaacctccggaggttcatgtacaccaccccgttcaccctggaggggcggcctcggggagagctgcatgagcagtacagaaggaacacagtcctgaccactatgcacgccttcccctacatcaagaccaggatcagcgtcatccagaaggaggagtttgttttgacaccgattgaagttgccattgaagacatgaagaagaagaccctgcagttagcagttgccattaaccaggagccgcctgatgcaaagatgcttcagatggtgctgcaaggctctgtgggagctactgtaaatcagggaccactggaagtagcccaagtgtttttggctgaaattcctgctgatccaaaactctatcgacatcacaacaagttgaggttatgctttaaggaattcatcatgagatgtggtgaagctgtagagaaaaacaagcgtctcatcacggcagaccagagggaatatcagcaggaactcaaaaagaactataacaagctaaaagagaacctcaggccaatgatcgagcggaaaattccagaactgtacaagccaatattcagagttgagagtcaaaagagggactccttccacagatctagtttcaggaaatgtgaaacccagttgtcacagggcagctaagaaaagccatcttcattcgtggagactgtggccctgcaaccctggagaaggacttgctggtacttaaaaaatgggacatttgccacccaggactgactgtacactccctgatcagccagcactctggaagctttgggatcccaggaaccatggaattattcccaaatggactctgaccagatttttgccatactggggggtggcgggatggaggatgggtactcaggcatgactgcgtatttattaaagtgtgtttttccacaatgtaccaaacaaggcataagcagcttctcctgctgactggccaatcactgcccatctgagagatgatttcctctggcccatatttgaatttattggagtaactcaaattgcctgaggaaaaatggaaaaattatccaccagtcgattcaaactgaatttcactctttataggaaggcagggcaaacttgtaggagtacgaaacattttcaataaatctacaaagggaagccttactacaattccaaaaatcatcatggttggaaatttgggaggagattatttgtgaacttgttacccttttggtaatggtggactaattgctgtatagttatttttgttttattattactgttacattaatttaacatgcatttatagaagaatacattcaaagcactgatgtaggagatacacggtacttggagcagtcagccagaaatcacagatactgctttcacttaaatggaaacaattctccgataatgctttgctttttttcttatgtcactcttgtgtactatctatttttctcctctctgggaccaagtttctttttataaagcaataatatctctgttttcatttcagaacattgtgctgtctgtcagcatatgtatatcagctacaaaatatattcaactttgacttcttttgacaaaggactttaggaaaaagaggaacaaagacattatttgagaattaaattatatatttttaatatgactgtgaccttgactgataataaagatgtaataagaattgcaagctaaatgtt

SEQ ID NO: 5928 - protein, 2031 aa, Homo sapiens; identical to SEQ ID NO: 797

SEQ ID NO: 5929 - DNA, 1949 bp, Homo sapiens
gagtattgtcacatatcagcccagaaagtcacagggtacagcaactcatacttgctcccagcaccaggccagccccattctgcctccagggagtcacccaaaatagagagatgagggtaaaataagacctaggaatactatttatttgcctccatggcctttgaacttgcacatccaacgtaacggctcctgtgtgttcttgattgttccaattatcatttttcctctcgaatacctgagagcattcattattttgcaagagatttgagaatccctgtgccctaacttttctttccttgatgtgggatgttcttctgtgactagaaaccttctctatgtctacccacagaggctgaactttgtaaacaaactagcatcagcccggaacattacaataaagatccagtttatgtgtggagaagatgctagcaatgcgatgccggtcatctttggaaaatccagcgggcctgaatttctgcaggaagtgtacacagctgttacataccataataatggctgccaattctcttaaatgaacgtcttcaaactggatcctactgtctcccagttgccttggaaaaattgccacccaactactccatgcattctgctgagaaagtcccattacagaatcctcccattaagtgggctgaaggacataagggagtatttaatattgaagtgcaagctgtttcttctgtacacacccaggacaaccacctggagaagttcttcaccctctgccactccctggagagccaggtgaccttccccatccgcgtgctggatcagaaaatcagcgagatggcgctggagcatgagctgaagctcagcatcatctgcctgaactcctcccgcctggagccgctcgtgctcttcctgcacctggtgctggacaagctcttccagctgtccgtgcagcccatggtcatcgctggccagacagccaacttctcccagtttgccttcgagtccgtggtggccatcgccaacagtctgcacaacagcaaggacctgagcaaggaccagcatgggaggaactgcctgctggcttcctacgtgcactacgtcttccgcctgccagaggtgcaaagggatgtgcccaagtcaggcgctcccactgccctcctagaccctcggagctaccacacgtatggccgcacatcagctgctgctgtgagttcaaagctgctgcaggcccgggtgatgagcagcagtaacccagacctcgcggggacacactccgcagcagacgaggaagtgaagaacatcatgtcttcaaagatcgccgatcgcaactgcagccgaatgtcttactattgctctggcagtagtgatgctccaagttcacctgcagccccaaggccagccagcaaaaagcatttccatgaggagcttgcccttcagatggtggtcagcaccggaatggtgagagaaacagtcttcaagtatgcctggttcttctttgagcttctggtgaaaagcatggcccagcacgtacataacatggacaaacgggacagttttcggaggactcgtttttctgaccgtttcatggatgacataactactattgttaatgtggtcacctcggaaattgcagcccttttagtaaaaccacagaaggaaaatgaacaggcggaaaagatgaacatcagcctggctttcttcttgtatgaccttctctccctcatggatcggggctttgtgtttaacctcatcagacattattgcagccagctgtcagccaagctcagtaaccttccaacgctcatttccatgaggctagagttcctgagaatcctctgtagccatgagcattacctcaatctgaaccttttttttatgaatgctgatactgctccaacatctccttgtccttccatatcttcccaggtaataaaagaattatttaactaaaagaattattcaagctatttcatttaact

SEQ ID NO: 5930 - protein, 439 aa, Homo sapiens
MHSAEKVPLQNPPIKWAEGHKGVFNIEVQAVSSVHTQDNHLEKFFTLCHSLESQVTFPIRVLDQKISEMALEHELKLSIICLNSSRLEPLVLFLHLVLDKLFQLSVQPMVIAGQTANFSQFAFESVVAIANSLHNSKDLSKDQHGRNCLLASYVHYVFRLPEVQRDVPKSGAPTALLDPRSYHTYGRTSAAAVSSKLLQARVMSSSNPDLAGTHSAADEEVKNIMSSKIADRNCSRMSYYCSGSSDAPSSPAAPRPASKKHFHEELALQMVVSTGMVRETVFKYAWFFFELLVKSMAQHVHNMDKRDSFRRTRFSDRFMDDITTIVNVVTSEIAALLVKPQKENEQAEKMNISLAFFLYDLLSLMDRGFVFNLIRHYCSQLSAKLSNLPTLISMRLEFLRILCSHEHYLNLNLFFMNADTAPTSPCPSISSQVIKELFN

SEQ ID NO: 5931 - DNA, 6128 bp, Homo sapiens
agaaagtcacagggtacagcaactcatacttgctcccagcaccaggccagccccattctgcctccagggagtcacccaaaatagagagatgagggtaaaataagacctaggaatactatttatttgcctccatggcctttgaacttgcacatccaacgtaacggctcctgtgtgttcttgattgttccaattatcatttttcctctcgaatacctgagagcattcattattttgcaagagatttgagaatccctgtgccctaacttttctttccttgatgtgggatgttcttctgtgactagaaaccttctctatgtctacccacagaggctgaactttgtaaacaaactagcatcagcccggaacattacaataaagatccagtttatgtgtggagaagatgctagcaatgcgatgccggtaaggagggaaacgaacatttgcctcaaatcagggtgggctgctcacccctgtcacttcacacaagtccgggactcatcagtgtacaaagtccgtctattccaggccaatactgctcagcatgtgcaagggcttctgtgcccaggatatcagtggggaaacagggtcatctttggaaaatccagcgggcctgaatttctgcaggaagtgtacacagctgttacataccataataagtctcctgacttttatgaagaagtgaaaattaagctccccgctaagctcacagtaaatcaccacctcctgttcaccttctaccatatcagctgtcagcagaagcaaggagcctccgtggaaactctcctgggatattcatggctgccaattctcttaaatgaacgtcttcaaactggatcctactgtctcccagttgccttggaaaaattgccacccaactactccatgcattctgctgagaaagtcccattacagaatcctcccattaagtgggctgaaggacataagggagtatttaatattgaagtgcaagctgtttcttctgtacacacccaggacaaccacctggagaagttcttcaccctctgccactccctggagagccaggtgaccttccccatccgcgtgctggatcagaaaatcagcgagatggcgctggagcatgagctgaagctcagcatcatctgcctgaactcctcccgcctggagccgctcgtgctcttcctgcacctggtgctggacaagctcttccagctgtccgtgcagcccatggtcatcgctggccagacagccaacttctcccagtttgccttcgagtccgtggtggccatcgccaacagtctgcacaacagcaaggacctgagcaaggaccagcatgggaggaactgcctgctggcttcctacgtgcactacgtcttccgcctgccagaggtgcaaagggatgtgcccaagtcaggcgctcccactgccctcctagaccctcggagctaccacacgtatggccgcacatcagctgctgctgtgagttcaaagctgctgcaggcccgggtgatgagcagcagtaacccagacctcgcggggacacactccgcagcagacgaggaagtgaagaacatcatgtcttcaaagatcgccgatcgcaactgcagccgaatgtcttactattgctctggcagtagtgatgctccaagttcacctgcagccccaaggccagccagcaaaaagcatttccatgaggagcttgcccttcagatggtggtcagcaccggaatggtgagagaaacagtcttcaagtatgcctggttcttctttgagcttctggtgaaaagcatggcccagcacgtacataacatggacaaacgggacagttttcggaggactcgtttttctgaccgtttcatggatgacataactactattgttaatgtggtcacctcggaaattgcagcccttttagtaaaaccacagaaggaaaatgaacaggcggaaaagatgaacatcagcctggctttcttcttgtatgaccttctctccctcatggatcggggctttgtgtttaacctcatcagacattattgcagccagctgtcagccaagctcagtaaccttccaacgctcatttccatgaggctagagttcctgagaatcctctgtagccatgagcattacctcaatctgaaccttttttttatgaatgctgatactgctccaacatctccttgtccttccatatcttcccagaactcaagctcctgctccagcttccaggaccagaagatcgccagcatgttcgatctgacttccgagtaccgccagcagcacttcctcaccgggctcctcttcacagaactggctgctgccctggatgccgaaggggaaggaatcagcaaagtacaaaggaaagctgtcagtgcaattcacagcctgctaagttctcacgacctggacccacgctgtgtcaaaccagaggtgaaggtcaaaatcgccgccctttacctacctttagttggcatcattttggatgctttgccacagctctgtgactttacagttgcagatactcgcagataccgcaccagtggctcggatgaagaacaagaaggagccggtgccattaaccagaatgtggctctggccatagcagggaataatttcaatttgaaaacaagtggaatagtgctgtcttccttgccctataagcagtacaacatgctgaacgcggacactactcgcaacctcatgatctgcttcctctggatcatgaaaaatgctgatcagagcctcattaggaagtggattgctgacctgccatcaacgcagctcaacaggattttagatctacttttcatctgtgtgttatgttttgagtataagggaaaacagagttctgacaaagtcagtacccaagtcctgcagaagtcaagggatgtcaaggcccggctggaagaggctttgctccgtggggaaggggccagaggggagatgatgcgccgccgggctccagggaacgaccgatttccaggcctaaatgaaaatttgagatggaagaaagagcagacacattggcggcaagctaatgagaagctagataaaacaaaggccgagttagatcaagaagccttgatcagtggcaatctggctacagaagcacatttaatcatcctggatatgcaggaaaacattatccaggcgagctcggctctggactgtaaagacagcctgctgggaggtgttctgagggtgctggtgaattctctgaactgtgatcagagtaccacctacctgactcactgctttgcaacactccgtgctctcatcgccaagtttggagacttactctttgaagaggaggtggaacagtgtttcgacctatgtcaccaagtcctgcaccactgcagcagcagcatggatgtcacccggagccaagcctgtgccaccctttacctcctcatgaggttcagttttggagccaccagtaattttgcaagagtaaagatgcaagtaaccatgtccctggcatctttggtgggaagagcaccagactttaatgaagagcacctgagaagatccttgaggacaattttggcctattcagaagaggacacagccatgcagatgactccttttcccacccaggtggaggaacttctctgtaatctgaatagcatcttatatgacacagtgaaaatgagggaatttcaggaagatcctgagatgcttatggatctcatgtacagaattgccaagagttaccaggcatctcctgatctgcggctgacctggctccagaacatggcagagaaacacaccaagaagaagtgctacacggaggctgccatgtgcctggtgcacgccgctgcgttagtggctgagtatctgagcatgctggaggaccacagctacctgcccgtgggcagtgtcagcttccagaatatttcttccaatgtgctggaggagtctgtggtctctgaggacaccctgtcacctgacgaggatggggtgtgcgcaggccagtacttcaccgagagtggcctggtaggcctcctggagcaggccgcggagctcttcagcacgggaggcttatatgagacagttaatgaggtctacaagctggtcatccccatcctagaagcgcatcgagaattccggaagctgacactcactcacagcaagctgcagagagccttcgacagcatcgttaacaaggatcataagagaatgtttggaacctacttccgagttggtttctttggatccaaatttggggatttggatgaacaggagtttgtctacaaagagcctgcaattaccaagcttcctgagatctcacatagactagaggcattttatggtcaatgttttggtgcagaatttgtggaagtgattaaagactccactcctgtggacaaaaccaagttggatcctaacaaggcctacatacagatcacttttgtggagccctactttgatgagtatgagatgaaagacagggtcacatactttgagaagaatttcaacctccggaggttcatgtacaccaccccgttcaccctggaggggcggcctcggggagagctgcatgagcagtacagaaggaacacagtcctgaccactatgcacgccttcccctacatcaagaccaggatcagcgtcatccagaaggaggagtttgttttgacaccgattgaagttgccattgaagacatgaagaagaagaccctgcagttagcagttgccattaaccaggagccgcctgatgcaaagatgcttcagatggtgctgcaaggctctgtgggagctactgtaaatcagggaccactggaagtagcccaagtgtttttggctgaaattcctgctgatccaaaactctatcgacatcacaacaagttgaggttatgctttaaggaattcatcatgagatgtggtgaagctgtagagaaaaacaagcgtctcatcacggcagaccagagggaatatcagcaggaactcaaaaagaactataacaagctaaaagagaacctcaggccaatgatcgagcggaaaattccagaactgtacaagccaatattcagagttgagagtcaaaagagggactccttccacagatctagtttcaggaaatgtgaaacccagttgtcacagggcagctaagaaaagccatcttcattcgtggagactgtggccctgcaaccctggagaaggacttgctggtacttaaaaaatgggacatttgccacccaggactgactgtacactccctgatcagccagcactctggaagctttgggatcccaggaaccatggaattattcccaaatggactctgaccagatttttgccatactggggggtggcgggatggaggatgggtactcaggcatgactgcgtatttattaaagtgtgtttttccacaatgtaccaaacaaggcataagcagcttctcctgctgactggccaatcactgcccatctgagagatgatttcctctggcccatatttgaatttattggagtaactcaaattgcctgaggaaaaatggaaaaattatccaccagtcgattcaaactgaatttcactctttataggaaggcagggcaaacttgtaggagtacgaaacattttcaataaatctacaaagggaagccttactacaattccaaaaatcatcatggttggaaatttgggaggagattatttgtgaacttgttacccttttggtaatggtggactaattgctgtatagttatttttgttttattattactgttacattaatttaacatgcatttatagaagaatacattcaaagcactgatgtaggagatacacggtacttggagcagtcagccagaaatcacagatactgctttcacttaaatggaaacaattctccgataatgctttgctttttttcttatgtcactcttgtgtactatctatttttctcctctctgggaccaagtttctttttataaagcaataatatctctgttttcatttcagaacattgtgctgtctgtcagcatatgtatatcagctacaaaatatattcaactttgacttcttttgacaaaggactttaggaaaaagaggaacaaagacattatttgagaattaaattatatatttttaatatgactgtgaccttgactgataataaagatgtaataagaattgcaagctaaatgtt

SEQ ID NO: 5932 - protein, 1566 aa, Homo sapiens
MCGEDASNAMPVRRETNICLKSGWAAHPCHFTQVRDSSVYKVRLFQANTAQHVQGLLCPGYQWGNRVIFGKSSGPEFLQEVYTAVTYHNKSPDFYEEVKIKLPAKLTVNHHLLFTFYHISCQQKQGASVETLLGYSWLPILLNERLQTGSYCLPVALEKLPPNYSMHSAEKVPLQNPPIKWAEGHKGVFNIEVQAVSSVHTQDNHLEKFFTLCHSLESQVTFPIRVLDQKISEMALEHELKLSIICLNSSRLEPLVLFLHLVLDKLFQLSVQPMVIAGQTANFSQFAFESVVAIANSLHNSKDLSKDQHGRNCLLASYVHYVFRLPEVQRDVPKSGAPTALLDPRSYHTYGRTSAAAVSSKLLQARVMSSSNPDLAGTHSAADEEVKNIMSSKIADRNCSRMSYYCSGSSDAPSSPAAPRPASKKHFHEELALQMVVSTGMVRETVFKYAWFFFELLVKSMAQHVHNMDKRDSFRRTRFSDRFMDDITTIVNVVTSEIAALLVKPQKENEQAEKMNISLAFFLYDLLSLMDRGFVFNLIRHYCSQLSAKLSNLPTLISMRLEFLRILCSHEHYLNLNLFFMNADTAPTSPCPSISSQNSSSCSSFQDQKIASMFDLTSEYRQQHFLTGLLFTELAAALDAEGEGISKVQRKAVSAIHSLLSSHDLDPRCVKPEVKVKIAALYLPLVGIILDALPQLCDFTVADTRRYRTSGSDEEQEGAGAINQNVALAIAGNNFNLKTSGIVLSSLPYKQYNMLNADTTRNLMICFLWIMKNADQSLIRKWIADLPSTQLNRILDLLFICVLCFEYKGKQSSDKVSTQVLQKSRDVKARLEEALLRGEGARGEMMRRRAPGNDRFPGLNENLRWKKEQTHWRQANEKLDKTKAELDQEALISGNLATEAHLIILDMQENIIQASSALDCKDSLLGGVLRVLVNSLNCDQSTTYLTHCFATLRALIAKFGDLLFEEEVEQCFDLCHQVLHHCSSSMDVTRSQACATLYLLMRFSFGATSNFARVKMQVTMSLASLVGRAPDFNEEHLRRSLRTILAYSEEDTAMQMTPFPTQVEELLCNLNSILYDTVKMREFQEDPEMLMDLMYRIAKSYQASPDLRLTWLQNMAEKHTKKKCYTEAAMCLVHAAALVAEYLSMLEDHSYLPVGSVSFQNISSNVLEESVVSEDTLSPDEDGVCAGQYFTESGLVGLLEQAAELFSTGGLYETVNEVYKLVIPILEAHREFRKLTLTHSKLQRAFDSIVNKDHKRMFGTYFRVGFFGSKFGDLDEQEFVYKEPAITKLPEISHRLEAFYGQCFGAEFVEVIKDSTPVDKTKLDPNKAYIQITFVEPYFDEYEMKDRVTYFEKNFNLRRFMYTTPFTLEGRPRGELHEQYRRNTVLTTMHAFPYIKTRISVIQKEEFVLTPIEVAIEDMKKKTLQLAVAINQEPPDAKMLQMVLQGSVGATVNQGPLEVAQVFLAEIPADPKLYRHHNKLRLCFKEFIMRCGEAVEKNKRLITADQREYQQELKKNYNKLKENLRPMIERKIPELYKPIFRVESQKRDSFHRSSFRKCETQLSQGS

SEQ ID NO: 5933 - DNA, 2407 bp, Homo sapiens
ctccctccctcttcccccttcccctctccctgcagccgcgtccacactgcgccgcccgggcagcccagagcgcggcgcgcacgggcaccggcggcgagtgccgcggccactgcccctcccgggaccccctgtacgccgtccgcgccgtccagggtcacaccggcgacggaacccgccggcagcaattagccagcatcccggggtcggcccccagaagcattccccggcccaggacgaggatgaacaggacaggcgaggcacaaagtcgcaactgaactttttagaaacattatttgtgtgtgtatgtgtgtagcaggggagaatgagctgatgccgagggtccagccaccccgcctctgcctcctcctccccctgccgccgctgccctcgcagacgcgcgcgcacacacggcacttgggccgggtttccgcgctccgtccccccgtttggatgggggttttcatttccgaaggaggcacagcccgcggagcgctctgaagggctggagccccaagttactcctcgccagcgccggccgcccgctgtcactcgcgctggccggccgggggaagggacccgcacgccgggctttgttgtggaaatcccggttacctggtcccttatttcgcgtgagtctttggcgtccacgaccttgagtctgacggaaagtcagtcggcctcaagccatgctggccacaggacccagtgcagccctgcttcccgcaccgtgggtctttcctgatagctgcaggcttgagattgcagcctcaggataggacacgttcagatgccttccagactacacacactatgcttagattcgagagtctttcctgaccttaaaatttgtcccttgcttactttcacactgcagaagatttatatatatattcatcattatttttgcagcagtacaagtggaaacttcaaaaaaatcattccctttcatgtcctggtctttttaagtcttgatatgtaaccattttcataaatgtccaaacagagattgtcattccccttaaaaacagaaacaaaacacaaaactagtgcttgtgaaaacacacagcgcaaagacaattatcctattgcattaaaaaaaaaatcagtctgcctagagacatttcattggctgcattgtcttaattccctaacgaaactgcatcaaaatgtcagttgtaatttagcctctgatcagctgttaaatattatttaaatatttacaggtcctgtggggtatctcccattacccatgtcgccctcaaattacataagcgatcataaaataagaagaaaaaaaaaggtctttagtagatcacagcagagttaccactgataagagtgttggctttgttcagttgtttctaaattaccagccgtcaagcacagtagcccctaaaaccaattttgagcaaggataaattcaactccctcatctgagaaccttgactttccagttgccttgaagtattgggaatagtaactgtacattttcaatttaattatttggtattttatttgactgtcttggccatgtcattttatggaagcatttttaaatagcactttttgttagtggtgtggaatttctgcggttattatttttttttttttttgcaacagatgaagcaaaaaaaaaaaagcactcattggagaaatagtgagtgtaaaaagagatttattttgtacagacagcaaagtatcctgtgtaatgttgctgacataaagcactttgggggaaaaaagtggaaatctgttttccataaatcacacagactcttgtacatagttatatacactcacgtagagaaatgaactgcatatatcatactggatatggggccgattttactctagaggcacatctggtgcttattgtcataaatcttttaaagaattaggtacacttttttctattaatatgtatagttttgtgatttgtcacagttatgtttcatataatcataagttattttgtcttgttcatgaagtcctttttttatgtcaaaagtaaaatgaagggattgtgcacttggtacagaataaaactggaaatagagaagacgccctcctgcctaaaatcctccttcagcctgtcggtttaaaacacaatggcaaccatcattgtttgtttgtttgtttttttgttttgttttaccatcagcctcttacatactgggaatggtaattataattaaaggcagatgatgcgggagggaatgttcaagtccagctttaaaatgctgcattgctttgggccagagctgtagcctggatttaattatagatatgaggaggaaatggcagtaaaaatgaatgtctccctgagtcctttacatgttgggagtgtccataaataaaacatgaagttttatttcatcagatttaattaaagcttttatacatgttt

SEQ ID NO: 5934 - protein, 73 aa, Homo sapiens [sequence omitted]

SEQ ID NO: 5935 - DNA, 3117 bp, Homo sapiens
atcctttatggttgaagggtgttggaggaagcagagttttcatcagctgctgaagtggcaactaatagaggtttgaatggccgtagaaaaatattgtgttacttgtttgttgtctaggggctcttggctttgggcctcagtgcaagtccattggaaaaggcagctgcaacaatctagtggtcaccagcagtcccatgatggttcagcgactgggactcatttcacctccagcaagccaggtctctacagcatgcaaccagatcagtcctagcttacagagggcaatgaatgcagccaacctgaatatacctccttcagataccaggtcccttatttcgcgtgagtctttggcgtccacgaccttgagtctgacggaaagtcagtcggcctcaagcatgaagcaggagtggtcccagggctacagggccctcccttcgctctccaaccacggctctcagaatggccttgatctaggggatctccttagccttcctcccgggacatccatgtccagcaatagtgtctctaactcattaccatcctacctttttggcacggaaagtagccactctccttaccctagtcctcggcactcatccaccaggtcccactcggcccgctccaagaagagagcgctgtccttgtccccgctgtccgatggcatcgggatagatttcaataccatcatccgcacgtcgcccacgtccttggtggcctacatcaacgggtcgagggcttcgccggccaacctgtccccgcagccggaggtctacgggcatttcctgggcgtgcgcggcagctgcattccccagccgcgcccggtgcccggcagccagaagggcgtgctggtggcccctggaggcctggcgctgccggcctacggcgaggacggggccctggagcacgagcgcatgcaacagctggagcacggcggcctgcagccaggcctggtcaaccacatggtggtgcagcatggcctgccgggccccgacagccagtcggccggcctgttcaagaccgaacgcctggaggagttcccgggcagcaccgtagacctaccccccgcgcctccgctccctcctctgccgccgcccccaggccccccacccccttaccatgcccatgcgcaccttcaccacccggagctcgggccccacgcccagcagctggccttgccccaggccaccctggacgacgacggggagatggacggcatcgggggcaagcattgctgccgctggatcgactgcagcgccctgtacgaccagcaggaggagctcgtgcggcacatcgagaaggtccacatcgaccagcgcaaaggggaggacttcacttgcttctgggccggttgccctcgaagatacaagcccttcaacgcccgctataaactgctgatccacatgagagtccactctggggagaagcccaacaagtgtacgtttgaaggttgcgagaaggccttttcaaggcttgaaaatctcaagatccacttgcggagccacacaggcgagaagccgtatttgtgccagcatccgggttgtcagaaggccttcagtaactccagtgaccgcgccaaacaccagcggacgcatctggacaccaaaccttatgcttgtcaaattccaggatgtaccaaacgctacacagacccaagttccctaagaaagcatgtgaaggcacattcttccaaagagcaacaagcaaggaaaaagttgcggtccagcacagagctccatccagacctgctcacagattgcctcaccgtgcagtccctgcagccggccacttcccctagagatgctgctgctgaagggaccgtgggacgctcccctggacccgggcctgacctctattcagctcccattttctccagcaattattcaagccgaagtggaacagctgctggggccgtaccacccccacatcctgtcagtcacccttctccaggacataatgtacaggggagccctcacaacccctcctcccagttacctccactcacagctgtggacgcaggagctgagaggtttgcaccttctgctccatctcctcaccacatcagcccccggagagttccagctccttcttcaatactgcaaagaacacagcctccctatacccagcagccatcaggttcacacctgaagtcctatcagccagaaacaaactcttcttttcaaccaaatggtatccatgtccatggattttatgggcagctgcagaagttctgtcccccacactaccccgattcccagagaattgtgccgcctgtcagctcctgcagtgtggtgccttcgtttgaggactgcctagtccctacatccatgggccaggccagttttgatgttttccacagagccttctcgactcactcgggcattacagtgtatgatttaccttcaagttcctcgagcctctttggggagtctctccgcagcggggctgaagatgctaccttcttgcagatcagcaccgtggaccgctgtcctagccagctctcctctgtctacaccgaaggctaaaagctctcttggccactcctgcacacccaggaccttgatgttgcttgccaccttttgttttcgtactctcacagactgcttgaggaaggatgtcagcccaatcagcgggccctgcagagttactgatgttctttcagaaggcaggactgaatggcagagctagctttgcaggaatcattacagttgctcctttttctctctggttttcctggactatgtgaccaggaggactgtcttttcaaagggaatttagagcctcactctcctggatacctgttacttcctggctgtcaacccttaaaggaccccagtgaaatgatgtgcatatgaaaatgtagtttggggatgactctacctgaaaactccaaacagggaaaaagacctcaattacgagaggcatagtgacctgcctcacctaatcctcacccttgctgctcctgatgcaaagccaggcacaacaagggaaatccatgtccaaagcatagtgtggtctcaactcttagaaactccctgggtttcccttttctcttagccacatgctaaccagttgcttctcagtgtttctcttcaatagaaaaataaggttttatatgcc

SEQ ID NO: 5936 - protein, 775 aa, Homo sapiens; identical to SEQ ID NO: 799

SEQ ID NO: 5937 - DNA, 647 bp, Homo sapiens
acattcttgtggctctcttgaaattctcagggtgacttttaaaatgatatattaggaaaatgctttaaaattataaaaccaccttaataatttttctcccaaagaatgaaaatggcaaattagaaattgtgtgtttcaaggaggatggcaaagggaaaagatcattttggaatgttgaaagtgttcctctgtaccttgaaaaatcgggagagagagagagagagactgcaaggttttgattaaggacatctacttatgagttatttctttattcacattggcccaatggttacataacagttatctgctgggacatttcccatacatcatacctctgaaatgtgtctataggcatttgaagcccatgcctcccaacgttgcattgtctccttagttaaattcaaggactactttgtgataattgctaattcctgagtggtaacttctagtgtattagttcaaactgaaagatcttacagatctttttgcataacattggtcaaagcatcataaacaagttttaaaggaagaaaaaagacttcagtggtgaaaggaaaaaataatgacaaagctgtttcctgtgagggtacatgtgcatatttctgagtgctaacatacaggtacataaagcagggtgctttaatttt

SEQ ID NO: 5938 - protein, 32 aa, Homo sapiens
MAKGKDHFGMLKVFLCTLKNRERERERLQGFD

SEQ ID NO: 5939 - DNA, 1207 bp, Homo sapiens
ctacccactccgacgctggctggtgccgggggccgggacgctccgtacgccgcccgccagggtgtggagccgcactggggcaagatcaggtgggacagcccaaagactccgggccaagttcctgggggactcggcggagatggaagatgattctcgaagctctccatttccttaattttgagttatcttcagtccttcttcaatgctgtgactgagtgcttgctgattattgtgcttgctgatcctgactaatactctctcttgatgagcttcatattcatcacgacttggataaattttgctgatgagtgcatcaaactttgggtctggccttggtgatcttttggaaactagttttttccaacaggtaagacattctttgttgccacttctaagggctatgatgttgcagtctgcacagaaacgatgtaaagactcctttgtagtcatggtgttcttcaacatatccaaacaaattgggcacattaaatcactgtgcagacttcgaggtgaaaccacaatttctaagccatctgttattgccttctgtaagagagtcactgaggtgttcattgtaactcatataaactgagttcccatgttttgcttaatggttgagttccttttgtctgcacagcctgagacattgaggctcccaccccagccaggggctcactggccatgcaggagcgagactcgggtaatcggctgccgcggcagctggcaccgccttacaatatagcgagccgcaaagagcattttaacacaagcctccagggttcccggacaccccactctgtccccacggataccaaaatctgcgcgtatccgcgcatgttcaagtccctaatatattctggtgcatatactatggtgtcaaatttgtatgtaacctatgtacatccttccaaatattctaaatctctaggttatttataataccttaatacaatgtaagtgctatttaaatggttgttatactgtgttttttatttgtataatttttattgttgtattattgctttttattatttgtttttttctgaacatttttgatctgcagttggttggatctaggatgtaaactgcaagtgtggcaggccgactgcactgttttgttactagagggagtgagaacacacctgtggacttgagcaccttccattcaccagttgctccatgggcatactctaattcaggtctcccc

SEQ ID NO: 5940 - protein, 95 aa, Homo sapiens
MSASNFGSGLGDLLETSFFQQVRHSLLPLLRAMMLQSAQKRCKDSFVVMVFFNISKQIGHIKSLCRLRGETTISKPSVIAFCKRVTEVFIVTHIN

SEQ ID NO: 5941 - DNA, 618 bp, Homo sapiens
cccgccagggtgtggagccgcactggggcaagatcaggtgggacagcccaaagactccgggccaagttcctgggggactcggcggagatggaagatgattctcgaagctctccatttccttaattttgagttatcttcagtccttcttcaatgctgtgactgagtgcttgctgattattgtgcttgctgatcctgactaatactctctcttgatgagcttcatattcatcacgacttggataaattttgctgatgagtgcatcaaactttgggtctggccttggtgatcttttggaaactagttttttccaacagttggttggatctaggatgtaaactgcaagtgtggcaggccgactgcactgttttgttactagagggagtgagaacacacctgtggacttgagcaccttccattcaccagttgctccatgggcatactctaattcaggtctccccacaaccctctgagttaatatttctctccccattttaaagatgagaaaataaagcctagacagtttaacttggcttctgttttgaaactagctgagagatgaattaggctttgatccatgtctatcagcttcaaccttcatgctttttcttctgtacccc

SEQ ID NO: 5942 - protein, 49 aa, Homo sapiens
VHQTLGLALVIFWKLVFSNSWLDLGCKLQVWQADCTVLLLEGVRTHLWT

SEQ ID NO: 5943 - DNA, 421 bp, Homo sapiens
aagaaacgcggagacagactactgggactgcgacgtctcctctcctgttcgctgcgatatgccggcgtcgtgttgagcgggctgcggacacagacagcctgcccggccccactgagtgtttgatccccatcctcgcagctctctagaggaccagagttggcggtgcagcccagcggagcttcgaagcgacatgtcctccaacattttagcccagcaagtcttgtggcccctgaggatataacccagagagggctgctttctgggatttctcggctgtggttcaagtggagtacacacagttgagaccctgtctgccctgggcagctttcttgacccttgggggaccagctcacaataaatcctaggcttctgttgctccttgctgcctatccataagcaataaacctgcttcagctcattc

SEQ ID NO: 5944 - protein, 59 aa, Homo sapiens
SPSSQLSRGPELAVQPSGASKRHVLQHFSPASLVAPEDITQRGLLSGISRLWFKWSTHS

SEQ ID NO: 5945 - DNA, 607 bp, Homo sapiens
gtcacggctcggtgggactcccggagcccggatgcgcgctgggactcggtgcagtccagctccacggtcgcgcgtcccacagctcccttcacgtccgttcctccgtttccccaccttgggagggccaggacttccgaggctttagggggcaggaagctgcgagaaggtggcgcttgcttagaaacctggacccctactgaatggatctgctggcacctagacctcagagaagggggaactgaagactgaagtctgaccactgttctttgttgaaaatttctttctcaggggcttggagggatcacatctacaatcctgagctaatattctcttctgctgtccccaaaatttaaacgaagcttctcttaacccattgcaaatgagaaaaatctttgaatctacctatgactataagcccttatttcaagatatcctgcctttttaggccagaaccaaagtgtaacctccatctattgatttacaattttgcctgtaactttggctttcctgaaatttaccccagccttaaaaaaaaaaaagaacagaaaaagaaaactgcaaggcatcagggaggtcagaatttgggcatgagctgcctgatcctcct

SEQ ID NO: 5946 - protein, 66 aa, Homo sapiens
MTISPYFKISCLFRPEPKCNLHLLIYNFACNFGFPEIYPSLKKKKEQKKKTARHQGGQNLGMSCLI

SEQ ID NO: 5947 - DNA, 2007 bp, Homo sapiens
tcacgtgataccccccagtgtacctttcctgcagcgtgttacgtggcgcacagagaacgtcgcttccagaggaccgttttttcgtaactggcagtagtaatctggcggttgacactctcgttgcctgtataggctgatggcccactcacctttttagctgggctcctgacctgtccggccagaaagttgccactgggaaacctggacccctactgaatggatctgctggcacctagacctcagagaagggggaactgaagactgaagtctgaccactgttctttgttgaaaatttctttctcaggggcttggagggatcacatctacaatcctgagctaatattctcttctgctgtccccaaaatttaaacgaagcttctcttaacccattgcaaatgagaaaaatctttgaatctacctatgactataagcccttatttcaagatatcctgcctttttaggccagaaccaaagtgtaacctccatctattgatttacaattttgcctgtaactttggctttcctgaaatttaccccagccttaaaaaaaaaaaagaacagaaaaagaaaactgcaaggcatcagggaggtcagaatttgggcatgagctgcctgatcctccttgctttgcatctttgcaaatagatgccttcagctgtgcatgatggctcacacctctcatcccagcactttgggagggcaaggcgggaggattgctccatcccaggagttcgagatcaggggcaaaatgccgaaaccctgtctctacaaaaaattaaaaaattagctgggcatgatggtgcacttctgtagtcccagctacttgggaggctgaggcagggggattgcttgagcccaagaggttgaggctacatgagccatcatcgtgccactgcactccagcctgggaaacagaatgagaccctgtctcaaaacaaaacatttgaaaaataacaagttcaggtgcagtggctcatacctgtaatcccagcactttgggaggccaaagtggtcggatcacttgaggccaggagttcatgaccagcctggccaacatggcaaaaccccatctctactaaaaatacaaaaattagctgggtgtggtggctggcaactctagtcccagctactccggaggctgaggcaggaaaatcacttgaacccaggaggcggaggttgaagtgagccgagatcacaccactgcactccagcctgggcaacagagcaagactctgtctccaaaaataacaaaaaataaatacatgccttcctttctactgctgcacaacctcactgtgtcaggcaggcatctctggatccagctggtttttgttttgctgaggctcagcttcttcctggaactttttgaaacaacactcaagggtctcaaatggctgacatgatggtctgtgacctgaaagttgttgaatagttggagtgttctgcattcatgtggaagaggctaaaggatgtttgatgaagcactatgggctgccctggaagaggactgaagaagcagctgcaggaaagaaacgtccactctgctccagtcaaccccactgctggtgtcctctgcactgccttgcactccctgaagagagcctgggcaacagagcgagactccatctcaaaaaaaaaaaaaaaaaaaattggggactatgtatatagatttactacactgaagccctccagcagtctaagaactgatgcctctaacgaaggaaaggactgcatgtttctgatgaagctaccatgacctaccagatttccaacgcctgccaaaattaatctatttgtctgtggtagaagaggccataccattgtggcccttgaaacttactgtatgatgttttatttagtgaacagttcacatacccaaatggttgtaactgatactgctgaatatattgtaagaacagaagtgttaagtatgtataacacttcttttgattgtaaggaatgttcccagtggggaaatgccataattaaaacagtgatcgtgggatg

SEQ ID NO: 5948 - protein, 89 aa, Homo sapiens
MGCPGRGLKKQLQERNVHSAPVNPTAGVLCTALHSLKRAWATERDSISKKKKKKIGDYVYRFTTLKPSSSLRTDASNEGKDCMFLMKLP

SEQ ID NO: 5949 - DNA, 2090 bp, Homo sapiens
tcacgtgataccccccagtgtacctttcctgcagcgtgttacgtggcgcacagagaacgtcgcttccagaggaccgttttttcgtaactggcagtagtaatctggcggttgacactctcgttgcctgtataggctgatggcccactcacctttttagctgggctcctgacctgtccggccagaaagttgccactgggaaacctggacccctactgaatggatctgctggcacctagacctcagagaagggggaactgaagactgaagtctgaccactgttctttgttgaaaatttctttctcaggggcttggagggatcacatctacaatcctgagctaatattctcttctgctgtccccaaaatttaaacgaagcttctcttaacccattgcaaatgagaaaaatctttgaatctacctatgactataagcccttatttcaagatatcctgcctttttaggccagaaccaaagtgtaacctccatctattgatttacaattttgcctgtaactttggctttcctgaaatttaccccagccttaaaaaaaaaaaagaacagaaaaagaaaactgcaaggcatcagggaggtcagaatttgggcatgagctgcctgatcctccttgctttgcatctttgcaaatagatgccttcagctgtgcatgatggctcacacctctcatcccagcactttgggagggcaaggcgggaggattgctccatcccaggagttcgagatcaggggcaaaatgccgaaaccctgtctctacaaaaaattaaaaaattagctgggcatgatggtgcacttctgtagtcccagctacttgggaggctgaggcagggggattgcttgagcccaagaggttgaggctacatgagccatcatcgtgccactgcactccagcctgggaaacagaatgagaccctgtctcaaaacaaaacatttgaaaaataacaagttcaggtgcagtggctcatacctgtaatcccagcactttgggaggccaaagtggtcggatcacttgaggccaggagttcatgaccagcctggccaacatggcaaaaccccatctctactaaaaatacaaaaattagctgggtgtggtggctggcaactctagtcccagctactccggaggctgaggcaggaaaatcacttgaacccaggaggcggaggttgaagtgagccgagatcacaccactgcactccagcctgggcaacagagcaagactctgtctccaaaaataacaaaaaataaatacatgccttcctttctactgctgcacaacctcactgtgtcaggcaggcatctctggatccagctggtttttgttttgctgaggctcagcttcttcctggaactttttgaaacaacactcaagggtctcaaatggctgacatgatggtctgtgacctgaaagttgttgaatagttggagtgttctgcattcatgtggaagaggctaaaggatgtttgatgaagcactatgggctgccctggaagaggactgaagaagcagctgcagaatcaaggtctctgttgcccaggctagagggcagtggtgcaatcacacctcactgcagcctcaacatcccaggctcaggaaagaaacgtccactctgctccagtcaaccccactgctggtgtcctctgcactgccttgcactccctgaagagagcctgggcaacagagcgagactccatctcaaaaaaaaaaaaaaaaaaaattggggactatgtatatagatttactacactgaagccctccagcagtctaagaactgatgcctctaacgaaggaaaggactgcatgtttctgatgaagctaccatgacctaccagatttccaacgcctgccaaaattaatctatttgtctgtggtagaagaggccataccattgtggcccttgaaacttactgtatgatgttttatttagtgaacagttcacatacccaaatggttgtaactgatactgctgaatatattgtaagaacagaagtgttaagtatgtataacacttcttttgattgtaaggaatgttcccagtggggaaatgccataattaaaacagtgatcgtgggatgaatac

SEQ ID NO: 5950 - protein, 89 aa, Homo sapiens
MKHYGLPWKRTEEAAAESRSLLPRLEGSGAITPHCSLNIPGSGKKRPLCSSQPHCWCPLHCLALPEESLGNRARLHLKKKKKKNWGLCI

SEQ ID NO: 5951 - DNA, 350 bp, Homo sapiens
agagaacgtcgcttccagaggaccgttttttcgtaactggcagtagtaatctggcggttgacactctcgttgcctgtataggctgatggcccactcacctttttagctgggctcctgacctgtccggccagaaagttgccactgggaaacctggacccctactgaatggatctgctggcacctagacctcagagaagggggaactgaagactgaaatggctgacatgatggtctgtgacctgaaagttgttgaatagttggagtgttctgcattcatgtggaagaggctaaaggatgtttgatgaagcactatgggctgccctggaagaggactgaagaagcagctgcag

SEQ ID NO: 5952 - protein, 32 aa, Homo sapiens
WPTHLFSWAPDLSGQKVATGKPGPLLNGSAGT

SEQ ID NO: 5953 - DNA, 455 bp, Homo sapiens
atcacttgaacccaggaggcggaggttgaagtgagccgagatcacaccactgcactccagcctgggcaacagagcaagactctgtctccaaaaataacaaaaaataaatacatgccttcctttctactgctgcacaacctcactgtgtcaggcaggcatctctggatccagctggtttttgttttgctgaggctcagcttcttcctggaactttttgaaacaacactcaagggtctcaagtgggtattttttcatgttgtatacccaaaaacctgaaaacccagggccctgggttacagtatttccacgtcgtatacccaaaaacctgaaaacctggggaccctgggttccagtatttcctggcgatcttacccactaccaccatctagtcaatttgaaccacctcctcaaccacctatgagggcctaaacactctttcactccctttcctgcca

SEQ ID NO: 5954 - protein, 54 aa, Homo sapiens
MPSFLLLHNLTVSGRHLWIQLVFVLLRLSFFLELFETTLKGLKWVFFHVVYPKT

SEQ ID NO: 5955 - DNA, 840 bp, Homo sapiens
cctcactgtgtcaggcaggcatctctggatccagctggtttttgttttgctgaggctcagcttcttcctggaactttttgaaacaacactcaagggtctcaaatggctgacatgatggtctgtgacctgaaagttgttgaatagttggagtgttctgcattcatgtggaagaggctaaaggatgtttgatgaagcactatgggctgccctggaagaggactgaagaagcagctgcagggaatgaatgcttcaagaccacagtgctctcctgccttggaaacaccttcgccttcctccgcttctctttggctaccatggtcaccctccacactgctttcctcaactctcgggcaggctggtctcaaactcctgacctcatgtggtcctcctgcctcaacctcccaaagtgctgggattataggcatgagccactgcatctggcccgattctttatatttgtaaaaagcgtactgtacttcaatatattcaaaattagactattatttagaagtatatcaatttgcagccagggcagtggctcacgcctgtcctttacacatataagatggtaatacacggccgggcacagtggcttgtgcctgtaatcccagaactttggaaggccgaggtgggtggatcacctgaggtcaggagttcgagaccagactggccaacatggagaaaccccgtctctactaaaaatacaaaaattagccaggtgtggtggtgggctcctgtaatcccagctacttgggaggctgaggcaggagaatcccttgaacctgcgaggtagaggttgtagtgagccgaaattgcaccattgcactctagcctgggcaa

SEQ ID NO: 5956 - protein, 127 aa, Homo sapiens
MKHYGLPWKRTEEAAAGNECFKTTVLSCLGNTFAFLRFSLATMVTLHTAFLNSRAGWSQTPDLMWSSCLNLPKCWDYRHEPLHLARFFIFVKSVLYFNIFKIRLLFRSISICSQGSGSRLSFTHIRW

SEQ ID NO: 5957 - DNA, 985 bp, Homo sapiens
tgattcttctgcctcagactcccaagtagctgggattacaggcatgtgctaccactcccggattattttctatttttagtacagaccaggtttctccatgttggtcagactggtctcaaactccctacctcaagtgatctgcccacctcggcctcccaaagtgctgggattaaaggcgtgagtcaccacccctggccttatagtttatcttctagtggtcttctatcctcatttgaaaatgtgaaaagtgggtacctgagataattcaccgactcattgtttcttggaaccacaattgatctcagaagtgtaaccctgtactactgagaagcttaatcaaggacaaatacaatcccctcactccacagatggctgacatgatggtctgtgacctgaaagttgttgaatagttggagtgttctgcattcatgtggaagaggctaaaggatgtttgatgaagcactatgggctgccctggaagaggactgaagaagcagctgcaggaaagaaacgtccactctgctccagtcaaccccactgctggtgtcctctgcactgccttgcactccctgaagagagcctgggcaacagagcgagactccatctcaaaaaaaaaaaaaaaaaaaattggggactatgtatatagatttactacactgaagccctccagcagtctaagaactgatgcctctaacgaaggaaaggactgcatgtttctgatgaagctaccatgacctaccagatttccaacgcctgccaaaattaatctatttgtctgtggtagaagaggccataccattgtggcccttgaaacttactgtatgatgttttatttagtgaacagttcacatacccaaatggttgtaactgatactgctgaatatattgtaagaacagaagtgttaagtatgtataacacttcttttgattgtaaggaatgttcccagtggggaaatgccataattaaaacagtgatcgtgggatg

SEQ ID NO: 5958 - protein, 89 aa, Homo sapiens; identical to SEQ ID NO: 5948

SEQ ID NO: 5959 - DNA, 481 bp, Homo sapiens
ggaaattccttttccagagttctcacttactaatttggctaacattaccaatggtaacagaccccacgtatccgccacaattgctgtgagttgcagaggaaaaagactgggaggaaatcttcacttttcttctgcaacagcaaccaacagaaatgaaagagccaggggattttgcaaaatatcaactcctgagaactaagaatgagagcctttcctgccaagcccattctgtgccagtcatcataaaatactccagaagattctacctgtggatcagaaactagaccctcaccagacaccaaatctgctggagtatggacttcctagcttctagaactgtaaaagagaaatttccgttgtttataaactacccaatttgtggtattttgttatagcagcctggatggactaagacaacatattctattttaaaatcaactttgttgggggtataataaaatttgtaaattttaaatataaa

SEQ ID NO: 5960 - protein, 43 aa, Homo sapiens
MKEPGDFAKYQLLRTKNESLSCQAHSVPVIIKYSRRFYLWIRN

SEQ ID NO: 5961 - DNA, 846 bp, Homo sapiens
cagaggcctctgtctcctaatcttttccataggctactgttttctttcttttctcatgaggaaaaatgataaaagcaaaataaacaaattagctaccacttatgaaaatccccaggaaattccttttccagagttctcacttactaatttggctaacattaccaatggtaacagaccccacgtatccgccacaattgctgtgagttgcagaggaaaaagactgggaggaaatcttcacttttcttctgcaacagcaaccaacagaaatgaaagagccaggggattttgcaaaatatcaactcctgagaactaagaatgagagcctttcctgccaagcccattctgtgccagtcatcataaaatactatgacccttccttccagaagaacaatgcgctgtgatctttggctactcaagctttacatcatccatattaccctgcagcaggaacagattgatgggtattttcactgcccccagagagttaccctctaatccttcatttgctgctccagcacaattgcacggaagcaatagcagggatagttagagtgcatacaattgattccaatccatccatcacttaaactactgtctaggacatcaggaggccacaaaaaaaaaaaaaaagaaagaaaaaaagaaaaacttttgaatcaagaaatgctttgtccattccaggtcaaggaaaatcatgatgcaatttggttggatactttgactttagaaaagtttctcacttctcagtagagaaagtttaatgtttgcaaacatgcagtaatgaggtaacagttgcagtaataagcatttttaaactgcatttgtggaagagcagcttctacctac

SEQ ID NO: 5962 - protein, 44 aa, Homo sapiens
MKEPGDFAKYQLLRTKNESLSCQAHSVPVIIKYYDPSFQKNNAL

SEQ ID NO: 5963 - DNA, 549 bp, Homo sapiens
tgttacagagaggagcaaaacagccaggcattcatgagccgcacatcagttctgccaggatctggctgggcagcctctgttgcaaggtgtttaatctctgattcctgtaaatcaggaacaatatcaactggttgatggagagtttggagaagtccagggcaaagtgaatgcaacaacaaacaccaacttaacttcagccaagaccagctctgcaaattctttctagggcaggtcagattgattaggtttacctctagcctaatgcctatattaccaataggagcatccgtgccattcaacctataatgcttagacattgtgaagaaaaattgacaaggatgacaatttttatctgaaaagaaacatacattaaaatctgggcttgtttttgttttcacttgcttaacatttttgttcatcgtttatagcacatcgtcagcaatgaggaatgatgatttcttcctctgcgatatcacaaaacaaaatgccaaagacaaaaggagtcaaagctcagcttttgagtggcaaaataaacttttgaaaattgtg

SEQ ID NO: 5964 - protein, 35 aa, Homo sapiens
MRNDDFFLCDITKQNAKDKRSQSSAFEWQNKLLKI

SEQ ID NO: 5965 - DNA, 9318 bp, Homo sapiens
gcggccgctgctccgcgggattaaattggccgcccggaggcggcggcgcggccgtggcggggcgcgaaggcgctggaggaaagtgttggcggcggcgcgggaggcggtggcggcggctgcccggggccaacatgaccaggctctgaaagtgttccagctgaaatttcagatcggacagactcgctgcggctccggaggcagtgattccaagctgctcgcgcacgctgctgccaagctgcaggatggtgcacgtagccaggctgctgctgctgctcctcactttcttcctccgcacggatgctgagacacctccaaggtttacacgaacacccgttgatcagacaggggtctctggcggagttgcctctttcatctgccaagctacgggagacccaagacctaaaattgtctggaacaaaaaaggaaagaaagtcagcaatcagagatttgaggtaatagagtttgacgatgggtctggatcagttctcagaatacaacccttacggactccgagggatgaggccatttatgaatgtgtggcctcaaataatgtgggagaaataagtgtatccaccagactcacagttttgcgggaagatcaaattcccaggggcttccctaccattgacatgggcccacagttgaaggtggttgagcgtactcgcacggccaccatgctttgtgcagccagtggtaatccggatccagaaatcacttggtttaaagatttcttacctgtggacacaagcaacaacaatggtcgtattaagcagttacgatcaggagcccttcagattgagcagagtgaagagtctgaccaaggaaaatatgagtgtgttgccaccaacagcgcgggcactcagagctgcgagaagttcgccgtgtcccaccaagattctctatcccacccactaatcatgaaatcatgccaggcggaagcgttaatatcacctgtgtggccgtggggtcaccaatgccttatgtaaagtggatgttgggggcagaagatctgacacctgaagatgatatgccaataggaagaaatgtgctagaactgaatgatgtaagacagtcagcaaattacacctgtgttgctatgtcaacactgggtgtcattgaagcaatagcacagatcactgtcaaagccttacccaaacctccaggaactcctgtagtgaccgagagcacagctacaagcatcacactgacgtgggactctgggaaccctgagcctgtttcttattacataattcagcataaacctaaaaactctgaggaactttacaaagaaattgatggggtggcgaccacacgctacagtgtcgctggactaagtccctactcggattatgaattcagggttgttgctgtcaataacattgggcgggggcctcccagcgaacctgtgctaacacaaacctcagagcaagcaccatccagtgccccgagggatgtccaggcacgaatgttgagttcgaccaccattttggtacagtggaaggaacctgaagagccaaatggacagatccaaggatatagagtttattatacaatggatcccactcaacatgtcaacaactggatgaaacacaatgtagctgacagccaaatcactactattggcaacttagtgccccagaaaacatattctgtcaaagtcctggcttttacctcaattggagatggtcccctttcaagtgacatacaagtcatcactcagacaggagtaccagggcagccactaaacttcaaagcagaacctgagtctgaaacaagtattttgctctcttggacacctccacgttcagataccattgccaactatgaactggtctacaaagatggggagcatggagaggagcaacgaattaccattgagccagggacatcatataggctgcaaggactgaaaccaaacagcttatactatttccgtctggctgcacgctcccctcaaggcctgggtgcttctactgcagaaatatcagctagaaccatgcagtcaaagccgtcagctcctcctcaagacattagttgcaccagcccaagttccactagtattttggtaagttggcaacctccaccagtggaaaaacagaatggcattatcactgaatactccatcaagtacactgcagtggatggggaagatgacaagcctcacgagattttgggaattccttcggacactaccaaataccttttggaacagctggaaaaatggactgaataccggatcactgtgacagcccatacagatgtcggccctggccctgagagcttgtccgtgttgattcgaaccaatgaagatgttcctagtggtcctcctcgcaaagtcgaggtagaggctgtcaactcaacatctgttaaagtctcatggcgctcacccgtgcccaataaacagcatggccagataagaggatatcaggtgcattatgtgaggatggaaaatggtgagcccaagggccagcccatgctgaaagatgtcatgctggctgatgcacagtgggaatttgatgatactactgaacatgacatgatcatttctgggctccagcctgaaacttcctactccctcaccgtcacagcctacacaaccaaaggagatggtgctcgcagcaagcccaaactggtgtccaccactggggcagttccagggaaacctcggcttgtgattaaccacactcagatgaatactgctcttattcagtggcaccctccggtggacacatttggacctcttcagggctaccgtctaaaatttggccgcaaggatatggagccacttactactcttgagttctctgaaaaagaagatcactttacagctacagacatccacaagggagcatcatacgtcttcaggctctcagccagaaacaaagtgggctttggggaggagatggtgaaggagatttccattccagaagaagtaccaactggattccctcaaaaccttcactcagaaggcaccacttcaacctccgtccagttatcttggcaaccacctgtcctggcagagagaaatggcattatcaccaagtatacccttctttatagggatatcaacatcccccttctcccgatggagcagcttattgttccagctgacaccactatgacactcactggcttaaaaccagataccacatacgatgtaaaagtacgtgctcatacgagcaaagggcccgggccatatagtcccagtgtccagttcaggacactgcctgtggatcaagtgtttgcaaaaaattttcatgtcaaagcagtaatgaagacttccgtgttgctgtcttgggagattccagagaattataactccgccatgcctttcaaaattctttatgatgatgggaaaatggtagaagaagtggatggccgagccacacagaagttaattgtcaacctgaagcctgagaaatcatattcatttgtgctgacaaatcgtggaaacagtgctggtgggctgcagcacagggtcacggcaaagactgcaccagatgtattacgtaccaagcctgccttcattgggaagaccaacttggatggcatgattactgtgcaactgcctgaagtacctgcaaatgagaatataaaaggttactacataataattgtgcctttgaagaaatctcgcgggaaatttatcaagccatgggagagtccagatgaaatggaattagatgagctgcttaaggagatatctaggaagcgcagaagcatccgttatgggagagaagttgaattaaagccatatattgccgctcactttgatgtccttcccactgagttcaccctgggggatgacaagcattatggtggatttacaaacaagcaactccaaagtggtcaagaatatgtcttctttgtgttagcagtaatggaacatgcagagtctaagatgtatgcaaccagcccttactccgaccccgtggtgtcaatggatctggatccgcagccaatcacggatgaagaagaaggcttgatctgggttgtaggtcctgtccttgcagtggtctttatcatctgcattgtcattgctattcttctttataaaaggaagagggcagagtccgactctagaaaaagcagcataccgaacaataaggagatcccttcacaccacccaacagaccctgtagaactgaggcgccttaactttcaaacaccgggtatggctagccatcctccaatacccatcttggaacttgcagaccacattgaaagattgaaagcaaatgacaacttgaagttttcccaggaatatgagtcaattgaccctggccagcagttcacttgggaacattcaaacttggaagtaaacaaaccaaagaatagatacgcgaatgtaatcgcatatgatcattcccgggttctcctatcagctatagaagggatcccaggaagtgactatgtgaatgccaactacatagatgggtataggaagcaaaatgcctatattgcaacacagggatctctccccgaaacatttggggacttttggagaatgatatgggaacaacggagtgccacagttgtcatgatgacaaaactagaagaaagatcaagggtgaagtgtgaccagtattggcctagcagaggcacagaaacccacggactcgttcaagtaacgctgcttgatactgtggagctggccacatattgtgttcgaacatttgcactttacaagaatggttcaagtgagaagagagaagtgagacaattccagttcaccgcctggcctgatcatggtgttccagaacaccctacaccttttctagctttcttacgtagagtcaaaacctgtaaccctcccgatgctggtccgatggttgtgcactgcagtgcgggagttggccggactggttgcttcatcgtcatagatgccatgttagaaagaataaagcatgaaaaaactgtagatatttatggccatgtaactttaatgagagcccagaggaactatatggttcaaacagaagaccaatacatctttatccatgatgcactgttagaagcagtgacttgtggaaataccgaagtgccagctagaaacttgtatgcctacattcagaagctgacacaaatagaaacgggagagaatgtcacaggaatggagctcgaatttaagcgtctagccagctcaaaagctcacacctcaaggtttatcagtgccaatcttccatgtaataaattcaaaaatcgccttgttaatattatgccatatgaatccacaagggtatgcctgcagcctatccgtggagtagaaggatctgattacatcaatgccagttttattgatggatacagacaacagaaagcctacatcgctacccaggggcccttggcagagaccactgaagacttctggcggatgctctgggaacacaattccaccatagttgtgatgctcaccaagctgcgtgaaatgggcagagagaaatgtcaccaatactggccagcagaacggtctgcaagataccagtactttgttgtagatcccatggctgagtacaacatgccacagtatatcctaagggaattcaaggtcacagatgccagggacggccagtcccgaacagtaaggcagttccagttcactgactggccagagcaaggagtgccaaagtccggagaaggatttattgacttcatcggccaagtccataaaacaaaagaacagtttggccaagatggacccatttcagtccattgcagcgcgggcgttggaagaactggagtcttcataacgctaagcattgttttggaaagaatgagatatgaaggagttgtagatatcttccagactgtcaaaatgttaagaacacaacgaccagctatggtacagacagaggatcaatatcagttttcctatcgtgccgcactagagtacctgggcagctttgaccactatgcaacgtagaaacccctgacccattctggatttttactacaggcccttcaatatccatggagtctcttctgagccatacagggcacttgagaagtccttcttaacttctagctaacaactacttagtgggactattacacacaaaacaaattaaaaacaaattattccaggtggaccaagaatctgctttgacatcgccccttcccaccatactgctcataataacattttagggggaaaggggagggaatgtttaaaaagaaagtccttgatttagttttttagtattgtaaagatactgctgacctgtgcttcatttctaactgtgtaaacttttttttaacaaaatgtatcattcgataaagtgaattttaaaaaagttacataactcttcatttttttatttccaaatcgtaggtttttttaagctgtagaactgttatctgtaatatcttgctgtagaaatatcaaatcatttgaaaatttgcacatttttgtgcaaaactcaatctacagtatcagtctcgtcagatatattaattttacacttcagttttgattggtgagaaagtacccattctcttcaaataatcaaagataattattattttgttttgtttttggaatcaacagggaggcgcaaagtataaagttgctgctaacatatatacatatatatccatattttataagggtgtctatgtatatatagacagtgtgtccacacaaaaaatagatacagttatcagtcagtcagttcttccatgatttagtttttttaaacgtagaaaagctattgtaaacatctctttccatttattcttaattttttgacatattggtatttctttaaagggaaatgaggaatgcacatcagtgattgattgtcaaacctcaccccctgatttcctacctaatctacccccacctaaccaatcaatcacatccacaaattgttttgtttgtttgttagtcaggcttccaacaaagttcaatatttctaacactctagtgcaataaaaattattattaaatagctaagaggtgtgcatgtgggaaaggtcagtgcatatccctttaggaggggagaatgttgtaatatatcagctatcgagttgtttaaaaaaagtgtattcaatcgtatattgtctatagtatgtgctatgaaatttgcatttatgatatgtaacaggggcaaagccaaattcatgttactctgttcagtcagaaacattttgtggcatacagcattcctgggaagtgctgtactttgtttcgttttggttttagttttgcatttagagtgccttataattgatgcctattttaatagcatttctttttagcttttggttcgtatttccattcactgttcgtatctgttactttctattaaagcattatctgtttaccacatgtacaaaaactctttgaataatatgcattcctagttttcagccaagtcggggatgttagtgattgtaccagcccaaagcacttggataatcagggcccttcttccttttataatcaatcatcaacatcagaaaaagctacttgttttatttatattcccttccaaatccgctctggaacatgcagtaactgcaccaaacttattttagtaacaaatatcattggcaactttggaatatatttgatattccattaggatttttctaaaaggggaaataaactatatatatatatgtatcttacccccaattcttccaacagaatttctataggaagccatggatgatggcataagtttgccacatattacatgattttaaataatcctcaaaatacccaaggaactcttaaagagttttggtatgagtatactactttggtttaattttagcttcatggatgttctgcatggaaggatttttgttttccacattttcccattgctagcagagtgaaatccaagagaccaaacatttgcaagcattgtatttgagcacttttgtaaaaaacaaagaaaaagaaaaaaaagaaaatatatataatactaaaaaaaagtatctagaaggctacctcagaatgagactctctaacctacatcagaaccagagaagaatgtgcactatgtgggtctgttatcattattttcttttagtttgtatctttttggagatttatccaagtgccagattactcagtgctataattttcttttagttaaacaaagggggtcagacagacattgcatcatccagacatgccttgttggacatgtagaatccgatggagcactgcacaccagaatgattggccaatgagcagcttctctccctgaaacaataactgcccatttggcaaagggaaagatgacaataatcagaagaagaaaatgaatgggatgcataccatagacgaacgaggcggagactattgcgggaatcttactgttcaggagctgttcctagaactaactcccttactgtcattgatgtgcattccactctgtgcttttctgtacaaccattcaagttttaatttcccaggtgaaccatctttatctgccattaccacaagctttcaagtttccagttattttcatcatcataaccagtacggtgctattatttacctatgtacgtgtagttatgtataattttgtaattagttacaatggtaaaaaaaatcaaaatatataaaaagtgatttgtacagaactttattttagctcttttttaaaaatgatttgcatggttagaaaacggcgaggacagccaggggagggaagggcctctagggaactttgcactttctatacctttgtactatgcactgccctattgattctacacccaataatgatattacttgaacccatctgtaagaaactgcttcggaaattcatttgtgtgtatgtaaataacacaacatagaaacaggaagggaaaaaagtctgcagtaatgcacgtattttttttctttcctgtttattttcggttttgctttaagtccttttatttttaattccctttttgtttttctttttgggttttggttccttttgggtttatgggtgccctgatactccagcagagatcagaaggctacagatccattctatccatccgttatgtggctttgccatcccagcttggagtgtctttacaaagataataacagttgtgttctttgctctcgttttggatgcatagactgaaaaattaaaacaaataacttgtaaaatggcttgttaaaaaatacaattacctctaattagtagtacgcgtaaatgttttacagaatgaaaggcgtgctttttattttcttacttcgttacattggtggcgaaagaagtctgtatgaaaatcagttctttgctgacacaagttccatttgttacaaatgaattctaataaaaatgtcagtgttatgca

SEQ ID NO: 5966 - protein, 1665 aa, Homo sapiens
MPGGSVNITCVAVGSPMPYVKWMLGAEDLTPEDDMPIGRNVLELNDVRQSANYTCVAMSTLGVIEAIAQITVKALPKPPGTPVVTESTATSITLTWDSGNPEPVSYYIIQHKPKNSEELYKEIDGVATTRYSVAGLSPYSDYEFRVVAVNNIGRGPPSEPVLTQTSEQAPSSAPRDVQARMLSSTTILVQWKEPEEPNGQIQGYRVYYTMDPTQHVNNWMKHNVADSQITTIGNLVPQKTYSVKVLAFTSIGDGPLSSDIQVITQTGVPGQPLNFKAEPESETSILLSWTPPRSDTIANYELVYKDGEHGEEQRITIEPGTSYRLQGLKPNSLYYFRLAARSPQGLGASTAEISARTMQSKPSAPPQDISCTSPSSTSILVSWQPPPVEKQNGIITEYSIKYTAVDGEDDKPHEILGIPSDTTKYLLEQLEKWTEYRITVTAHTDVGPGPESLSVLIRTNEDVPSGPPRKVEVEAVNSTSVKVSWRSPVPNKQHGQIRGYQVHYVRMENGEPKGQPMLKDVMLADAQWEFDDTTEHDMIISGLQPETSYSLTVTAYTTKGDGARSKPKLVSTTGAVPGKPRLVINHTQMNTALIQWHPPVDTFGPLQGYRLKFGRKDMEPLTTLEFSEKEDHFTATDIHKGASYVFRLSARNKVGFGEEMVKEISIPEEVPTGFPQNLHSEGTTSTSVQLSWQPPVLAERNGIITKYTLLYRDINIPLLPMEQLIVPADTTMTLTGLKPDTTYDVKVRAHTSKGPGPYSPSVQFRTLPVDQVFAKNFHVKAVMKTSVLLSWEIPENYNSAMPFKILYDDGKMVEEVDGRATQKLIVNLKPEKSYSFVLTNRGNSAGGLQHRVTAKTAPDVLRTKPAFIGKTNLDGMITVQLPEVPANENIKGYYIIIVPLKKSRGKFIKPWESPDEMELDELLKEISRKRRSIRYGREVELKPYIAAHFDVLPTEFTLGDDKHYGGFTNKQLQSGQEYVFFVLAVMEHAESKMYATSPYSDPVVSMDLDPQPITDEEEGLIWVVGPVLAVVFIICIVIAILLYKRKRAESDSRKSSIPNNKEIPSHHPTDPVELRRLNFQTPGMASHPPIPILELADHIERLKANDNLKFSQEYESIDPGQQFTWEHSNLEVNKPKNRYANVIAYDHSRVLLSAIEGIPGSDYVNANYIDGYRKQNAYIATQGSLPETFGDFWRMIWEQRSATVVMMTKLEERSRVKCDQYWPSRGTETHGLVQVTLLDTVELATYCVRTFALYKNGSSEKREVRQFQFTAWPDHGVPEHPTPFLAFLRRVKTCNPPDAGPMVVHCSAGVGRTGCFIVIDAMLERIKHEKTVDIYGHVTLMRAQRNYMVQTEDQYIFIHDALLEAVTCGNTEVPARNLYAYIQKLTQIETGENVTGMELEFKRLASSKAHTSRFISANLPCNKFKNRLVNIMPYESTRVCLQPIRGVEGSDYINASFIDGYRQQKAYIATQGPLAETTEDFWRMLWEHNSTIVVMLTKLREMGREKCHQYWPAERSARYQYFVVDPMAEYNMPQYILREFKVTDARDGQSRTVRQFQFTDWPEQGVPKSGEGFIDFIGQVHKTKEQFGQDGPISVHCSAGVGRTGVFITLSIVLERMRYEGVVDIFQTVKMLRTQRPAMVQTEDQYQFSYRAALEYLGSFDHYAT

SEQ ID NO: 5967 - DNA, 9291 bp, Homo sapiens
gcggccgctgctccgcgggattaaattggccgcccggaggcggcggcgcggccgtggcggggcgcgaaggcgctggaggaaagtgttggcggcggcgcgggaggcggtggcggcggctgcccggggccaacatgaccaggctctgaaagtgttccagctgaaatttcagatcggacagactcgctgcggctccggaggcagtgattccaagctgctcgcgcacgctgctgccaagctgcaggatggtgcacgtagccaggctgctgctgctgctcctcactttcttcctccgcacggatgctgagacacctccaaggtttacacgaacacccgttgatcagacaggggtctctggcggagttgcctctttcatctgccaagctacgggagacccaagacctaaaattgtctggaacaaaaaaggaaagaaagtcagcaatcagagatttgaggtaatagagtttgacgatgggtctggatcagttctcagaatacaacccttacggactccgagggatgaggccatttatgaatgtgtggcctcaaataatgtgggagaaataagtgtatccaccagactcacagttttgcgggaagatcaaattcccaggggcttccctaccattgacatgggcccacagttgaaggtggttgagcgtactcgcacggccaccatgctttgtgcagccagtggtaatccggatccagaaatcacttggtttaaagatttcttacctgtggacacaagcaacaacaatggtcgtattaagcagttacgatcaggagcccttcagattgagcagagtgaagagtctgaccaaggaaaatatgagtgtgttgccaccaacagcgcgggcactcagagctgcgagaagttcgccgtgtcccaccaagattctctatcccacccactaatcatgaaatcatgccaggcggaagcgttaatatcacctgtgtggccgtggggtcaccaatgccttatgtaaagtggatgttgggggcagaagatctgacacctgaagatgatatgccaataggaagaaatgtgctagaactgaatgatgtaagacagtcagcaaattacacctgtgttgctatgtcaacactgggtgtcattgaagcaatagcacagatcactgtcaaagccttacccaaacctccaggaactcctgtagtgaccgagagcacagctacaagcatcacactgacgtgggactctgggaaccctgagcctgtttcttattacataattcagcataaacctaaaaactctgaggaactttacaaagaaattgatggggtggcgaccacacgctacagtgtcgctggactaagtccctactcggattatgaattcagggttgttgctgtcaataacattgggcgggggcctcccagcgaacctgtgctaacacaaacctcagagcaagcaccatccagtgccccgagggatgtccaggcacgaatgttgagttcgaccaccattttggtacagtggaaggaacctgaagagccaaatggacagatccaaggatatagagtttattatacaatggatcccactcaacatgtcaacaactggatgaaacacaatgtagctgacagccaaatcactactattggcaacttagtgccccagaaaacatattctgtcaaagtcctggcttttacctcaattggagatggtcccctttcaagtgacatacaagtcatcactcagacaggagtaccagggcagccactaaacttcaaagcagaacctgagtctgaaacaagtattttgctctcttggacacctccacgttcagataccattgccaactatgaactggtctacaaagatggggagcatggagaggagcaacgaattaccattgagccagggacatcatataggctgcaaggactgaaaccaaacagcttatactatttccgtctggctgcacgctcccctcaaggcctgggtgcttctactgcagaaatatcagctagaaccatgcagtcaaagccgtcagctcctcctcaagacattagttgcaccagcccaagttccactagtattttggtaagttggcaacctccaccagtggaaaaacagaatggcattatcactgaatactccatcaagtacactgcagtggatggggaagatgacaagcctcacgagattttgggaattccttcggacactaccaaataccttttggaacagctggaaaaatggactgaataccggatcactgtgacagcccatacagatgtcggccctggccctgagagcttgtccgtgttgattcgaaccaatgaagatgttcctagtggtcctcctcgcaaagtcgaggtagaggctgtcaactcaacatctgttaaagtctcatggcgctcacccgtgcccaataaacagcatggccagataagaggatatcaggtgcattatgtgaggatggaaaatggtgagcccaagggccagcccatgctgaaagatgtcatgctggctgatgcacaggacatgatcatttctgggctccagcctgaaacttcctactccctcaccgtcacagcctacacaaccaaaggagatggtgctcgcagcaagcccaaactggtgtccaccactggggcagttccagggaaacctcggcttgtgattaaccacactcagatgaatactgctcttattcagtggcaccctccggtggacacatttggacctcttcagggctaccgtctaaaatttggccgcaaggatatggagccacttactactcttgagttctctgaaaaagaagatcactttacagctacagacatccacaagggagcatcatacgtcttcaggctctcagccagaaacaaagtgggctttggggaggagatggtgaaggagatttccattccagaagaagtaccaactggattccctcaaaaccttcactcagaaggcaccacttcaacctccgtccagttatcttggcaaccacctgtcctggcagagagaaatggcattatcaccaagtatacccttctttatagggatatcaacatcccccttctcccgatggagcagcttattgttccagctgacaccactatgacactcactggcttaaaaccagataccacatacgatgtaaaagtacgtgctcatacgagcaaagggcccgggccatatagtcccagtgtccagttcaggacactgcctgtggatcaagtgtttgcaaaaaattttcatgtcaaagcagtaatgaagacttccgtgttgctgtcttgggagattccagagaattataactccgccatgcctttcaaaattctttatgatgatgggaaaatggtagaagaagtggatggccgagccacacagaagttaattgtcaacctgaagcctgagaaatcatattcatttgtgctgacaaatcgtggaaacagtgctggtgggctgcagcacagggtcacggcaaagactgcaccagatgtattacgtaccaagcctgccttcattgggaagaccaacttggatggcatgattactgtgcaactgcctgaagtacctgcaaatgagaatataaaaggttactacataataattgtgcctttgaagaaatctcgcgggaaatttatcaagccatgggagagtccagatgaaatggaattagatgagctgcttaaggagatatctaggaagcgcagaagcatccgttatgggagagaagttgaattaaagccatatattgccgctcactttgatgtccttcccactgagttcaccctgggggatgacaagcattatggtggatttacaaacaagcaactccaaagtggtcaagaatatgtcttctttgtgttagcagtaatggaacatgcagagtctaagatgtatgcaaccagcccttactccgaccccgtggtgtcaatggatctggatccgcagccaatcacggatgaagaagaaggcttgatctgggttgtaggtcctgtccttgcagtggtctttatcatctgcattgtcattgctattcttctttataaaaggaagagggcagagtccgactctagaaaaagcagcataccgaacaataaggagatcccttcacaccacccaacagaccctgtagaactgaggcgccttaactttcaaacaccgggtatggctagccatcctccaatacccatcttggaacttgcagaccacattgaaagattgaaagcaaatgacaacttgaagttttcccaggaatatgagtcaattgaccctggccagcagttcacttgggaacattcaaacttggaagtaaacaaaccaaagaatagatacgcgaatgtaatcgcatatgatcattcccgggttctcctatcagctatagaagggatcccaggaagtgactatgtgaatgccaactacatagatgggtataggaagcaaaatgcctatattgcaacacagggatctctccccgaaacatttggggacttttggagaatgatatgggaacaacggagtgccacagttgtcatgatgacaaaactagaagaaagatcaagggtgaagtgtgaccagtattggcctagcagaggcacagaaacccacggactcgttcaagtaacgctgcttgatactgtggagctggccacatattgtgttcgaacatttgcactttacaagaatggttcaagtgagaagagagaagtgagacaattccagttcaccgcctggcctgatcatggtgttccagaacaccctacaccttttctagctttcttacgtagagtcaaaacctgtaaccctcccgatgctggtccgatggttgtgcactgcagtgcgggagttggccggactggttgcttcatcgtcatagatgccatgttagaaagaataaagcatgaaaaaactgtagatatttatggccatgtaactttaatgagagcccagaggaactatatggttcaaacagaagaccaatacatctttatccatgatgcactgttagaagcagtgacttgtggaaataccgaagtgccagctagaaacttgtatgcctacattcagaagctgacacaaatagaaacgggagagaatgtcacaggaatggagctcgaatttaagcgtctagccagctcaaaagctcacacctcaaggtttatcagtgccaatcttccatgtaataaattcaaaaatcgccttgttaatattatgccatatgaatccacaagggtatgcctgcagcctatccgtggagtagaaggatctgattacatcaatgccagttttattgatggatacagacaacagaaagcctacatcgctacccaggggcccttggcagagaccactgaagacttctggcggatgctctgggaacacaattccaccatagttgtgatgctcaccaagctgcgtgaaatgggcagagagaaatgtcaccaatactggccagcagaacggtctgcaagataccagtactttgttgtagatcccatggctgagtacaacatgccacagtatatcctaagggaattcaaggtcacagatgccagggacggccagtcccgaacagtaaggcagttccagttcactgactggccagagcaaggagtgccaaagtccggagaaggatttattgacttcatcggccaagtccataaaacaaaagaacagtttggccaagatggacccatttcagtccattgcagcgcgggcgttggaagaactggagtcttcataacgctaagcattgttttggaaagaatgagatatgaaggagttgtagatatcttccagactgtcaaaatgttaagaacacaacgaccagctatggtacagacagaggatcaatatcagttttcctatcgtgccgcactagagtacctgggcagctttgaccactatgcaacgtagaaacccctgacccattctggatttttactacaggcccttcaatatccatggagtctcttctgagccatacagggcacttgagaagtccttcttaacttctagctaacaactacttagtgggactattacacacaaaacaaattaaaaacaaattattccaggtggaccaagaatctgctttgacatcgccccttcccaccatactgctcataataacattttagggggaaaggggagggaatgtttaaaaagaaagtccttgatttagttttttagtattgtaaagatactgctgacctgtgcttcatttctaactgtgtaaacttttttttaacaaaatgtatcattcgataaagtgaattttaaaaaagttacataactcttcatttttttatttccaaatcgtaggtttttttaagctgtagaactgttatctgtaatatcttgctgtagaaatatcaaatcatttgaaaatttgcacatttttgtgcaaaactcaatctacagtatcagtctcgtcagatatattaattttacacttcagttttgattggtgagaaagtacccattctcttcaaataatcaaagataattattattttgttttgtttttggaatcaacagggaggcgcaaagtataaagttgctgctaacatatatacatatatatccatattttataagggtgtctatgtatatatagacagtgtgtccacacaaaaaatagatacagttatcagtcagtcagttcttccatgatttagtttttttaaacgtagaaaagctattgtaaacatctctttccatttattcttaattttttgacatattggtatttctttaaagggaaatgaggaatgcacatcagtgattgattgtcaaacctcaccccctgatttcctacctaatctacccccacctaaccaatcaatcacatccacaaattgttttgtttgtttgttagtcaggcttccaacaaagttcaatatttctaacactctagtgcaataaaaattattattaaatagctaagaggtgtgcatgtgggaaaggtcagtgcatatccctttaggaggggagaatgttgtaatatatcagctatcgagttgtttaaaaaaagtgtattcaatcgtatattgtctatagtatgtgctatgaaatttgcatttatgatatgtaacaggggcaaagccaaattcatgttactctgttcagtcagaaacattttgtggcatacagcattcctgggaagtgctgtactttgtttcgttttggttttagttttgcatttagagtgccttataattgatgcctattttaatagcatttctttttagcttttggttcgtatttccattcactgttcgtatctgttactttctattaaagcattatctgtttaccacatgtacaaaaactctttgaataatatgcattcctagttttcagccaagtcggggatgttagtgattgtaccagcccaaagcacttggataatcagggcccttcttccttttataatcaatcatcaacatcagaaaaagctacttgttttatttatattcccttccaaatccgctctggaacatgcagtaactgcaccaaacttattttagtaacaaatatcattggcaactttggaatatatttgatattccattaggatttttctaaaaggggaaataaactatatatatatatgtatcttacccccaattcttccaacagaatttctataggaagccatggatgatggcataagtttgccacatattacatgattttaaataatcctcaaaatacccaaggaactcttaaagagttttggtatgagtatactactttggtttaattttagcttcatggatgttctgcatggaaggatttttgttttccacattttcccattgctagcagagtgaaatccaagagaccaaacatttgcaagcattgtatttgagcacttttgtaaaaaacaaagaaaaagaaaaaaaagaaaatatatataatactaaaaaaaagtatctagaaggctacctcagaatgagactctctaacctacatcagaaccagagaagaatgtgcactatgtgggtctgttatcattattttcttttagtttgtatctttttggagatttatccaagtgccagattactcagtgctataattttcttttagttaaacaaagggggtcagacagacattgcatcatccagacatgccttgttggacatgtagaatccgatggagcactgcacaccagaatgattggccaatgagcagcttctctccctgaaacaataactgcccatttggcaaagggaaagatgacaataatcagaagaagaaaatgaatgggatgcataccatagacgaacgaggcggagactattgcgggaatcttactgttcaggagctgttcctagaactaactcccttactgtcattgatgtgcattccactctgtgcttttctgtacaaccattcaagttttaatttcccaggtgaaccatctttatctgccattaccacaagctttcaagtttccagttattttcatcatcataaccagtacggtgctattatttacctatgtacgtgtagttatgtataattttgtaattagttacaatggtaaaaaaaatcaaaatatataaaaagtgatttgtacagaactttattttagctcttttttaaaaatgatttgcatggttagaaaacggcgaggacagccaggggagggaagggcctctagggaactttgcactttctatacctttgtactatgcactgccctattgattctacacccaataatgatattacttgaacccatctgtaagaaactgcttcggaaattcatttgtgtgtatgtaaataacacaacatagaaacaggaagggaaaaaagtctgcagtaatgcacgtattttttttctttcctgtttattttcggttttgctttaagtccttttatttttaattccctttttgtttttctttttgggttttggttccttttgggtttatgggtgccctgatactccagcagagatcagaaggctacagatccattctatccatccgttatgtggctttgccatcccagcttggagtgtctttacaaagataataacagttgtgttctttgctctcgttttggatgcatagactgaaaaattaaaacaaataacttgtaaaatggcttgttaaaaaatacaattacctctaattagtagtacgcgtaaatgttttacagaatgaaaggcgtgctttttattttcttacttcgttacattggtggcgaaagaagtctgtatgaaaatcagttctttgctgacacaagttccatttgttacaaatgaattctaataaaaatgtcagtgttatgca

SEQ ID NO: 5968 - protein, 1656 aa, Homo sapiens
MPGGSVNITCVAVGSPMPYVKWMLGAEDLTPEDDMPIGRNVLELNDVRQSANYTCVAMSTLGVIEAIAQITVKALPKPPGTPVVTESTATSITLTWDSGNPEPVSYYIIQHKPKNSEELYKEIDGVATTRYSVAGLSPYSDYEFRVVAVNNIGRGPPSEPVLTQTSEQAPSSAPRDVQARMLSSTTILVQWKEPEEPNGQIQGYRVYYTMDPTQHVNNWMKHNVADSQITTIGNLVPQKTYSVKVLAFTSIGDGPLSSDIQVITQTGVPGQPLNFKAEPESETSILLSWTPPRSDTIANYELVYKDGEHGEEQRITIEPGTSYRLQGLKPNSLYYFRLAARSPQGLGASTAEISARTMQSKPSAPPQDISCTSPSSTSILVSWQPPPVEKQNGIITEYSIKYTAVDGEDDKPHEILGIPSDTTKYLLEQLEKWTEYRITVTAHTDVGPGPESLSVLIRTNEDVPSGPPRKVEVEAVNSTSVKVSWRSPVPNKQHGQIRGYQVHYVRMENGEPKGQPMLKDVMLADAQDMIISGLQPETSYSLTVTAYTTKGDGARSKPKLVSTTGAVPGKPRLVINHTQMNTALIQWHPPVDTFGPLQGYRLKFGRKDMEPLTTLEFSEKEDHFTATDIHKGASYVFRLSARNKVGFGEEMVKEISIPEEVPTGFPQNLHSEGTTSTSVQLSWQPPVLAERNGIITKYTLLYRDINIPLLPMEQLIVPADTTMTLTGLKPDTTYDVKVRAHTSKGPGPYSPSVQFRTLPVDQVFAKNFHVKAVMKTSVLLSWEIPENYNSAMPFKILYDDGKMVEEVDGRATQKLIVNLKPEKSYSFVLTNRGNSAGGLQHRVTAKTAPDVLRTKPAFIGKTNLDGMITVQLPEVPANENIKGYYIIIVPLKKSRGKFIKPWESPDEMELDELLKEISRKRRSIRYGREVELKPYIAAHFDVLPTEFTLGDDKHYGGFTNKQLQSGQEYVFFVLAVMEHAESKMYATSPYSDPVVSMDLDPQPITDEEEGLIWVVGPVLAVVFIICIVIAILLYKRKRAESDSRKSSIPNNKEIPSHHPTDPVELRRLNFQTPGMASHPPIPILELADHIERLKANDNLKFSQEYESIDPGQQFTWEHSNLEVNKPKNRYANVIAYDHSRVLLSAIEGIPGSDYVNANYIDGYRKQNAYIATQGSLPETFGDFWRMIWEQRSATVVMMTKLEERSRVKCDQYWPSRGTETHGLVQVTLLDTVELATYCVRTFALYKNGSSEKREVRQFQFTAWPDHGVPEHPTPFLAFLRRVKTCNPPDAGPMVVHCSAGVGRTGCFIVIDAMLERIKHEKTVDIYGHVTLMRAQRNYMVQTEDQYIFIHDALLEAVTCGNTEVPARNLYAYIQKLTQIETGENVTGMELEFKRLASSKAHTSRFISANLPCNKFKNRLVNIMPYESTRVCLQPIRGVEGSDYINASFIDGYRQQKAYIATQGPLAETTEDFWRMLWEHNSTIVVMLTKLREMGREKCHQYWPAERSARYQYFVVDPMAEYNMPQYILREFKVTDARDGQSRTVRQFQFTDWPEQGVPKSGEGFIDFIGQVHKTKEQFGQDGPISVHCSAGVGRTGVFITLSIVLERMRYEGVVDIFQTVKMLRTQRPAMVQTEDQYQFSYRAALEYLGSFDHYAT

SEQ ID NO: 5969 - DNA, 8085 bp, Homo sapiens
gcggccgctgctccgcgggattaaattggccgcccggaggcggcggcgcggccgtggcggggcgcgaaggcgctggaggaaagtgttggcggcggcgcgggaggcggtggcggcggctgcccggggccaacatgaccaggctctgaaagtgttccagctgaaatttcagatcggacagactcgctgcggctccggaggcagtgattccaagctgctcgcgcacgctgctgccaagctgcaggatggtgcacgtagccaggctgctgctgctgctcctcactttcttcctccgcacggatgctgagacacctccaaggtttacacgaacacccgttgatcagacaggggtctctggcggagttgcctctttcatctgccaagctacgggagacccaagacctaaaattgtctggaacaaaaaaggaaagaaagtcagcaatcagagatttgaggtaatagagtttgacgatgggtctggatcagttctcagaatacaacccttacggactccgagggatgaggccatttatgaatgtgtggcctcaaataatgtgggagaaataagtgtatccaccagactcacagttttgcgggaagatcaaattcccaggggcttccctaccattgacatgggcccacagttgaaggtggttgagcgtactcgcacggccaccatgctttgtgcagccagtggtaatccggatccagaaatcacttggtttaaagatttcttacctgtggacacaagcaacaacaatggtcgtattaagcagttacgatcaggagcccttcagattgagcagagtgaagagtctgaccaaggaaaatatgagtgtgttgccaccaacagcgcgggcactcagagctgcgagaagttcgccgtgtcccaccaagattctctatcccacccactaatcatgaaatcatgccaggcggaagcgttaatatcacctgtgtggccgtggggtcaccaatgccttatgtaaagtggatgttgggggcagaagatctgacacctgaagatgatatgccaataggaagaaatgtgctagaactgaatgatgtaagacagtcagcaaattacacctgtgttgctatgtcaacactgggtgtcattgaagcaatagcacagatcactgtcaaagccttacccaaacctccaggaactcctgtagtgaccgagagcacagctacaagcatcacactgacgtgggactctgggaaccctgagcctgtttcttattacataattcagcataaacctaaaaactctgaggaactttacaaagaaattgatggggtggcgaccacacgctacagtgtcgctggactaagtccctactcggattatgaattcagggttgttgctgtcaataacattgggcgggggcctcccagcgaacctgtgctaacacaaacctcagagcaagcaccatccagtgccccgagggatgtccaggcacgaatgttgagttcgaccaccattttggtacagtggaaggaacctgaagagccaaatggacagatccaaggatatagagtttattatacaatggatcccactcaacatgtcaacaactggatgaaacacaatgtagctgacagccaaatcactactattggcaacttagtgccccagaaaacatattctgtcaaagtcctggcttttacctcaattggagatggtcccctttcaagtgacatacaagtcatcactcagacaggagtaccagggcagccactaaacttcaaagcagaacctgagtctgaaacaagtattttgctctcttggacacctccacgttcagataccattgccaactatgaactggtctacaaagatggggagcatggagaggagcaacgaattaccattgagccagggacatcatataggctgcaaggactgaaaccaaacagcttatactatttccgtctggctgcacgctcccctcaaggcctgggtgcttctactgcagaaatatcagctagaaccatgcagtcaatgtttgcaaaaaattttcatgtcaaagcagtaatgaagacttccgtgttgctgtcttgggagattccagagaattataactccgccatgcctttcaaaattctttatgatgatgggaaaatggtagaagaagtggatggccgagccacacagaagttaattgtcaacctgaagcctgagaaatcatattcatttgtgctgacaaatcgtggaaacagtgctggtgggctgcagcacagggtcacggcaaagactgcaccagatgtattacgtaccaagcctgccttcattgggaagaccaacttggatggcatgattactgtgcaactgcctgaagtacctgcaaatgagaatataaaaggttactacataataattgtgcctttgaagaaatctcgcgggaaatttatcaagccatgggagagtccagatgaaatggaattagatgagctgcttaaggagatatctaggaagcgcagaagcatccgttatgggagagaagttgaattaaagccatatattgccgctcactttgatgtccttcccactgagttcaccctgggggatgacaagcattatggtggatttacaaacaagcaactccaaagtggtcaagaatatgtcttctttgtgttagcagtaatggaacatgcagagtctaagatgtatgcaaccagcccttactccgaccccgtggtgtcaatggatctggatccgcagccaatcacggatgaagaagaaggcttgatctgggttgtaggtcctgtccttgcagtggtctttatcatctgcattgtcattgctattcttctttataaaaggaagagggcagagtccgactctagaaaaagcagcataccgaacaataaggagatcccttcacaccacccaacagaccctgtagaactgaggcgccttaactttcaaacaccgggtatggctagccatcctccaatacccatcttggaacttgcagaccacattgaaagattgaaagcaaatgacaacttgaagttttcccaggaatatgagtcaattgaccctggccagcagttcacttgggaacattcaaacttggaagtaaacaaaccaaagaatagatacgcgaatgtaatcgcatatgatcattcccgggttctcctatcagctatagaagggatcccaggaagtgactatgtgaatgccaactacatagatgggtataggaagcaaaatgcctatattgcaacacagggatctctccccgaaacatttggggacttttggagaatgatatgggaacaacggagtgccacagttgtcatgatgacaaaactagaagaaagatcaagggtgaagtgtgaccagtattggcctagcagaggcacagaaacccacggactcgttcaagtaacgctgcttgatactgtggagctggccacatattgtgttcgaacatttgcactttacaagaatggttcaagtgagaagagagaagtgagacaattccagttcaccgcctggcctgatcatggtgttccagaacaccctacaccttttctagctttcttacgtagagtcaaaacctgtaaccctcccgatgctggtccgatggttgtgcactgcagtgcgggagttggccggactggttgcttcatcgtcatagatgccatgttagaaagaataaagcatgaaaaaactgtagatatttatggccatgtaactttaatgagagcccagaggaactatatggttcaaacagaagaccaatacatctttatccatgatgcactgttagaagcagtgacttgtggaaataccgaagtgccagctagaaacttgtatgcctacattcagaagctgacacaaatagaaacgggagagaatgtcacaggaatggagctcgaatttaagcgtctagccagctcaaaagctcacacctcaaggtttatcagtgccaatcttccatgtaataaattcaaaaatcgccttgttaatattatgccatatgaatccacaagggtatgcctgcagcctatccgtggagtagaaggatctgattacatcaatgccagttttattgatggatacagacaacagaaagcctacatcgctacccaggggcccttggcagagaccactgaagacttctggcggatgctctgggaacacaattccaccatagttgtgatgctcaccaagctgcgtgaaatgggcagagagaaatgtcaccaatactggccagcagaacggtctgcaagataccagtactttgttgtagatcccatggctgagtacaacatgccacagtatatcctaagggaattcaaggtcacagatgccagggacggccagtcccgaacagtaaggcagttccagttcactgactggccagagcaaggagtgccaaagtccggagaaggatttattgacttcatcggccaagtccataaaacaaaagaacagtttggccaagatggacccatttcagtccattgcagcgcgggcgttggaagaactggagtcttcataacgctaagcattgttttggaaagaatgagatatgaaggagttgtagatatcttccagactgtcaaaatgttaagaacacaacgaccagctatggtacagacagaggatcaatatcagttttcctatcgtgccgcactagagtacctgggcagctttgaccactatgcaacgtagaaacccctgacccattctggatttttactacaggcccttcaatatccatggagtctcttctgagccatacagggcacttgagaagtccttcttaacttctagctaacaactacttagtgggactattacacacaaaacaaattaaaaacaaattattccaggtggaccaagaatctgctttgacatcgccccttcccaccatactgctcataataacattttagggggaaaggggagggaatgtttaaaaagaaagtccttgatttagttttttagtattgtaaagatactgctgacctgtgcttcatttctaactgtgtaaacttttttttaacaaaatgtatcattcgataaagtgaattttaaaaaagttacataactcttcatttttttatttccaaatcgtaggtttttttaagctgtagaactgttatctgtaatatcttgctgtagaaatatcaaatcatttgaaaatttgcacatttttgtgcaaaactcaatctacagtatcagtctcgtcagatatattaattttacacttcagttttgattggtgagaaagtacccattctcttcaaataatcaaagataattattattttgttttgtttttggaatcaacagggaggcgcaaagtataaagttgctgctaacatatatacatatatatccatattttataagggtgtctatgtatatatagacagtgtgtccacacaaaaaatagatacagttatcagtcagtcagttcttccatgatttagtttttttaaacgtagaaaagctattgtaaacatctctttccatttattcttaattttttgacatattggtatttctttaaagggaaatgaggaatgcacatcagtgattgattgtcaaacctcaccccctgatttcctacctaatctacccccacctaaccaatcaatcacatccacaaattgttttgtttgtttgttagtcaggcttccaacaaagttcaatatttctaacactctagtgcaataaaaattattattaaatagctaagaggtgtgcatgtgggaaaggtcagtgcatatccctttaggaggggagaatgttgtaatatatcagctatcgagttgtttaaaaaaagtgtattcaatcgtatattgtctatagtatgtgctatgaaatttgcatttatgatatgtaacaggggcaaagccaaattcatgttactctgttcagtcagaaacattttgtggcatacagcattcctgggaagtgctgtactttgtttcgttttggttttagttttgcatttagagtgccttataattgatgcctattttaatagcatttctttttagcttttggttcgtatttccattcactgttcgtatctgttactttctattaaagcattatctgtttaccacatgtacaaaaactctttgaataatatgcattcctagttttcagccaagtcggggatgttagtgattgtaccagcccaaagcacttggataatcagggcccttcttccttttataatcaatcatcaacatcagaaaaagctacttgttttatttatattcccttccaaatccgctctggaacatgcagtaactgcaccaaacttattttagtaacaaatatcattggcaactttggaatatatttgatattccattaggatttttctaaaaggggaaataaactatatatatatatgtatcttacccccaattcttccaacagaatttctataggaagccatggatgatggcataagtttgccacatattacatgattttaaataatcctcaaaatacccaaggaactcttaaagagttttggtatgagtatactactttggtttaattttagcttcatggatgttctgcatggaaggatttttgttttccacattttcccattgctagcagagtgaaatccaagagaccaaacatttgcaagcattgtatttgagcacttttgtaaaaaacaaagaaaaagaaaaaaaagaaaatatatataatactaaaaaaaagtatctagaaggctacctcagaatgagactctctaacctacatcagaaccagagaagaatgtgcactatgtgggtctgttatcattattttcttttagtttgtatctttttggagatttatccaagtgccagattactcagtgctataattttcttttagttaaacaaagggggtcagacagacattgcatcatccagacatgccttgttggacatgtagaatccgatggagcactgcacaccagaatgattggccaatgagcagcttctctccctgaaacaataactgcccatttggcaaagggaaagatgacaataatcagaagaagaaaatgaatgggatgcataccatagacgaacgaggcggagactattgcgggaatcttactgttcaggagctgttcctagaactaactcccttactgtcattgatgtgcattccactctgtgcttttctgtacaaccattcaagttttaatttcccaggtgaaccatctttatctgccattaccacaagctttcaagtttccagttattttcatcatcataaccagtacggtgctattatttacctatgtacgtgtagttatgtataattttgtaattagttacaatggtaaaaaaaatcaaaatatataaaaagtgatttgtacagaactttattttagctcttttttaaaaatgatttgcatggttagaaaacggcgaggacagccaggggagggaagggcctctagggaactttgcactttctatacctttgtactatgcactgccctattgattctacacccaataatgatattacttgaacccatctgtaagaaactgcttcggaaattcatttgtgtgtatgtaaataacacaacatagaaacaggaagggaaaaaagtctgcagtaatgcacgtattttttttctttcctgtttattttcggttttgctttaagtccttttatttttaattccctttttgtttttctttttgggttttggttccttttgggtttatgggtgccctgatactccagcagagatcagaaggctacagatccattctatccatccgttatgtggctttgccatcccagcttggagtgtctttacaaagataataacagttgtgttctttgctctcgttttggatgcatagactgaaaaattaaaacaaataacttgtaaaatggcttgttaaaaaatacaattacctctaattagtagtacgcgtaaatgttttacagaatgaaaggcgtgctttttattttcttacttcgttacattggtggcgaaagaagtctgtatgaaaatcagttctttgctgacacaagttccatttgttacaaatgaattctaataaaaatgtcagtgttatgca

SEQ ID NO: 5970 - protein, 1254 aa, Homo sapiens
MPGGSVNITCVAVGSPMPYVKWMLGAEDLTPEDDMPIGRNVLELNDVRQSANYTCVAMSTLGVIEAIAQITVKALPKPPGTPVVTESTATSITLTWDSGNPEPVSYYIIQHKPKNSEELYKEIDGVATTRYSVAGLSPYSDYEFRVVAVNNIGRGPPSEPVLTQTSEQAPSSAPRDVQARMLSSTTILVQWKEPEEPNGQIQGYRVYYTMDPTQHVNNWMKHNVADSQITTIGNLVPQKTYSVKVLAFTSIGDGPLSSDIQVITQTGVPGQPLNFKAEPESETSILLSWTPPRSDTIANYELVYKDGEHGEEQRITIEPGTSYRLQGLKPNSLYYFRLAARSPQGLGASTAEISARTMQSMFAKNFHVKAVMKTSVLLSWEIPENYNSAMPFKILYDDGKMVEEVDGRATQKLIVNLKPEKSYSFVLTNRGNSAGGLQHRVTAKTAPDVLRTKPAFIGKTNLDGMITVQLPEVPANENIKGYYIIIVPLKKSRGKFIKPWESPDEMELDELLKEISRKRRSIRYGREVELKPYIAAHFDVLPTEFTLGDDKHYGGFTNKQLQSGQEYVFFVLAVMEHAESKMYATSPYSDPVVSMDLDPQPITDEEEGLIWVVGPVLAVVFIICIVIAILLYKRKRAESDSRKSSIPNNKEIPSHHPTDPVELRRLNFQTPGMASHPPIPILELADHIERLKANDNLKFSQEYESIDPGQQFTWEHSNLEVNKPKNRYANVIAYDHSRVLLSAIEGIPGSDYVNANYIDGYRKQNAYIATQGSLPETFGDFWRMIWEQRSATVVMMTKLEERSRVKCDQYWPSRGTETHGLVQVTLLDTVELATYCVRTFALYKNGSSEKREVRQFQFTAWPDHGVPEHPTPFLAFLRRVKTCNPPDAGPMVVHCSAGVGRTGCFIVIDAMLERIKHEKTVDIYGHVTLMRAQRNYMVQTEDQYIFIHDALLEAVTCGNTEVPARNLYAYIQKLTQIETGENVTGMELEFKRLASSKAHTSRFISANLPCNKFKNRLVNIMPYESTRVCLQPIRGVEGSDYINASFIDGYRQQKAYIATQGPLAETTEDFWRMLWEHNSTIVVMLTKLREMGREKCHQYWPAERSARYQYFVVDPMAEYNMPQYILREFKVTDARDGQSRTVRQFQFTDWPEQGVPKSGEGFIDFIGQVHKTKEQFGQDGPISVHCSAGVGRTGVFITLSIVLERMRYEGVVDIFQTVKMLRTQRPAMVQTEDQYQFSYRAALEYLGSFDHYAT

SEQ ID NO: 5971 - DNA, 9306 bp, Homo sapiens
gcggccgctgctccgcgggattaaattggccgcccggaggcggcggcgcggccgtggcggggcgcgaaggcgctggaggaaagtgttggcggcggcgcgggaggcggtggcggcggctgcccggggccaacatgaccaggctctgaaagtgttccagctgaaatttcagatcggacagactcgctgcggctccggaggcagtgattccaagctgctcgcgcacgctgctgccaagctgcaggatggtgcacgtagccaggctgctgctgctgctcctcactttcttcctccgcacggatgctgagacacctccaaggtttacacgaacacccgttgatcagacaggggtctctggcggagttgcctctttcatctgccaagctacgggagacccaagacctaaaattgtctggaacaaaaaaggaaagaaagtcagcaatcagagatttgaggtaatagagtttgacgatgggtctggatcagttctcagaatacaacccttacggactccgagggatgaggccatttatgaatgtgtggcctcaaataatgtgggagaaataagtgtatccaccagactcacagttttgcgggaagatcaaattcccaggggcttccctaccattgacatgggcccacagttgaaggtggttgagcgtactcgcacggccaccatgctttgtgcagccagtggtaatccggatccagaaatcacttggtttaaagatttcttacctgtggacacaagcaacaacaatggtcgtattaagcagttacgatcaggagcccttcagattgagcagagtgaagagtctgaccaaggaaaatatgagtgtgttgccaccaacagcgcgggcactcagttcgccgtgtcccaccaagattctctatcccacccactaatcatgaaatcatgccaggcggaagcgttaatatcacctgtgtggccgtggggtcaccaatgccttatgtaaagtggatgttgggggcagaagatctgacacctgaagatgatatgccaataggaagaaatgtgctagaactgaatgatgtaagacagtcagcaaattacacctgtgttgctatgtcaacactgggtgtcattgaagcaatagcacagatcactgtcaaagccttacccaaacctccaggaactcctgtagtgaccgagagcacagctacaagcatcacactgacgtgggactctgggaaccctgagcctgtttcttattacataattcagcataaacctaaaaactctgaggaactttacaaagaaattgatggggtggcgaccacacgctacagtgtcgctggactaagtccctactcggattatgaattcagggttgttgctgtcaataacattgggcgggggcctcccagcgaacctgtgctaacacaaacctcagagcaagcaccatccagtgccccgagggatgtccaggcacgaatgttgagttcgaccaccattttggtacagtggaaggaacctgaagagccaaatggacagatccaaggatatagagtttattatacaatggatcccactcaacatgtcaacaactggatgaaacacaatgtagctgacagccaaatcactactattggcaacttagtgccccagaaaacatattctgtcaaagtcctggcttttacctcaattggagatggtcccctttcaagtgacatacaagtcatcactcagacaggagtaccagggcagccactaaacttcaaagcagaacctgagtctgaaacaagtattttgctctcttggacacctccacgttcagataccattgccaactatgaactggtctacaaagatggggagcatggagaggagcaacgaattaccattgagccagggacatcatataggctgcaaggactgaaaccaaacagcttatactatttccgtctggctgcacgctcccctcaaggcctgggtgcttctactgcagaaatatcagctagaaccatgcagtcaaagccgtcagctcctcctcaagacattagttgcaccagcccaagttccactagtattttggtaagttggcaacctccaccagtggaaaaacagaatggcattatcactgaatactccatcaagtacactgcagtggatggggaagatgacaagcctcacgagattttgggaattccttcggacactaccaaataccttttggaacagctggaaaaatggactgaataccggatcactgtgacagcccatacagatgtcggccctggccctgagagcttgtccgtgttgattcgaaccaatgaagatgttcctagtggtcctcctcgcaaagtcgaggtagaggctgtcaactcaacatctgttaaagtctcatggcgctcacccgtgcccaataaacagcatggccagataagaggatatcaggtgcattatgtgaggatggaaaatggtgagcccaagggccagcccatgctgaaagatgtcatgctggctgatgcacagtgggaatttgatgatactactgaacatgacatgatcatttctgggctccagcctgaaacttcctactccctcaccgtcacagcctacacaaccaaaggagatggtgctcgcagcaagcccaaactggtgtccaccactggggcagttccagggaaacctcggcttgtgattaaccacactcagatgaatactgctcttattcagtggcaccctccggtggacacatttggacctcttcagggctaccgtctaaaatttggccgcaaggatatggagccacttactactcttgagttctctgaaaaagaagatcactttacagctacagacatccacaagggagcatcatacgtcttcaggctctcagccagaaacaaagtgggctttggggaggagatggtgaaggagatttccattccagaagaagtaccaactggattccctcaaaaccttcactcagaaggcaccacttcaacctccgtccagttatcttggcaaccacctgtcctggcagagagaaatggcattatcaccaagtatacccttctttatagggatatcaacatcccccttctcccgatggagcagcttattgttccagctgacaccactatgacactcactggcttaaaaccagataccacatacgatgtaaaagtacgtgctcatacgagcaaagggcccgggccatatagtcccagtgtccagttcaggacactgcctgtggatcaagtgtttgcaaaaaattttcatgtcaaagcagtaatgaagacttccgtgttgctgtcttgggagattccagagaattataactccgccatgcctttcaaaattctttatgatgatgggaaaatggtagaagaagtggatggccgagccacacagaagttaattgtcaacctgaagcctgagaaatcatattcatttgtgctgacaaatcgtggaaacagtgctggtgggctgcagcacagggtcacggcaaagactgcaccagatgtattacgtaccaagcctgccttcattgggaagaccaacttggatggcatgattactgtgcaactgcctgaagtacctgcaaatgagaatataaaaggttactacataataattgtgcctttgaagaaatctcgcgggaaatttatcaagccatgggagagtccagatgaaatggaattagatgagctgcttaaggagatatctaggaagcgcagaagcatccgttatgggagagaagttgaattaaagccatatattgccgctcactttgatgtccttcccactgagttcaccctgggggatgacaagcattatggtggatttacaaacaagcaactccaaagtggtcaagaatatgtcttctttgtgttagcagtaatggaacatgcagagtctaagatgtatgcaaccagcccttactccgaccccgtggtgtcaatggatctggatccgcagccaatcacggatgaagaagaaggcttgatctgggttgtaggtcctgtccttgcagtggtctttatcatctgcattgtcattgctattcttctttataaaaggaagagggcagagtccgactctagaaaaagcagcataccgaacaataaggagatcccttcacaccacccaacagaccctgtagaactgaggcgccttaactttcaaacaccgggtatggctagccatcctccaatacccatcttggaacttgcagaccacattgaaagattgaaagcaaatgacaacttgaagttttcccaggaatatgagtcaattgaccctggccagcagttcacttgggaacattcaaacttggaagtaaacaaaccaaagaatagatacgcgaatgtaatcgcatatgatcattcccgggttctcctatcagctatagaagggatcccaggaagtgactatgtgaatgccaactacatagatgggtataggaagcaaaatgcctatattgcaacacagggatctctccccgaaacatttggggacttttggagaatgatatgggaacaacggagtgccacagttgtcatgatgacaaaactagaagaaagatcaagggtgaagtgtgaccagtattggcctagcagaggcacagaaacccacggactcgttcaagtaacgctgcttgatactgtggagctggccacatattgtgttcgaacatttgcactttacaagaatggttcaagtgagaagagagaagtgagacaattccagttcaccgcctggcctgatcatggtgttccagaacaccctacaccttttctagctttcttacgtagagtcaaaacctgtaaccctcccgatgctggtccgatggttgtgcactgcagtgcgggagttggccggactggttgcttcatcgtcatagatgccatgttagaaagaataaagcatgaaaaaactgtagatatttatggccatgtaactttaatgagagcccagaggaactatatggttcaaacagaagaccaatacatctttatccatgatgcactgttagaagcagtgacttgtggaaataccgaagtgccagctagaaacttgtatgcctacattcagaagctgacacaaatagaaacgggagagaatgtcacaggaatggagctcgaatttaagcgtctagccagctcaaaagctcacacctcaaggtttatcagtgccaatcttccatgtaataaattcaaaaatcgccttgttaatattatgccatatgaatccacaagggtatgcctgcagcctatccgtggagtagaaggatctgattacatcaatgccagttttattgatggatacagacaacagaaagcctacatcgctacccaggggcccttggcagagaccactgaagacttctggcggatgctctgggaacacaattccaccatagttgtgatgctcaccaagctgcgtgaaatgggcagagagaaatgtcaccaatactggccagcagaacggtctgcaagataccagtactttgttgtagatcccatggctgagtacaacatgccacagtatatcctaagggaattcaaggtcacagatgccagggacggccagtcccgaacagtaaggcagttccagttcactgactggccagagcaaggagtgccaaagtccggagaaggatttattgacttcatcggccaagtccataaaacaaaagaacagtttggccaagatggacccatttcagtccattgcagcgcgggcgttggaagaactggagtcttcataacgctaagcattgttttggaaagaatgagatatgaaggagttgtagatatcttccagactgtcaaaatgttaagaacacaacgaccagctatggtacagacagaggatcaatatcagttttcctatcgtgccgcactagagtacctgggcagctttgaccactatgcaacgtagaaacccctgacccattctggatttttactacaggcccttcaatatccatggagtctcttctgagccatacagggcacttgagaagtccttcttaacttctagctaacaactacttagtgggactattacacacaaaacaaattaaaaacaaattattccaggtggaccaagaatctgctttgacatcgccccttcccaccatactgctcataataacattttagggggaaaggggagggaatgtttaaaaagaaagtccttgatttagttttttagtattgtaaagatactgctgacctgtgcttcatttctaactgtgtaaacttttttttaacaaaatgtatcattcgataaagtgaattttaaaaaagttacataactcttcatttttttatttccaaatcgtaggtttttttaagctgtagaactgttatctgtaatatcttgctgtagaaatatcaaatcatttgaaaatttgcacatttttgtgcaaaactcaatctacagtatcagtctcgtcagatatattaattttacacttcagttttgattggtgagaaagtacccattctcttcaaataatcaaagataattattattttgttttgtttttggaatcaacagggaggcgcaaagtataaagttgctgctaacatatatacatatatatccatattttataagggtgtctatgtatatatagacagtgtgtccacacaaaaaatagatacagttatcagtcagtcagttcttccatgatttagtttttttaaacgtagaaaagctattgtaaacatctctttccatttattcttaattttttgacatattggtatttctttaaagggaaatgaggaatgcacatcagtgattgattgtcaaacctcaccccctgatttcctacctaatctacccccacctaaccaatcaatcacatccacaaattgttttgtttgtttgttagtcaggcttccaacaaagttcaatatttctaacactctagtgcaataaaaattattattaaatagctaagaggtgtgcatgtgggaaaggtcagtgcatatccctttaggaggggagaatgttgtaatatatcagctatcgagttgtttaaaaaaagtgtattcaatcgtatattgtctatagtatgtgctatgaaatttgcatttatgatatgtaacaggggcaaagccaaattcatgttactctgttcagtcagaaacattttgtggcatacagcattcctgggaagtgctgtactttgtttcgttttggttttagttttgcatttagagtgccttataattgatgcctattttaatagcatttctttttagcttttggttcgtatttccattcactgttcgtatctgttactttctattaaagcattatctgtttaccacatgtacaaaaactctttgaataatatgcattcctagttttcagccaagtcggggatgttagtgattgtaccagcccaaagcacttggataatcagggcccttcttccttttataatcaatcatcaacatcagaaaaagctacttgttttatttatattcccttccaaatccgctctggaacatgcagtaactgcaccaaacttattttagtaacaaatatcattggcaactttggaatatatttgatattccattaggatttttctaaaaggggaaataaactatatatatatatgtatcttacccccaattcttccaacagaatttctataggaagccatggatgatggcataagtttgccacatattacatgattttaaataatcctcaaaatacccaaggaactcttaaagagttttggtatgagtatactactttggtttaattttagcttcatggatgttctgcatggaaggatttttgttttccacattttcccattgctagcagagtgaaatccaagagaccaaacatttgcaagcattgtatttgagcacttttgtaaaaaacaaagaaaaagaaaaaaaagaaaatatatataatactaaaaaaaagtatctagaaggctacctcagaatgagactctctaacctacatcagaaccagagaagaatgtgcactatgtgggtctgttatcattattttcttttagtttgtatctttttggagatttatccaagtgccagattactcagtgctataattttcttttagttaaacaaagggggtcagacagacattgcatcatccagacatgccttgttggacatgtagaatccgatggagcactgcacaccagaatgattggccaatgagcagcttctctccctgaaacaataactgcccatttggcaaagggaaagatgacaataatcagaagaagaaaatgaatgggatgcataccatagacgaacgaggcggagactattgcgggaatcttactgttcaggagctgttcctagaactaactcccttactgtcattgatgtgcattccactctgtgcttttctgtacaaccattcaagttttaatttcccaggtgaaccatctttatctgccattaccacaagctttcaagtttccagttattttcatcatcataaccagtacggtgctattatttacctatgtacgtgtagttatgtataattttgtaattagttacaatggtaaaaaaaatcaaaatatataaaaagtgatttgtacagaactttattttagctcttttttaaaaatgatttgcatggttagaaaacggcgaggacagccaggggagggaagggcctctagggaactttgcactttctatacctttgtactatgcactgccctattgattctacacccaataatgatattacttgaacccatctgtaagaaactgcttcggaaattcatttgtgtgtatgtaaataacacaacatagaaacaggaagggaaaaaagtctgcagtaatgcacgtattttttttctttcctgtttattttcggttttgctttaagtccttttatttttaattccctttttgtttttctttttgggttttggttccttttgggtttatgggtgccctgatactccagcagagatcagaaggctacagatccattctatccatccgttatgtggctttgccatcccagcttggagtgtctttacaaagataataacagttgtgttctttgctctcgttttggatgcatagactgaaaaattaaaacaaataacttgtaaaatggcttgttaaaaaatacaattacctctaattagtagtacgcgtaaatgttttacagaatgaaaggcgtgctttttattttcttacttcgttacattggtggcgaaagaagtctgtatgaaaatcagttctttgctgacacaagttccatttgttacaaatgaattctaataaaaatgtcagtgttatgca

SEQ ID NO: 5972 - protein, 1665 aa, Homo sapiens; identical to SEQ ID NO: 5966

SEQ ID NO: 5973 - DNA, 9367 bp, Homo sapiens
tgagaccacagcagaatgtgccttggacaaaggtctcagggtggtgaactttttcttcgaattcctaacctgtgagcttacgatgatggtgcctgtccattaactgaacaactgtggttttgaacttcttgaggccagggactgtgtctgaaaacaccgacggtggctaactcaagggagacgtctggtgaacacccgtgggatctaaagaacaagctctgaaagtgttccagctgaaatttcagatcggacagactcgctgcggctccggaggcagtgattccaagctgctcgcgcacgctgctgccaagctgcaggatggtgcacgtagccaggctgctgctgctgctcctcactttcttcctccgcacggatgctgagacacctccaaggtttacacgaacacccgttgatcagacaggggtctctggcggagttgcctctttcatctgccaagctacgggagacccaagacctaaaattgtctggaacaaaaaaggaaagaaagtcagcaatcagagatttgaggtaatagagtttgacgatgggtctggatcagttctcagaatacaacccttacggactccgagggatgaggccatttatgaatgtgtggcctcaaataatgtgggagaaataagtgtatccaccagactcacagttttgcgggaagatcaaattcccaggggcttccctaccattgacatgggcccacagttgaaggtggttgagcgtactcgcacggccaccatgctttgtgcagccagtggtaatccggatccagaaatcacttggtttaaagatttcttacctgtggacacaagcaacaacaatggtcgtattaagcagttacgatcaggagcccttcagattgagcagagtgaagagtctgaccaaggaaaatatgagtgtgttgccaccaacagcgcgggcactcagagctgcgagaagttcgccgtgtcccaccaagattctctatcccacccactaatcatgaaatcatgccaggcggaagcgttaatatcacctgtgtggccgtggggtcaccaatgccttatgtaaagtggatgttgggggcagaagatctgacacctgaagatgatatgccaataggaagaaatgtgctagaactgaatgatgtaagacagtcagcaaattacacctgtgttgctatgtcaacactgggtgtcattgaagcaatagcacagatcactgtcaaagccttacccaaacctccaggaactcctgtagtgaccgagagcacagctacaagcatcacactgacgtgggactctgggaaccctgagcctgtttcttattacataattcagcataaacctaaaaactctgaggaactttacaaagaaattgatggggtggcgaccacacgctacagtgtcgctggactaagtccctactcggattatgaattcagggttgttgctgtcaataacattgggcgggggcctcccagcgaacctgtgctaacacaaacctcagagcaagcaccatccagtgccccgagggatgtccaggcacgaatgttgagttcgaccaccattttggtacagtggaaggaacctgaagagccaaatggacagatccaaggatatagagtttattatacaatggatcccactcaacatgtcaacaactggatgaaacacaatgtagctgacagccaaatcactactattggcaacttagtgccccagaaaacatattctgtcaaagtcctggcttttacctcaattggagatggtcccctttcaagtgacatacaagtcatcactcagacaggagtaccagggcagccactaaacttcaaagcagaacctgagtctgaaacaagtattttgctctcttggacacctccacgttcagataccattgccaactatgaactggtctacaaagatggggagcatggagaggagcaacgaattaccattgagccagggacatcatataggctgcaaggactgaaaccaaacagcttatactatttccgtctggctgcacgctcccctcaaggcctgggtgcttctactgcagaaatatcagctagaaccatgcagtcaaagccgtcagctcctcctcaagacattagttgcaccagcccaagttccactagtattttggtaagttggcaacctccaccagtggaaaaacagaatggcattatcactgaatactccatcaagtacactgcagtggatggggaagatgacaagcctcacgagattttgggaattccttcggacactaccaaataccttttggaacagctggaaaaatggactgaataccggatcactgtgacagcccatacagatgtcggccctggccctgagagcttgtccgtgttgattcgaaccaatgaagatgttcctagtggtcctcctcgcaaagtcgaggtagaggctgtcaactcaacatctgttaaagtctcatggcgctcacccgtgcccaataaacagcatggccagataagaggatatcaggtgcattatgtgaggatggaaaatggtgagcccaagggccagcccatgctgaaagatgtcatgctggctgatgcacaggacatgatcatttctgggctccagcctgaaacttcctactccctcaccgtcacagcctacacaaccaaaggagatggtgctcgcagcaagcccaaactggtgtccaccactggggcagttccagggaaacctcggcttgtgattaaccacactcagatgaatactgctcttattcagtggcaccctccggtggacacatttggacctcttcagggctaccgtctaaaatttggccgcaaggatatggagccacttactactcttgagttctctgaaaaagaagatcactttacagctacagacatccacaagggagcatcatacgtcttcaggctctcagccagaaacaaagtgggctttggggaggagatggtgaaggagatttccattccagaagaagtaccaactggattccctcaaaaccttcactcagaaggcaccacttcaacctccgtccagttatcttggcaaccacctgtcctggcagagagaaatggcattatcaccaagtatacccttctttatagggatatcaacatcccccttctcccgatggagcagcttattgttccagctgacaccactatgacactcactggcttaaaaccagataccacatacgatgtaaaagtacgtgctcatacgagcaaagggcccgggccatatagtcccagtgtccagttcaggacactgcctgtggatcaagtgtttgcaaaaaattttcatgtcaaagcagtaatgaagacttccgtgttgctgtcttgggagattccagagaattataactccgccatgcctttcaaaattctttatgatgatgggaaaatggtagaagaagtggatggccgagccacacagaagttaattgtcaacctgaagcctgagaaatcatattcatttgtgctgacaaatcgtggaaacagtgctggtgggctgcagcacagggtcacggcaaagactgcaccagatgtattacgtaccaagcctgccttcattgggaagaccaacttggatggcatgattactgtgcaactgcctgaagtacctgcaaatgagaatataaaaggttactacataataattgtgcctttgaagaaatctcgcgggaaatttatcaagccatgggagagtccagatgaaatggaattagatgagctgcttaaggagatatctaggaagcgcagaagcatccgttatgggagagaagttgaattaaagccatatattgccgctcactttgatgtccttcccactgagttcaccctgggggatgacaagcattatggtggatttacaaacaagcaactccaaagtggtcaagaatatgtcttctttgtgttagcagtaatggaacatgcagagtctaagatgtatgcaaccagcccttactccgaccccgtggtgtcaatggatctggatccgcagccaatcacggatgaagaagaaggcttgatctgggttgtaggtcctgtccttgcagtggtctttatcatctgcattgtcattgctattcttctttataaaaggaagagggcagagtccgactctagaaaaagcagcataccgaacaataaggagatcccttcacaccacccaacagaccctgtagaactgaggcgccttaactttcaaacaccgggtatggctagccatcctccaatacccatcttggaacttgcagaccacattgaaagattgaaagcaaatgacaacttgaagttttcccaggaatatgagtcaattgaccctggccagcagttcacttgggaacattcaaacttggaagtaaacaaaccaaagaatagatacgcgaatgtaatcgcatatgatcattcccgggttctcctatcagctatagaagggatcccaggaagtgactatgtgaatgccaactacatagatgggtataggaagcaaaatgcctatattgcaacacagggatctctccccgaaacatttggggacttttggagaatgatatgggaacaacggagtgccacagttgtcatgatgacaaaactagaagaaagatcaagggtgaagtgtgaccagtattggcctagcagaggcacagaaacccacggactcgttcaagtaacgctgcttgatactgtggagctggccacatattgtgttcgaacatttgcactttacaagaatggttcaagtgagaagagagaagtgagacaattccagttcaccgcctggcctgatcatggtgttccagaacaccctacaccttttctagctttcttacgtagagtcaaaacctgtaaccctcccgatgctggtccgatggttgtgcactgcagtgcgggagttggccggactggttgcttcatcgtcatagatgccatgttagaaagaataaagcatgaaaaaactgtagatatttatggccatgtaactttaatgagagcccagaggaactatatggttcaaacagaagaccaatacatctttatccatgatgcactgttagaagcagtgacttgtggaaataccgaagtgccagctagaaacttgtatgcctacattcagaagctgacacaaatagaaacgggagagaatgtcacaggaatggagctcgaatttaagcgtctagccagctcaaaagctcacacctcaaggtttatcagtgccaatcttccatgtaataaattcaaaaatcgccttgttaatattatgccatatgaatccacaagggtatgcctgcagcctatccgtggagtagaaggatctgattacatcaatgccagttttattgatggatacagacaacagaaagcctacatcgctacccaggggcccttggcagagaccactgaagacttctggcggatgctctgggaacacaattccaccatagttgtgatgctcaccaagctgcgtgaaatgggcagagagaaatgtcaccaatactggccagcagaacggtctgcaagataccagtactttgttgtagatcccatggctgagtacaacatgccacagtatatcctaagggaattcaaggtcacagatgccagggacggccagtcccgaacagtaaggcagttccagttcactgactggccagagcaaggagtgccaaagtccggagaaggatttattgacttcatcggccaagtccataaaacaaaagaacagtttggccaagatggacccatttcagtccattgcagcgcgggcgttggaagaactggagtcttcataacgctaagcattgttttggaaagaatgagatatgaaggagttgtagatatcttccagactgtcaaaatgttaagaacacaacgaccagctatggtacagacagaggatcaatatcagttttcctatcgtgccgcactagagtacctgggcagctttgaccactatgcaacgtagaaacccctgacccattctggatttttactacaggcccttcaatatccatggagtctcttctgagccatacagggcacttgagaagtccttcttaacttctagctaacaactacttagtgggactattacacacaaaacaaattaaaaacaaattattccaggtggaccaagaatctgctttgacatcgccccttcccaccatactgctcataataacattttagggggaaaggggagggaatgtttaaaaagaaagtccttgatttagttttttagtattgtaaagatactgctgacctgtgcttcatttctaactgtgtaaacttttttttaacaaaatgtatcattcgataaagtgaattttaaaaaagttacataactcttcatttttttatttccaaatcgtaggtttttttaagctgtagaactgttatctgtaatatcttgctgtagaaatatcaaatcatttgaaaatttgcacatttttgtgcaaaactcaatctacagtatcagtctcgtcagatatattaattttacacttcagttttgattggtgagaaagtacccattctcttcaaataatcaaagataattattattttgttttgtttttggaatcaacagggaggcgcaaagtataaagttgctgctaacatatatacatatatatccatattttataagggtgtctatgtatatatagacagtgtgtccacacaaaaaatagatacagttatcagtcagtcagttcttccatgatttagtttttttaaacgtagaaaagctattgtaaacatctctttccatttattcttaattttttgacatattggtatttctttaaagggaaatgaggaatgcacatcagtgattgattgtcaaacctcaccccctgatttcctacctaatctacccccacctaaccaatcaatcacatccacaaattgttttgtttgtttgttagtcaggcttccaacaaagttcaatatttctaacactctagtgcaataaaaattattattaaatagctaagaggtgtgcatgtgggaaaggtcagtgcatatccctttaggaggggagaatgttgtaatatatcagctatcgagttgtttaaaaaaagtgtattcaatcgtatattgtctatagtatgtgctatgaaatttgcatttatgatatgtaacaggggcaaagccaaattcatgttactctgttcagtcagaaacattttgtggcatacagcattcctgggaagtgctgtactttgtttcgttttggttttagttttgcatttagagtgccttataattgatgcctattttaatagcatttctttttagcttttggttcgtatttccattcactgttcgtatctgttactttctattaaagcattatctgtttaccacatgtacaaaaactctttgaataatatgcattcctagttttcagccaagtcggggatgttagtgattgtaccagcccaaagcacttggataatcagggcccttcttccttttataatcaatcatcaacatcagaaaaagctacttgttttatttatattcccttccaaatccgctctggaacatgcagtaactgcaccaaacttattttagtaacaaatatcattggcaactttggaatatatttgatattccattaggatttttctaaaaggggaaataaactatatatatatatgtatcttacccccaattcttccaacagaatttctataggaagccatggatgatggcataagtttgccacatattacatgattttaaataatcctcaaaatacccaaggaactcttaaagagttttggtatgagtatactactttggtttaattttagcttcatggatgttctgcatggaaggatttttgttttccacattttcccattgctagcagagtgaaatccaagagaccaaacatttgcaagcattgtatttgagcacttttgtaaaaaacaaagaaaaagaaaaaaaagaaaatatatataatactaaaaaaaagtatctagaaggctacctcagaatgagactctctaacctacatcagaaccagagaagaatgtgcactatgtgggtctgttatcattattttcttttagtttgtatctttttggagatttatccaagtgccagattactcagtgctataattttcttttagttaaacaaagggggtcagacagacattgcatcatccagacatgccttgttggacatgtagaatccgatggagcactgcacaccagaatgattggccaatgagcagcttctctccctgaaacaataactgcccatttggcaaagggaaagatgacaataatcagaagaagaaaatgaatgggatgcataccatagacgaacgaggcggagactattgcgggaatcttactgttcaggagctgttcctagaactaactcccttactgtcattgatgtgcattccactctgtgcttttctgtacaaccattcaagttttaatttcccaggtgaaccatctttatctgccattaccacaagctttcaagtttccagttattttcatcatcataaccagtacggtgctattatttacctatgtacgtgtagttatgtataattttgtaattagttacaatggtaaaaaaaatcaaaatatataaaaagtgatttgtacagaactttattttagctcttttttaaaaatgatttgcatggttagaaaacggcgaggacagccaggggagggaagggcctctagggaactttgcactttctatacctttgtactatgcactgccctattgattctacacccaataatgatattacttgaacccatctgtaagaaactgcttcggaaattcatttgtgtgtatgtaaataacacaacatagaaacaggaagggaaaaaagtctgcagtaatgcacgtattttttttctttcctgtttattttcggttttgctttaagtccttttatttttaattccctttttgtttttctttttgggttttggttccttttgggtttatgggtgccctgatactccagcagagatcagaaggctacagatccattctatccatccgttatgtggctttgccatcccagcttggagtgtctttacaaagataataacagttgtgttctttgctctcgttttggatgcatagactgaaaaattaaaacaaataacttgtaaaatggcttgttaaaaaatacaattacctctaattagtagtacgcgtaaatgttttacagaatgaaaggcgtgctttttattttcttacttcgttacattggtggcgaaagaagtctgtatgaaaatcagttctttgctgacacaagttccatttgttacaaatgaattctaataaaaatgtcagtgttatgca

SEQ ID NO: 5974 - protein, 1656 aa, Homo sapiens; identical to SEQ ID NO: 5968

SEQ ID NO: 5975 - DNA, 9394 bp, Homo sapiens
tgagaccacagcagaatgtgccttggacaaaggtctcagggtggtgaactttttcttcgaattcctaacctgtgagcttacgatgatggtgcctgtccattaactgaacaactgtggttttgaacttcttgaggccagggactgtgtctgaaaacaccgacggtggctaactcaagggagacgtctggtgaacacccgtgggatctaaagaacaagctctgaaagtgttccagctgaaatttcagatcggacagactcgctgcggctccggaggcagtgattccaagctgctcgcgcacgctgctgccaagctgcaggatggtgcacgtagccaggctgctgctgctgctcctcactttcttcctccgcacggatgctgagacacctccaaggtttacacgaacacccgttgatcagacaggggtctctggcggagttgcctctttcatctgccaagctacgggagacccaagacctaaaattgtctggaacaaaaaaggaaagaaagtcagcaatcagagatttgaggtaatagagtttgacgatgggtctggatcagttctcagaatacaacccttacggactccgagggatgaggccatttatgaatgtgtggcctcaaataatgtgggagaaataagtgtatccaccagactcacagttttgcgggaagatcaaattcccaggggcttccctaccattgacatgggcccacagttgaaggtggttgagcgtactcgcacggccaccatgctttgtgcagccagtggtaatccggatccagaaatcacttggtttaaagatttcttacctgtggacacaagcaacaacaatggtcgtattaagcagttacgatcaggagcccttcagattgagcagagtgaagagtctgaccaaggaaaatatgagtgtgttgccaccaacagcgcgggcactcagagctgcgagaagttcgccgtgtcccaccaagattctctatcccacccactaatcatgaaatcatgccaggcggaagcgttaatatcacctgtgtggccgtggggtcaccaatgccttatgtaaagtggatgttgggggcagaagatctgacacctgaagatgatatgccaataggaagaaatgtgctagaactgaatgatgtaagacagtcagcaaattacacctgtgttgctatgtcaacactgggtgtcattgaagcaatagcacagatcactgtcaaagccttacccaaacctccaggaactcctgtagtgaccgagagcacagctacaagcatcacactgacgtgggactctgggaaccctgagcctgtttcttattacataattcagcataaacctaaaaactctgaggaactttacaaagaaattgatggggtggcgaccacacgctacagtgtcgctggactaagtccctactcggattatgaattcagggttgttgctgtcaataacattgggcgggggcctcccagcgaacctgtgctaacacaaacctcagagcaagcaccatccagtgccccgagggatgtccaggcacgaatgttgagttcgaccaccattttggtacagtggaaggaacctgaagagccaaatggacagatccaaggatatagagtttattatacaatggatcccactcaacatgtcaacaactggatgaaacacaatgtagctgacagccaaatcactactattggcaacttagtgccccagaaaacatattctgtcaaagtcctggcttttacctcaattggagatggtcccctttcaagtgacatacaagtcatcactcagacaggagtaccagggcagccactaaacttcaaagcagaacctgagtctgaaacaagtattttgctctcttggacacctccacgttcagataccattgccaactatgaactggtctacaaagatggggagcatggagaggagcaacgaattaccattgagccagggacatcatataggctgcaaggactgaaaccaaacagcttatactatttccgtctggctgcacgctcccctcaaggcctgggtgcttctactgcagaaatatcagctagaaccatgcagtcaaagccgtcagctcctcctcaagacattagttgcaccagcccaagttccactagtattttggtaagttggcaacctccaccagtggaaaaacagaatggcattatcactgaatactccatcaagtacactgcagtggatggggaagatgacaagcctcacgagattttgggaattccttcggacactaccaaataccttttggaacagctggaaaaatggactgaataccggatcactgtgacagcccatacagatgtcggccctggccctgagagcttgtccgtgttgattcgaaccaatgaagatgttcctagtggtcctcctcgcaaagtcgaggtagaggctgtcaactcaacatctgttaaagtctcatggcgctcacccgtgcccaataaacagcatggccagataagaggatatcaggtgcattatgtgaggatggaaaatggtgagcccaagggccagcccatgctgaaagatgtcatgctggctgatgcacagtgggaatttgatgatactactgaacatgacatgatcatttctgggctccagcctgaaacttcctactccctcaccgtcacagcctacacaaccaaaggagatggtgctcgcagcaagcccaaactggtgtccaccactggggcagttccagggaaacctcggcttgtgattaaccacactcagatgaatactgctcttattcagtggcaccctccggtggacacatttggacctcttcagggctaccgtctaaaatttggccgcaaggatatggagccacttactactcttgagttctctgaaaaagaagatcactttacagctacagacatccacaagggagcatcatacgtcttcaggctctcagccagaaacaaagtgggctttggggaggagatggtgaaggagatttccattccagaagaagtaccaactggattccctcaaaaccttcactcagaaggcaccacttcaacctccgtccagttatcttggcaaccacctgtcctggcagagagaaatggcattatcaccaagtatacccttctttatagggatatcaacatcccccttctcccgatggagcagcttattgttccagctgacaccactatgacactcactggcttaaaaccagataccacatacgatgtaaaagtacgtgctcatacgagcaaagggcccgggccatatagtcccagtgtccagttcaggacactgcctgtggatcaagtgtttgcaaaaaattttcatgtcaaagcagtaatgaagacttccgtgttgctgtcttgggagattccagagaattataactccgccatgcctttcaaaattctttatgatgatgggaaaatggtagaagaagtggatggccgagccacacagaagttaattgtcaacctgaagcctgagaaatcatattcatttgtgctgacaaatcgtggaaacagtgctggtgggctgcagcacagggtcacggcaaagactgcaccagatgtattacgtaccaagcctgccttcattgggaagaccaacttggatggcatgattactgtgcaactgcctgaagtacctgcaaatgagaatataaaaggttactacataataattgtgcctttgaagaaatctcgcgggaaatttatcaagccatgggagagtccagatgaaatggaattagatgagctgcttaaggagatatctaggaagcgcagaagcatccgttatgggagagaagttgaattaaagccatatattgccgctcactttgatgtccttcccactgagttcaccctgggggatgacaagcattatggtggatttacaaacaagcaactccaaagtggtcaagaatatgtcttctttgtgttagcagtaatggaacatgcagagtctaagatgtatgcaaccagcccttactccgaccccgtggtgtcaatggatctggatccgcagccaatcacggatgaagaagaaggcttgatctgggttgtaggtcctgtccttgcagtggtctttatcatctgcattgtcattgctattcttctttataaaaggaagagggcagagtccgactctagaaaaagcagcataccgaacaataaggagatcccttcacaccacccaacagaccctgtagaactgaggcgccttaactttcaaacaccgggtatggctagccatcctccaatacccatcttggaacttgcagaccacattgaaagattgaaagcaaatgacaacttgaagttttcccaggaatatgagtcaattgaccctggccagcagttcacttgggaacattcaaacttggaagtaaacaaaccaaagaatagatacgcgaatgtaatcgcatatgatcattcccgggttctcctatcagctatagaagggatcccaggaagtgactatgtgaatgccaactacatagatgggtataggaagcaaaatgcctatattgcaacacagggatctctccccgaaacatttggggacttttggagaatgatatgggaacaacggagtgccacagttgtcatgatgacaaaactagaagaaagatcaagggtgaagtgtgaccagtattggcctagcagaggcacagaaacccacggactcgttcaagtaacgctgcttgatactgtggagctggccacatattgtgttcgaacatttgcactttacaagaatggttcaagtgagaagagagaagtgagacaattccagttcaccgcctggcctgatcatggtgttccagaacaccctacaccttttctagctttcttacgtagagtcaaaacctgtaaccctcccgatgctggtccgatggttgtgcactgcagtgcgggagttggccggactggttgcttcatcgtcatagatgccatgttagaaagaataaagcatgaaaaaactgtagatatttatggccatgtaactttaatgagagcccagaggaactatatggttcaaacagaagaccaatacatctttatccatgatgcactgttagaagcagtgacttgtggaaataccgaagtgccagctagaaacttgtatgcctacattcagaagctgacacaaatagaaacgggagagaatgtcacaggaatggagctcgaatttaagcgtctagccagctcaaaagctcacacctcaaggtttatcagtgccaatcttccatgtaataaattcaaaaatcgccttgttaatattatgccatatgaatccacaagggtatgcctgcagcctatccgtggagtagaaggatctgattacatcaatgccagttttattgatggatacagacaacagaaagcctacatcgctacccaggggcccttggcagagaccactgaagacttctggcggatgctctgggaacacaattccaccatagttgtgatgctcaccaagctgcgtgaaatgggcagagagaaatgtcaccaatactggccagcagaacggtctgcaagataccagtactttgttgtagatcccatggctgagtacaacatgccacagtatatcctaagggaattcaaggtcacagatgccagggacggccagtcccgaacagtaaggcagttccagttcactgactggccagagcaaggagtgccaaagtccggagaaggatttattgacttcatcggccaagtccataaaacaaaagaacagtttggccaagatggacccatttcagtccattgcagcgcgggcgttggaagaactggagtcttcataacgctaagcattgttttggaaagaatgagatatgaaggagttgtagatatcttccagactgtcaaaatgttaagaacacaacgaccagctatggtacagacagaggatcaatatcagttttcctatcgtgccgcactagagtacctgggcagctttgaccactatgcaacgtagaaacccctgacccattctggatttttactacaggcccttcaatatccatggagtctcttctgagccatacagggcacttgagaagtccttcttaacttctagctaacaactacttagtgggactattacacacaaaacaaattaaaaacaaattattccaggtggaccaagaatctgctttgacatcgccccttcccaccatactgctcataataacattttagggggaaaggggagggaatgtttaaaaagaaagtccttgatttagttttttagtattgtaaagatactgctgacctgtgcttcatttctaactgtgtaaacttttttttaacaaaatgtatcattcgataaagtgaattttaaaaaagttacataactcttcatttttttatttccaaatcgtaggtttttttaagctgtagaactgttatctgtaatatcttgctgtagaaatatcaaatcatttgaaaatttgcacatttttgtgcaaaactcaatctacagtatcagtctcgtcagatatattaattttacacttcagttttgattggtgagaaagtacccattctcttcaaataatcaaagataattattattttgttttgtttttggaatcaacagggaggcgcaaagtataaagttgctgctaacatatatacatatatatccatattttataagggtgtctatgtatatatagacagtgtgtccacacaaaaaatagatacagttatcagtcagtcagttcttccatgatttagtttttttaaacgtagaaaagctattgtaaacatctctttccatttattcttaattttttgacatattggtatttctttaaagggaaatgaggaatgcacatcagtgattgattgtcaaacctcaccccctgatttcctacctaatctacccccacctaaccaatcaatcacatccacaaattgttttgtttgtttgttagtcaggcttccaacaaagttcaatatttctaacactctagtgcaataaaaattattattaaatagctaagaggtgtgcatgtgggaaaggtcagtgcatatccctttaggaggggagaatgttgtaatatatcagctatcgagttgtttaaaaaaagtgtattcaatcgtatattgtctatagtatgtgctatgaaatttgcatttatgatatgtaacaggggcaaagccaaattcatgttactctgttcagtcagaaacattttgtggcatacagcattcctgggaagtgctgtactttgtttcgttttggttttagttttgcatttagagtgccttataattgatgcctattttaatagcatttctttttagcttttggttcgtatttccattcactgttcgtatctgttactttctattaaagcattatctgtttaccacatgtacaaaaactctttgaataatatgcattcctagttttcagccaagtcggggatgttagtgattgtaccagcccaaagcacttggataatcagggcccttcttccttttataatcaatcatcaacatcagaaaaagctacttgttttatttatattcccttccaaatccgctctggaacatgcagtaactgcaccaaacttattttagtaacaaatatcattggcaactttggaatatatttgatattccattaggatttttctaaaaggggaaataaactatatatatatatgtatcttacccccaattcttccaacagaatttctataggaagccatggatgatggcataagtttgccacatattacatgattttaaataatcctcaaaatacccaaggaactcttaaagagttttggtatgagtatactactttggtttaattttagcttcatggatgttctgcatggaaggatttttgttttccacattttcccattgctagcagagtgaaatccaagagaccaaacatttgcaagcattgtatttgagcacttttgtaaaaaacaaagaaaaagaaaaaaaagaaaatatatataatactaaaaaaaagtatctagaaggctacctcagaatgagactctctaacctacatcagaaccagagaagaatgtgcactatgtgggtctgttatcattattttcttttagtttgtatctttttggagatttatccaagtgccagattactcagtgctataattttcttttagttaaacaaagggggtcagacagacattgcatcatccagacatgccttgttggacatgtagaatccgatggagcactgcacaccagaatgattggccaatgagcagcttctctccctgaaacaataactgcccatttggcaaagggaaagatgacaataatcagaagaagaaaatgaatgggatgcataccatagacgaacgaggcggagactattgcgggaatcttactgttcaggagctgttcctagaactaactcccttactgtcattgatgtgcattccactctgtgcttttctgtacaaccattcaagttttaatttcccaggtgaaccatctttatctgccattaccacaagctttcaagtttccagttattttcatcatcataaccagtacggtgctattatttacctatgtacgtgtagttatgtataattttgtaattagttacaatggtaaaaaaaatcaaaatatataaaaagtgatttgtacagaactttattttagctcttttttaaaaatgatttgcatggttagaaaacggcgaggacagccaggggagggaagggcctctagggaactttgcactttctatacctttgtactatgcactgccctattgattctacacccaataatgatattacttgaacccatctgtaagaaactgcttcggaaattcatttgtgtgtatgtaaataacacaacatagaaacaggaagggaaaaaagtctgcagtaatgcacgtattttttttctttcctgtttattttcggttttgctttaagtccttttatttttaattccctttttgtttttctttttgggttttggttccttttgggtttatgggtgccctgatactccagcagagatcagaaggctacagatccattctatccatccgttatgtggctttgccatcccagcttggagtgtctttacaaagataataacagttgtgttctttgctctcgttttggatgcatagactgaaaaattaaaacaaataacttgtaaaatggcttgttaaaaaatacaattacctctaattagtagtacgcgtaaatgttttacagaatgaaaggcgtgctttttattttcttacttcgttacattggtggcgaaagaagtctgtatgaaaatcagttctttgctgacacaagttccatttgttacaaatgaattctaataaaaatgtcagtgttatgca

SEQ ID NO: 5976 - protein, 1665 aa, Homo sapiens; identical to SEQ ID NO: 5966

SEQ ID NO: 5977 - DNA, 9382 bp, Homo sapiens
tgagaccacagcagaatgtgccttggacaaaggtctcagggtggtgaactttttcttcgaattcctaacctgtgagcttacgatgatggtgcctgtccattaactgaacaactgtggttttgaacttcttgaggccagggactgtgtctgaaaacaccgacggtggctaactcaagggagacgtctggtgaacacccgtgggatctaaagaacaagctctgaaagtgttccagctgaaatttcagatcggacagactcgctgcggctccggaggcagtgattccaagctgctcgcgcacgctgctgccaagctgcaggatggtgcacgtagccaggctgctgctgctgctcctcactttcttcctccgcacggatgctgagacacctccaaggtttacacgaacacccgttgatcagacaggggtctctggcggagttgcctctttcatctgccaagctacgggagacccaagacctaaaattgtctggaacaaaaaaggaaagaaagtcagcaatcagagatttgaggtaatagagtttgacgatgggtctggatcagttctcagaatacaacccttacggactccgagggatgaggccatttatgaatgtgtggcctcaaataatgtgggagaaataagtgtatccaccagactcacagttttgcgggaagatcaaattcccaggggcttccctaccattgacatgggcccacagttgaaggtggttgagcgtactcgcacggccaccatgctttgtgcagccagtggtaatccggatccagaaatcacttggtttaaagatttcttacctgtggacacaagcaacaacaatggtcgtattaagcagttacgatcaggagcccttcagattgagcagagtgaagagtctgaccaaggaaaatatgagtgtgttgccaccaacagcgcgggcactcagttcgccgtgtcccaccaagattctctatcccacccactaatcatgaaatcatgccaggcggaagcgttaatatcacctgtgtggccgtggggtcaccaatgccttatgtaaagtggatgttgggggcagaagatctgacacctgaagatgatatgccaataggaagaaatgtgctagaactgaatgatgtaagacagtcagcaaattacacctgtgttgctatgtcaacactgggtgtcattgaagcaatagcacagatcactgtcaaagccttacccaaacctccaggaactcctgtagtgaccgagagcacagctacaagcatcacactgacgtgggactctgggaaccctgagcctgtttcttattacataattcagcataaacctaaaaactctgaggaactttacaaagaaattgatggggtggcgaccacacgctacagtgtcgctggactaagtccctactcggattatgaattcagggttgttgctgtcaataacattgggcgggggcctcccagcgaacctgtgctaacacaaacctcagagcaagcaccatccagtgccccgagggatgtccaggcacgaatgttgagttcgaccaccattttggtacagtggaaggaacctgaagagccaaatggacagatccaaggatatagagtttattatacaatggatcccactcaacatgtcaacaactggatgaaacacaatgtagctgacagccaaatcactactattggcaacttagtgccccagaaaacatattctgtcaaagtcctggcttttacctcaattggagatggtcccctttcaagtgacatacaagtcatcactcagacaggagtaccagggcagccactaaacttcaaagcagaacctgagtctgaaacaagtattttgctctcttggacacctccacgttcagataccattgccaactatgaactggtctacaaagatggggagcatggagaggagcaacgaattaccattgagccagggacatcatataggctgcaaggactgaaaccaaacagcttatactatttccgtctggctgcacgctcccctcaaggcctgggtgcttctactgcagaaatatcagctagaaccatgcagtcaaagccgtcagctcctcctcaagacattagttgcaccagcccaagttccactagtattttggtaagttggcaacctccaccagtggaaaaacagaatggcattatcactgaatactccatcaagtacactgcagtggatggggaagatgacaagcctcacgagattttgggaattccttcggacactaccaaataccttttggaacagctggaaaaatggactgaataccggatcactgtgacagcccatacagatgtcggccctggccctgagagcttgtccgtgttgattcgaaccaatgaagatgttcctagtggtcctcctcgcaaagtcgaggtagaggctgtcaactcaacatctgttaaagtctcatggcgctcacccgtgcccaataaacagcatggccagataagaggatatcaggtgcattatgtgaggatggaaaatggtgagcccaagggccagcccatgctgaaagatgtcatgctggctgatgcacagtgggaatttgatgatactactgaacatgacatgatcatttctgggctccagcctgaaacttcctactccctcaccgtcacagcctacacaaccaaaggagatggtgctcgcagcaagcccaaactggtgtccaccactggggcagttccagggaaacctcggcttgtgattaaccacactcagatgaatactgctcttattcagtggcaccctccggtggacacatttggacctcttcagggctaccgtctaaaatttggccgcaaggatatggagccacttactactcttgagttctctgaaaaagaagatcactttacagctacagacatccacaagggagcatcatacgtcttcaggctctcagccagaaacaaagtgggctttggggaggagatggtgaaggagatttccattccagaagaagtaccaactggattccctcaaaaccttcactcagaaggcaccacttcaacctccgtccagttatcttggcaaccacctgtcctggcagagagaaatggcattatcaccaagtatacccttctttatagggatatcaacatcccccttctcccgatggagcagcttattgttccagctgacaccactatgacactcactggcttaaaaccagataccacatacgatgtaaaagtacgtgctcatacgagcaaagggcccgggccatatagtcccagtgtccagttcaggacactgcctgtggatcaagtgtttgcaaaaaattttcatgtcaaagcagtaatgaagacttccgtgttgctgtcttgggagattccagagaattataactccgccatgcctttcaaaattctttatgatgatgggaaaatggtagaagaagtggatggccgagccacacagaagttaattgtcaacctgaagcctgagaaatcatattcatttgtgctgacaaatcgtggaaacagtgctggtgggctgcagcacagggtcacggcaaagactgcaccagatgtattacgtaccaagcctgccttcattgggaagaccaacttggatggcatgattactgtgcaactgcctgaagtacctgcaaatgagaatataaaaggttactacataataattgtgcctttgaagaaatctcgcgggaaatttatcaagccatgggagagtccagatgaaatggaattagatgagctgcttaaggagatatctaggaagcgcagaagcatccgttatgggagagaagttgaattaaagccatatattgccgctcactttgatgtccttcccactgagttcaccctgggggatgacaagcattatggtggatttacaaacaagcaactccaaagtggtcaagaatatgtcttctttgtgttagcagtaatggaacatgcagagtctaagatgtatgcaaccagcccttactccgaccccgtggtgtcaatggatctggatccgcagccaatcacggatgaagaagaaggcttgatctgggttgtaggtcctgtccttgcagtggtctttatcatctgcattgtcattgctattcttctttataaaaggaagagggcagagtccgactctagaaaaagcagcataccgaacaataaggagatcccttcacaccacccaacagaccctgtagaactgaggcgccttaactttcaaacaccgggtatggctagccatcctccaatacccatcttggaacttgcagaccacattgaaagattgaaagcaaatgacaacttgaagttttcccaggaatatgagtcaattgaccctggccagcagttcacttgggaacattcaaacttggaagtaaacaaaccaaagaatagatacgcgaatgtaatcgcatatgatcattcccgggttctcctatcagctatagaagggatcccaggaagtgactatgtgaatgccaactacatagatgggtataggaagcaaaatgcctatattgcaacacagggatctctccccgaaacatttggggacttttggagaatgatatgggaacaacggagtgccacagttgtcatgatgacaaaactagaagaaagatcaagggtgaagtgtgaccagtattggcctagcagaggcacagaaacccacggactcgttcaagtaacgctgcttgatactgtggagctggccacatattgtgttcgaacatttgcactttacaagaatggttcaagtgagaagagagaagtgagacaattccagttcaccgcctggcctgatcatggtgttccagaacaccctacaccttttctagctttcttacgtagagtcaaaacctgtaaccctcccgatgctggtccgatggttgtgcactgcagtgcgggagttggccggactggttgcttcatcgtcatagatgccatgttagaaagaataaagcatgaaaaaactgtagatatttatggccatgtaactttaatgagagcccagaggaactatatggttcaaacagaagaccaatacatctttatccatgatgcactgttagaagcagtgacttgtggaaataccgaagtgccagctagaaacttgtatgcctacattcagaagctgacacaaatagaaacgggagagaatgtcacaggaatggagctcgaatttaagcgtctagccagctcaaaagctcacacctcaaggtttatcagtgccaatcttccatgtaataaattcaaaaatcgccttgttaatattatgccatatgaatccacaagggtatgcctgcagcctatccgtggagtagaaggatctgattacatcaatgccagttttattgatggatacagacaacagaaagcctacatcgctacccaggggcccttggcagagaccactgaagacttctggcggatgctctgggaacacaattccaccatagttgtgatgctcaccaagctgcgtgaaatgggcagagagaaatgtcaccaatactggccagcagaacggtctgcaagataccagtactttgttgtagatcccatggctgagtacaacatgccacagtatatcctaagggaattcaaggtcacagatgccagggacggccagtcccgaacagtaaggcagttccagttcactgactggccagagcaaggagtgccaaagtccggagaaggatttattgacttcatcggccaagtccataaaacaaaagaacagtttggccaagatggacccatttcagtccattgcagcgcgggcgttggaagaactggagtcttcataacgctaagcattgttttggaaagaatgagatatgaaggagttgtagatatcttccagactgtcaaaatgttaagaacacaacgaccagctatggtacagacagaggatcaatatcagttttcctatcgtgccgcactagagtacctgggcagctttgaccactatgcaacgtagaaacccctgacccattctggatttttactacaggcccttcaatatccatggagtctcttctgagccatacagggcacttgagaagtccttcttaacttctagctaacaactacttagtgggactattacacacaaaacaaattaaaaacaaattattccaggtggaccaagaatctgctttgacatcgccccttcccaccatactgctcataataacattttagggggaaaggggagggaatgtttaaaaagaaagtccttgatttagttttttagtattgtaaagatactgctgacctgtgcttcatttctaactgtgtaaacttttttttaacaaaatgtatcattcgataaagtgaattttaaaaaagttacataactcttcatttttttatttccaaatcgtaggtttttttaagctgtagaactgttatctgtaatatcttgctgtagaaatatcaaatcatttgaaaatttgcacatttttgtgcaaaactcaatctacagtatcagtctcgtcagatatattaattttacacttcagttttgattggtgagaaagtacccattctcttcaaataatcaaagataattattattttgttttgtttttggaatcaacagggaggcgcaaagtataaagttgctgctaacatatatacatatatatccatattttataagggtgtctatgtatatatagacagtgtgtccacacaaaaaatagatacagttatcagtcagtcagttcttccatgatttagtttttttaaacgtagaaaagctattgtaaacatctctttccatttattcttaattttttgacatattggtatttctttaaagggaaatgaggaatgcacatcagtgattgattgtcaaacctcaccccctgatttcctacctaatctacccccacctaaccaatcaatcacatccacaaattgttttgtttgtttgttagtcaggcttccaacaaagttcaatatttctaacactctagtgcaataaaaattattattaaatagctaagaggtgtgcatgtgggaaaggtcagtgcatatccctttaggaggggagaatgttgtaatatatcagctatcgagttgtttaaaaaaagtgtattcaatcgtatattgtctatagtatgtgctatgaaatttgcatttatgatatgtaacaggggcaaagccaaattcatgttactctgttcagtcagaaacattttgtggcatacagcattcctgggaagtgctgtactttgtttcgttttggttttagttttgcatttagagtgccttataattgatgcctattttaatagcatttctttttagcttttggttcgtatttccattcactgttcgtatctgttactttctattaaagcattatctgtttaccacatgtacaaaaactctttgaataatatgcattcctagttttcagccaagtcggggatgttagtgattgtaccagcccaaagcacttggataatcagggcccttcttccttttataatcaatcatcaacatcagaaaaagctacttgttttatttatattcccttccaaatccgctctggaacatgcagtaactgcaccaaacttattttagtaacaaatatcattggcaactttggaatatatttgatattccattaggatttttctaaaaggggaaataaactatatatatatatgtatcttacccccaattcttccaacagaatttctataggaagccatggatgatggcataagtttgccacatattacatgattttaaataatcctcaaaatacccaaggaactcttaaagagttttggtatgagtatactactttggtttaattttagcttcatggatgttctgcatggaaggatttttgttttccacattttcccattgctagcagagtgaaatccaagagaccaaacatttgcaagcattgtatttgagcacttttgtaaaaaacaaagaaaaagaaaaaaaagaaaatatatataatactaaaaaaaagtatctagaaggctacctcagaatgagactctctaacctacatcagaaccagagaagaatgtgcactatgtgggtctgttatcattattttcttttagtttgtatctttttggagatttatccaagtgccagattactcagtgctataattttcttttagttaaacaaagggggtcagacagacattgcatcatccagacatgccttgttggacatgtagaatccgatggagcactgcacaccagaatgattggccaatgagcagcttctctccctgaaacaataactgcccatttggcaaagggaaagatgacaataatcagaagaagaaaatgaatgggatgcataccatagacgaacgaggcggagactattgcgggaatcttactgttcaggagctgttcctagaactaactcccttactgtcattgatgtgcattccactctgtgcttttctgtacaaccattcaagttttaatttcccaggtgaaccatctttatctgccattaccacaagctttcaagtttccagttattttcatcatcataaccagtacggtgctattatttacctatgtacgtgtagttatgtataattttgtaattagttacaatggtaaaaaaaatcaaaatatataaaaagtgatttgtacagaactttattttagctcttttttaaaaatgatttgcatggttagaaaacggcgaggacagccaggggagggaagggcctctagggaactttgcactttctatacctttgtactatgcactgccctattgattctacacccaataatgatattacttgaacccatctgtaagaaactgcttcggaaattcatttgtgtgtatgtaaataacacaacatagaaacaggaagggaaaaaagtctgcagtaatgcacgtattttttttctttcctgtttattttcggttttgctttaagtccttttatttttaattccctttttgtttttctttttgggttttggttccttttgggtttatgggtgccctgatactccagcagagatcagaaggctacagatccattctatccatccgttatgtggctttgccatcccagcttggagtgtctttacaaagataataacagttgtgttctttgctctcgttttggatgcatagactgaaaaattaaaacaaataacttgtaaaatggcttgttaaaaaatacaattacctctaattagtagtacgcgtaaatgttttacagaatgaaaggcgtgctttttattttcttacttcgttacattggtggcgaaagaagtctgtatgaaaatcagttctttgctgacacaagttccatttgttacaaatgaattctaataaaaatgtcagtgttatgca

SEQ ID NO: 5978 - protein, 1665 aa, Homo sapiens; identical to SEQ ID NO: 5966

SEQ ID NO: 5979 - DNA, 8161 bp, Homo sapiens
tgagaccacagcagaatgtgccttggacaaaggtctcagggtggtgaactttttcttcgaattcctaacctgtgagcttacgatgatggtgcctgtccattaactgaacaactgtggttttgaacttcttgaggccagggactgtgtctgaaaacaccgacggtggctaactcaagggagacgtctggtgaacacccgtgggatctaaagaacaagctctgaaagtgttccagctgaaatttcagatcggacagactcgctgcggctccggaggcagtgattccaagctgctcgcgcacgctgctgccaagctgcaggatggtgcacgtagccaggctgctgctgctgctcctcactttcttcctccgcacggatgctgagacacctccaaggtttacacgaacacccgttgatcagacaggggtctctggcggagttgcctctttcatctgccaagctacgggagacccaagacctaaaattgtctggaacaaaaaaggaaagaaagtcagcaatcagagatttgaggtaatagagtttgacgatgggtctggatcagttctcagaatacaacccttacggactccgagggatgaggccatttatgaatgtgtggcctcaaataatgtgggagaaataagtgtatccaccagactcacagttttgcgggaagatcaaattcccaggggcttccctaccattgacatgggcccacagttgaaggtggttgagcgtactcgcacggccaccatgctttgtgcagccagtggtaatccggatccagaaatcacttggtttaaagatttcttacctgtggacacaagcaacaacaatggtcgtattaagcagttacgatcaggagcccttcagattgagcagagtgaagagtctgaccaaggaaaatatgagtgtgttgccaccaacagcgcgggcactcagagctgcgagaagttcgccgtgtcccaccaagattctctatcccacccactaatcatgaaatcatgccaggcggaagcgttaatatcacctgtgtggccgtggggtcaccaatgccttatgtaaagtggatgttgggggcagaagatctgacacctgaagatgatatgccaataggaagaaatgtgctagaactgaatgatgtaagacagtcagcaaattacacctgtgttgctatgtcaacactgggtgtcattgaagcaatagcacagatcactgtcaaagccttacccaaacctccaggaactcctgtagtgaccgagagcacagctacaagcatcacactgacgtgggactctgggaaccctgagcctgtttcttattacataattcagcataaacctaaaaactctgaggaactttacaaagaaattgatggggtggcgaccacacgctacagtgtcgctggactaagtccctactcggattatgaattcagggttgttgctgtcaataacattgggcgggggcctcccagcgaacctgtgctaacacaaacctcagagcaagcaccatccagtgccccgagggatgtccaggcacgaatgttgagttcgaccaccattttggtacagtggaaggaacctgaagagccaaatggacagatccaaggatatagagtttattatacaatggatcccactcaacatgtcaacaactggatgaaacacaatgtagctgacagccaaatcactactattggcaacttagtgccccagaaaacatattctgtcaaagtcctggcttttacctcaattggagatggtcccctttcaagtgacatacaagtcatcactcagacaggagtaccagggcagccactaaacttcaaagcagaacctgagtctgaaacaagtattttgctctcttggacacctccacgttcagataccattgccaactatgaactggtctacaaagatggggagcatggagaggagcaacgaattaccattgagccagggacatcatataggctgcaaggactgaaaccaaacagcttatactatttccgtctggctgcacgctcccctcaaggcctgggtgcttctactgcagaaatatcagctagaaccatgcagtcaatgtttgcaaaaaattttcatgtcaaagcagtaatgaagacttccgtgttgctgtcttgggagattccagagaattataactccgccatgcctttcaaaattctttatgatgatgggaaaatggtagaagaagtggatggccgagccacacagaagttaattgtcaacctgaagcctgagaaatcatattcatttgtgctgacaaatcgtggaaacagtgctggtgggctgcagcacagggtcacggcaaagactgcaccagatgtattacgtaccaagcctgccttcattgggaagaccaacttggatggcatgattactgtgcaactgcctgaagtacctgcaaatgagaatataaaaggttactacataataattgtgcctttgaagaaatctcgcgggaaatttatcaagccatgggagagtccagatgaaatggaattagatgagctgcttaaggagatatctaggaagcgcagaagcatccgttatgggagagaagttgaattaaagccatatattgccgctcactttgatgtccttcccactgagttcaccctgggggatgacaagcattatggtggatttacaaacaagcaactccaaagtggtcaagaatatgtcttctttgtgttagcagtaatggaacatgcagagtctaagatgtatgcaaccagcccttactccgaccccgtggtgtcaatggatctggatccgcagccaatcacggatgaagaagaaggcttgatctgggttgtaggtcctgtccttgcagtggtctttatcatctgcattgtcattgctattcttctttataaaaggaagagggcagagtccgactctagaaaaagcagcataccgaacaataaggagatcccttcacaccacccaacagaccctgtagaactgaggcgccttaactttcaaacaccgggtatggctagccatcctccaatacccatcttggaacttgcagaccacattgaaagattgaaagcaaatgacaacttgaagttttcccaggaatatgagtcaattgaccctggccagcagttcacttgggaacattcaaacttggaagtaaacaaaccaaagaatagatacgcgaatgtaatcgcatatgatcattcccgggttctcctatcagctatagaagggatcccaggaagtgactatgtgaatgccaactacatagatgggtataggaagcaaaatgcctatattgcaacacagggatctctccccgaaacatttggggacttttggagaatgatatgggaacaacggagtgccacagttgtcatgatgacaaaactagaagaaagatcaagggtgaagtgtgaccagtattggcctagcagaggcacagaaacccacggactcgttcaagtaacgctgcttgatactgtggagctggccacatattgtgttcgaacatttgcactttacaagaatggttcaagtgagaagagagaagtgagacaattccagttcaccgcctggcctgatcatggtgttccagaacaccctacaccttttctagctttcttacgtagagtcaaaacctgtaaccctcccgatgctggtccgatggttgtgcactgcagtgcgggagttggccggactggttgcttcatcgtcatagatgccatgttagaaagaataaagcatgaaaaaactgtagatatttatggccatgtaactttaatgagagcccagaggaactatatggttcaaacagaagaccaatacatctttatccatgatgcactgttagaagcagtgacttgtggaaataccgaagtgccagctagaaacttgtatgcctacattcagaagctgacacaaatagaaacgggagagaatgtcacaggaatggagctcgaatttaagcgtctagccagctcaaaagctcacacctcaaggtttatcagtgccaatcttccatgtaataaattcaaaaatcgccttgttaatattatgccatatgaatccacaagggtatgcctgcagcctatccgtggagtagaaggatctgattacatcaatgccagttttattgatggatacagacaacagaaagcctacatcgctacccaggggcccttggcagagaccactgaagacttctggcggatgctctgggaacacaattccaccatagttgtgatgctcaccaagctgcgtgaaatgggcagagagaaatgtcaccaatactggccagcagaacggtctgcaagataccagtactttgttgtagatcccatggctgagtacaacatgccacagtatatcctaagggaattcaaggtcacagatgccagggacggccagtcccgaacagtaaggcagttccagttcactgactggccagagcaaggagtgccaaagtccggagaaggatttattgacttcatcggccaagtccataaaacaaaagaacagtttggccaagatggacccatttcagtccattgcagcgcgggcgttggaagaactggagtcttcataacgctaagcattgttttggaaagaatgagatatgaaggagttgtagatatcttccagactgtcaaaatgttaagaacacaacgaccagctatggtacagacagaggatcaatatcagttttcctatcgtgccgcactagagtacctgggcagctttgaccactatgcaacgtagaaacccctgacccattctggatttttactacaggcccttcaatatccatggagtctcttctgagccatacagggcacttgagaagtccttcttaacttctagctaacaactacttagtgggactattacacacaaaacaaattaaaaacaaattattccaggtggaccaagaatctgctttgacatcgccccttcccaccatactgctcataataacattttagggggaaaggggagggaatgtttaaaaagaaagtccttgatttagttttttagtattgtaaagatactgctgacctgtgcttcatttctaactgtgtaaacttttttttaacaaaatgtatcattcgataaagtgaattttaaaaaagttacataactcttcatttttttatttccaaatcgtaggtttttttaagctgtagaactgttatctgtaatatcttgctgtagaaatatcaaatcatttgaaaatttgcacatttttgtgcaaaactcaatctacagtatcagtctcgtcagatatattaattttacacttcagttttgattggtgagaaagtacccattctcttcaaataatcaaagataattattattttgttttgtttttggaatcaacagggaggcgcaaagtataaagttgctgctaacatatatacatatatatccatattttataagggtgtctatgtatatatagacagtgtgtccacacaaaaaatagatacagttatcagtcagtcagttcttccatgatttagtttttttaaacgtagaaaagctattgtaaacatctctttccatttattcttaattttttgacatattggtatttctttaaagggaaatgaggaatgcacatcagtgattgattgtcaaacctcaccccctgatttcctacctaatctacccccacctaaccaatcaatcacatccacaaattgttttgtttgtttgttagtcaggcttccaacaaagttcaatatttctaacactctagtgcaataaaaattattattaaatagctaagaggtgtgcatgtgggaaaggtcagtgcatatccctttaggaggggagaatgttgtaatatatcagctatcgagttgtttaaaaaaagtgtattcaatcgtatattgtctatagtatgtgctatgaaatttgcatttatgatatgtaacaggggcaaagccaaattcatgttactctgttcagtcagaaacattttgtggcatacagcattcctgggaagtgctgtactttgtttcgttttggttttagttttgcatttagagtgccttataattgatgcctattttaatagcatttctttttagcttttggttcgtatttccattcactgttcgtatctgttactttctattaaagcattatctgtttaccacatgtacaaaaactctttgaataatatgcattcctagttttcagccaagtcggggatgttagtgattgtaccagcccaaagcacttggataatcagggcccttcttccttttataatcaatcatcaacatcagaaaaagctacttgttttatttatattcccttccaaatccgctctggaacatgcagtaactgcaccaaacttattttagtaacaaatatcattggcaactttggaatatatttgatattccattaggatttttctaaaaggggaaataaactatatatatatatgtatcttacccccaattcttccaacagaatttctataggaagccatggatgatggcataagtttgccacatattacatgattttaaataatcctcaaaatacccaaggaactcttaaagagttttggtatgagtatactactttggtttaattttagcttcatggatgttctgcatggaaggatttttgttttccacattttcccattgctagcagagtgaaatccaagagaccaaacatttgcaagcattgtatttgagcacttttgtaaaaaacaaagaaaaagaaaaaaaagaaaatatatataatactaaaaaaaagtatctagaaggctacctcagaatgagactctctaacctacatcagaaccagagaagaatgtgcactatgtgggtctgttatcattattttcttttagtttgtatctttttggagatttatccaagtgccagattactcagtgctataattttcttttagttaaacaaagggggtcagacagacattgcatcatccagacatgccttgttggacatgtagaatccgatggagcactgcacaccagaatgattggccaatgagcagcttctctccctgaaacaataactgcccatttggcaaagggaaagatgacaataatcagaagaagaaaatgaatgggatgcataccatagacgaacgaggcggagactattgcgggaatcttactgttcaggagctgttcctagaactaactcccttactgtcattgatgtgcattccactctgtgcttttctgtacaaccattcaagttttaatttcccaggtgaaccatctttatctgccattaccacaagctttcaagtttccagttattttcatcatcataaccagtacggtgctattatttacctatgtacgtgtagttatgtataattttgtaattagttacaatggtaaaaaaaatcaaaatatataaaaagtgatttgtacagaactttattttagctcttttttaaaaatgatttgcatggttagaaaacggcgaggacagccaggggagggaagggcctctagggaactttgcactttctatacctttgtactatgcactgccctattgattctacacccaataatgatattacttgaacccatctgtaagaaactgcttcggaaattcatttgtgtgtatgtaaataacacaacatagaaacaggaagggaaaaaagtctgcagtaatgcacgtattttttttctttcctgtttattttcggttttgctttaagtccttttatttttaattccctttttgtttttctttttgggttttggttccttttgggtttatgggtgccctgatactccagcagagatcagaaggctacagatccattctatccatccgttatgtggctttgccatcccagcttggagtgtctttacaaagataataacagttgtgttctttgctctcgttttggatgcatagactgaaaaattaaaacaaataacttgtaaaatggcttgttaaaaaatacaattacctctaattagtagtacgcgtaaatgttttacagaatgaaaggcgtgctttttattttcttacttcgttacattggtggcgaaagaagtctgtatgaaaatcagttctttgctgacacaagttccatttgttacaaatgaattctaataaaaatgtcagtgttatgca

SEQ ID NO: 5980 - protein, 1254 aa, Homo sapiens; identical to SEQ ID NO: 5970

SEQ ID NO: 5981 - DNA, 7317 bp, Homo sapiens
gcggccgctgctccgcgggattaaattggccgcccggaggcggcggcgcggccgtggcggggcgcgaaggcgctggaggaaagtgttggcggcggcgcgggaggcggtggcggcggctgcccggggccaacatgaccaggctctgaaagtgttccagctgaaatttcagatcggacagactcgctgcggctccggaggcagtgattccaagctgctcgcgcacgctgctgccaagctgcaggatggtgcacgtagccaggctgctgctgctgctcctcactttcttcctccgcacggatgctgagacacctccaaggtttacacgaacacccgttgatcagacaggggtctctggcggagttgcctctttcatctgccaagctacgggagacccaagacctaaaattgtctggaacaaaaaaggaaagaaagtcagcaatcagagatttgaggtaatagagtttgacgatgggtctggatcagttctcagaatacaacccttacggactccgagggatgaggccatttatgaatgtgtggcctcaaataatgtgggagaaataagtgtatccaccagactcacagttttgcgggaagatcaaattcccaggggcttccctaccattgacatgggcccacagttgaaggtggttgagcgtactcgcacggccaccatgctttgtgcagccagtggtaatccggatccagaaatcacttggtttaaagatttcttacctgtggacacaagcaacaacaatggtcgtattaagcagttacgatcaggagcccttcagattgagcagagtgaagagtctgaccaaggaaaatatgagtgtgttgccaccaacagcgcgggcactcagttcgccgtgtcccaccaagattctctatcccacccactaatcatgaaatcatgccaggcggaagcgttaatatcacctgtgtggccgtggggtcaccaatgccttatgtaaagtggatgttgggggcagaagatctgacacctgaagatgatatgccaataggaagaaatgtgctagaactgaatgatgtaagacagtcagcaaattacacctgtgttgctatgtcaacactgggtgtcattgaagcaatagcacagatcactgtcaaagccttacccaaacctccaggaactcctgtagtgaccgagagcacagctacaagcatcacactgacgtgggactctgggaaccctgagcctgtttcttattacataattcagcataaacctaaaaactctgaggaactttacaaagaaattgatggggtggcgaccacacgctacagtgtcgctggactaagtccctactcggattatgaattcagggttgttgctgtcaataacattgggcgggggcctcccagcgaacctgtgctaacacaaacctcagagcaagcaccatccagtgccccgagggatgtccaggcacgaatgttgagttcgaccaccattttggtacagtggaaggaacctgaagagccaaatggacagatccaaggatatagagtttattatacaatggatcccactcaacatgtcaacaactggatgaaacacaatgtagctgacagccaaatcactactattggcaacttagtgccccagaaaacatattctgtcaaagtcctggcttttacctcaattggagatggtcccctttcaagtgacatacaagtcatcactcagacaggagtaccagggcagccactaaacttcaaagcagaacctgagtctgaaacaagtattttgctctcttggacacctccacgttcagataccattgccaactatgaactggtctacaaagatggggagcatggagaggagcaacgaattaccattgagccagggacatcatataggctgcaaggactgaaaccaaacagcttatactatttccgtctggctgcacgctcccctcaaggcctgggtgcttctactgcagaaatatcagctagaaccatgcagtcaaagccgtcagctcctcctcaagacattagttgcaccagcccaagttccactagtattttggtaagttggcaacctccaccagtggaaaaacagaatggcattatcactgaatactccatcaagtacactgcagtggatggggaagatgacaagcctcacgagattttgggaattccttcggacactaccaaataccttttggaacagctggaaaaatggactgaataccggatcactgtgacagcccatacagatgtcggccctggccctgagagcttgtccgtgttgattcgaaccaatgaagatgttcctagtggtcctcctcgcaaagtcgaggtagaggctgtcaactcaacatctgttaaagtctcatggcgctcacccgtgcccaataaacagcatggccagataagaggatatcaggtgcattatgtgaggatggaaaatggtgagcccaagggccagcccatgctgaaagatgtcatgctggctgatgcacagtgggaatttgatgatactactgaacatgacatgatcatttctgggctccagcctgaaacttcctactccctcaccgtcacagcctacacaaccaaaggagatggtgctcgcagcaagcccaaactggtgtccaccactggggcagttccagggaaacctcggcttgtgattaaccacactcagatgaatactgctcttattcagtggcaccctccggtggacacatttggacctcttcagggctaccgtctaaaatttggccgcaaggatatggagccacttactactcttgagttctctgaaaaagaagatcactttacagctacagacatccacaagggagcatcatacgtcttcaggctctcagccagaaacaaagtgggctttggggaggagatggtgaaggagatttccattccagaagaagtaccaactggattccctcaaaaccttcactcagaaggcaccacttcaacctccgtccagttatcttggcaaccacctgtcctggcagagagaaatggcattatcaccaagtatacccttctttatagggatatcaacatcccccttctcccgatggagcagcttattgttccagctgacaccactatgacactcactggcttaaaaccagataccacatacgatgtaaaagtacgtgctcatacgagcaaagggcccgggccatatagtcccagtgtccagttcaggacactgcctgtggatcaagtgtttgcaaaaaattttcatgtcaaagcagtaatgaagacttccgtgttgctgtcttgggagattccagagaattataactccgccatgcctttcaaaattctttatgatgatgggaaaatggtagaagaagtggatggccgagccacacagaagttaattgtcaacctgaagcctgagaaatcatattcatttgtgctgacaaatcgtggaaacagtgctggtgggctgcagcacagggtcacggcaaagactgcaccagatgtattacgtaccaagcctgccttcattgggaagaccaacttggatggcatgattactgtgcaactgcctgaagtacctgcaaatgagaatataaaaggttactacataataattgtgcctttgaagaaatctcgcgggaaatttatcaagccatgggagagtccagatgaaatggaattagatgagctgcttaaggagatatctaggaagcgcagaagcatccgttatgggagagaagttgaattaaagccatatattgccgctcactttgatgtccttcccactgagttcaccctgggggatgacaagcattatggtggatttacaaacaagcaactccaaagtggtcaagaatatgtcttctttgtgttagcagtaatggaacatgcagagtctaagatgtatgcaaccagcccttactccgaccccgtggtgtcaatggatctggatccgcagccaatcacggatgaagaagaaggcttgatctgggttgtaggtcctgtccttgcagtggtctttatcatctgcattgtcattgctattcttctttataaaaggaagagggcagagtccgactctagaaaaagcagcataccgaacaataaggagatcccttcacaccacccaacagaccctgtagaactgaggcgccttaactttcaaacaccgggtatggctagccatcctccaatacccatcttggaacttgcagaccacattgaaagattgaaagcaaatgacaacttgaagttttcccaggaatatgagtcaattgaccctggccagcagttcacttgggaacattcaaacttggaagtaaacaaaccaaagaatagatacgcgaatgtaatcgcatatgatcattcccgggttctcctatcagctatagaagggatcccaggaagtgactatgtgaatgccaactacatagatgggtataggaagcaaaatgcctatattgcaacacagggatctctccccgaaacatttggggacttttggagaatgatatgggaacaacggagtgccacagttgtcatgatgacaaaactagaagaaagatcaagggtgaagtgtgaccagtattggcctagcagaggcacagaaacccacggactcgttcaagtaacgctgcttgatactgtggagctggccacatattgtgttcgaacatttgcactttacaagaatggttcaagtgagaagagagaagtgagacaattccagttcaccgcctggcctgatcatggtgttccagaacaccctacaccttttctagctttcttacgtagagtcaaaacctgtaaccctcccgatgctggtccgatggttgtgcactgcagtgcgggagttggccggactggttgcttcatcgtcatagatgccatgttagaaagaataaagcatgaaaaaactgtagatatttatggccatgtaactttaatgagagcccagaggaactatatggttcaaacagaagaccaatacatctttatccatgatgcactgttagaagcagtgacttgtggaaataccgaagtgccagctagaaacttgtatgcctacattcagaagctgacacaaatagaaacgggagagaatgtcacaggaatggagctcgaatttaagcgtctagccagctcaaaagctcacacctcaaggtttatcagtgccaatcttccatgtaataaattcaaaaatcgccttgttaatattatgccatatgaatccacaagggtatgcctgcagcctatccgtggagtagaaggatctgattacatcaatgccagttttattgatggatacagacaacagaaagcctacatcgctacccaggggcccttggcagagaccactgaagacttctggcggatgctctgggaacacaattccaccatagttgtgatgctcaccaagctgcgtgaaatgggcagagagaaatgtcaccaatactggccagcagaacggtctgcaagataccagtactttgttgtagatcccatggctgagtacaacatgccacagtatatcctaagggaattcaaggtcacagatgccagggacggccagtcccgaacagtaaggcagttccagttcactgactggccagagcaaggagtgccaaagtccggagaaggatttattgacttcatcggccaagtccataaaacaaaagaacagtttggccaagatggacccatttcagtccattgcagcgcgggcgttggaagaactggagtcttcataacgctaagcattgttttggaaagaatgagatatgaaggagttgtagatatcttccagactgtcaaaatgttaagaacacaacgaccagctatggtacagacagaggatcaatatcagttttcctatcgtgccgcactagagtacctgggcagctttgaccactatgcaacgtagaaacccctgacccattctggatttttactacaggcccttcaatatccatggagtctcttctgagccatacagggcacttgagaagtccttcttaacttctagctaacaactacttagtgggactattacacacaaaacaaattaaaaacaaattattccaggtggaccaagaatctgctttgacatcgccccttcccaccatactgctcataataacattttagggggaaaggggagggaatgtttaaaaagaaagtccttgatttagttttttagtattgtaaagatactgctgacctgtgcttcatttctaactgtgtaaacttttttttaacaaaatgtatcattcgataaagtgaattttaaaaaagttacataactcttcatttttttatttccaaatcgtaggtttttttaagctgtagaactgttatctgtaatatcttgctgtagaaatatcaaatcatttgaaaatttgcacatttttgtgcaaaactcaatctacagtatcagtctcgtcagatatattaattttacacttcagttttgattggtgagaaagtacccattctcttcaaataatcaaagataattattattttgttttgtttttggaatcaacagggaggcgcaaagtataaagttgctgctaacatatatacatatatatccatattttataagggtgtctatgtatatatagacagtgtgtccacacaaaaaatagatacagttatcagtcagtcagttcttccatgatttagtttttttaaacgtagaaaagctattgtaaacatctctttccatttattcttaattttttgacatattggtatttctttaaagggaaatgaggaatgcacatcagtgattgattgtcaaacctcaccccctgatttcctacctaatctacccccacctaaccaatcaatcacatccacaaattgttttgtttgtttgttagtcaggcttccaacaaagttcaatatttctaacactctagtgcaataaaaattattattaaatagctaagaggtgtgcatgtgggaaaggtcagtgcatatccctttaggaggggagaatgttgtaatatatcagctatcgagttgtttaaaaaaagtgtattcaatcgtatattgtctatagtatgtgctatgaaatttgcatttatgatatgtaacaggggcaaagccaaattcatgttactctgttcagtcagaaacattttgtggcatacagcattcctgggaagtgctgtactttgtttcgttttggttttagttttgcatttagagtgccttataattgatgcctattttaatagcatttctttttagcttttggttcgtatttccattcactgttcgtatctgttactttctattaaagcattatctgtttaccac

SEQ ID NO: 5982 - protein, 1665 aa, Homo sapiens; identical to SEQ ID NO: 5966

SEQ ID NO: 5983 - DNA, 6096 bp, Homo sapiens
gcggccgctgctccgcgggattaaattggccgcccggaggcggcggcgcggccgtggcggggcgcgaaggcgctggaggaaagtgttggcggcggcgcgggaggcggtggcggcggctgcccggggccaacatgaccaggctctgaaagtgttccagctgaaatttcagatcggacagactcgctgcggctccggaggcagtgattccaagctgctcgcgcacgctgctgccaagctgcaggatggtgcacgtagccaggctgctgctgctgctcctcactttcttcctccgcacggatgctgagacacctccaaggtttacacgaacacccgttgatcagacaggggtctctggcggagttgcctctttcatctgccaagctacgggagacccaagacctaaaattgtctggaacaaaaaaggaaagaaagtcagcaatcagagatttgaggtaatagagtttgacgatgggtctggatcagttctcagaatacaacccttacggactccgagggatgaggccatttatgaatgtgtggcctcaaataatgtgggagaaataagtgtatccaccagactcacagttttgcgggaagatcaaattcccaggggcttccctaccattgacatgggcccacagttgaaggtggttgagcgtactcgcacggccaccatgctttgtgcagccagtggtaatccggatccagaaatcacttggtttaaagatttcttacctgtggacacaagcaacaacaatggtcgtattaagcagttacgatcaggagcccttcagattgagcagagtgaagagtctgaccaaggaaaatatgagtgtgttgccaccaacagcgcgggcactcagagctgcgagaagttcgccgtgtcccaccaagattctctatcccacccactaatcatgaaatcatgccaggcggaagcgttaatatcacctgtgtggccgtggggtcaccaatgccttatgtaaagtggatgttgggggcagaagatctgacacctgaagatgatatgccaataggaagaaatgtgctagaactgaatgatgtaagacagtcagcaaattacacctgtgttgctatgtcaacactgggtgtcattgaagcaatagcacagatcactgtcaaagccttacccaaacctccaggaactcctgtagtgaccgagagcacagctacaagcatcacactgacgtgggactctgggaaccctgagcctgtttcttattacataattcagcataaacctaaaaactctgaggaactttacaaagaaattgatggggtggcgaccacacgctacagtgtcgctggactaagtccctactcggattatgaattcagggttgttgctgtcaataacattgggcgggggcctcccagcgaacctgtgctaacacaaacctcagagcaagcaccatccagtgccccgagggatgtccaggcacgaatgttgagttcgaccaccattttggtacagtggaaggaacctgaagagccaaatggacagatccaaggatatagagtttattatacaatggatcccactcaacatgtcaacaactggatgaaacacaatgtagctgacagccaaatcactactattggcaacttagtgccccagaaaacatattctgtcaaagtcctggcttttacctcaattggagatggtcccctttcaagtgacatacaagtcatcactcagacaggagtaccagggcagccactaaacttcaaagcagaacctgagtctgaaacaagtattttgctctcttggacacctccacgttcagataccattgccaactatgaactggtctacaaagatggggagcatggagaggagcaacgaattaccattgagccagggacatcatataggctgcaaggactgaaaccaaacagcttatactatttccgtctggctgcacgctcccctcaaggcctgggtgcttctactgcagaaatatcagctagaaccatgcagtcaatgtttgcaaaaaattttcatgtcaaagcagtaatgaagacttccgtgttgctgtcttgggagattccagagaattataactccgccatgcctttcaaaattctttatgatgatgggaaaatggtagaagaagtggatggccgagccacacagaagttaattgtcaacctgaagcctgagaaatcatattcatttgtgctgacaaatcgtggaaacagtgctggtgggctgcagcacagggtcacggcaaagactgcaccagatgtattacgtaccaagcctgccttcattgggaagaccaacttggatggcatgattactgtgcaactgcctgaagtacctgcaaatgagaatataaaaggttactacataataattgtgcctttgaagaaatctcgcgggaaatttatcaagccatgggagagtccagatgaaatggaattagatgagctgcttaaggagatatctaggaagcgcagaagcatccgttatgggagagaagttgaattaaagccatatattgccgctcactttgatgtccttcccactgagttcaccctgggggatgacaagcattatggtggatttacaaacaagcaactccaaagtggtcaagaatatgtcttctttgtgttagcagtaatggaacatgcagagtctaagatgtatgcaaccagcccttactccgaccccgtggtgtcaatggatctggatccgcagccaatcacggatgaagaagaaggcttgatctgggttgtaggtcctgtccttgcagtggtctttatcatctgcattgtcattgctattcttctttataaaaggaagagggcagagtccgactctagaaaaagcagcataccgaacaataaggagatcccttcacaccacccaacagaccctgtagaactgaggcgccttaactttcaaacaccgggtatggctagccatcctccaatacccatcttggaacttgcagaccacattgaaagattgaaagcaaatgacaacttgaagttttcccaggaatatgagtcaattgaccctggccagcagttcacttgggaacattcaaacttggaagtaaacaaaccaaagaatagatacgcgaatgtaatcgcatatgatcattcccgggttctcctatcagctatagaagggatcccaggaagtgactatgtgaatgccaactacatagatgggtataggaagcaaaatgcctatattgcaacacagggatctctccccgaaacatttggggacttttggagaatgatatgggaacaacggagtgccacagttgtcatgatgacaaaactagaagaaagatcaagggtgaagtgtgaccagtattggcctagcagaggcacagaaacccacggactcgttcaagtaacgctgcttgatactgtggagctggccacatattgtgttcgaacatttgcactttacaagaatggttcaagtgagaagagagaagtgagacaattccagttcaccgcctggcctgatcatggtgttccagaacaccctacaccttttctagctttcttacgtagagtcaaaacctgtaaccctcccgatgctggtccgatggttgtgcactgcagtgcgggagttggccggactggttgcttcatcgtcatagatgccatgttagaaagaataaagcatgaaaaaactgtagatatttatggccatgtaactttaatgagagcccagaggaactatatggttcaaacagaagaccaatacatctttatccatgatgcactgttagaagcagtgacttgtggaaataccgaagtgccagctagaaacttgtatgcctacattcagaagctgacacaaatagaaacgggagagaatgtcacaggaatggagctcgaatttaagcgtctagccagctcaaaagctcacacctcaaggtttatcagtgccaatcttccatgtaataaattcaaaaatcgccttgttaatattatgccatatgaatccacaagggtatgcctgcagcctatccgtggagtagaaggatctgattacatcaatgccagttttattgatggatacagacaacagaaagcctacatcgctacccaggggcccttggcagagaccactgaagacttctggcggatgctctgggaacacaattccaccatagttgtgatgctcaccaagctgcgtgaaatgggcagagagaaatgtcaccaatactggccagcagaacggtctgcaagataccagtactttgttgtagatcccatggctgagtacaacatgccacagtatatcctaagggaattcaaggtcacagatgccagggacggccagtcccgaacagtaaggcagttccagttcactgactggccagagcaaggagtgccaaagtccggagaaggatttattgacttcatcggccaagtccataaaacaaaagaacagtttggccaagatggacccatttcagtccattgcagcgcgggcgttggaagaactggagtcttcataacgctaagcattgttttggaaagaatgagatatgaaggagttgtagatatcttccagactgtcaaaatgttaagaacacaacgaccagctatggtacagacagaggatcaatatcagttttcctatcgtgccgcactagagtacctgggcagctttgaccactatgcaacgtagaaacccctgacccattctggatttttactacaggcccttcaatatccatggagtctcttctgagccatacagggcacttgagaagtccttcttaacttctagctaacaactacttagtgggactattacacacaaaacaaattaaaaacaaattattccaggtggaccaagaatctgctttgacatcgccccttcccaccatactgctcataataacattttagggggaaaggggagggaatgtttaaaaagaaagtccttgatttagttttttagtattgtaaagatactgctgacctgtgcttcatttctaactgtgtaaacttttttttaacaaaatgtatcattcgataaagtgaattttaaaaaagttacataactcttcatttttttatttccaaatcgtaggtttttttaagctgtagaactgttatctgtaatatcttgctgtagaaatatcaaatcatttgaaaatttgcacatttttgtgcaaaactcaatctacagtatcagtctcgtcagatatattaattttacacttcagttttgattggtgagaaagtacccattctcttcaaataatcaaagataattattattttgttttgtttttggaatcaacagggaggcgcaaagtataaagttgctgctaacatatatacatatatatccatattttataagggtgtctatgtatatatagacagtgtgtccacacaaaaaatagatacagttatcagtcagtcagttcttccatgatttagtttttttaaacgtagaaaagctattgtaaacatctctttccatttattcttaattttttgacatattggtatttctttaaagggaaatgaggaatgcacatcagtgattgattgtcaaacctcaccccctgatttcctacctaatctacccccacctaaccaatcaatcacatccacaaattgttttgtttgtttgttagtcaggcttccaacaaagttcaatatttctaacactctagtgcaataaaaattattattaaatagctaagaggtgtgcatgtgggaaaggtcagtgcatatccctttaggaggggagaatgttgtaatatatcagctatcgagttgtttaaaaaaagtgtattcaatcgtatattgtctatagtatgtgctatgaaatttgcatttatgatatgtaacaggggcaaagccaaattcatgttactctgttcagtcagaaacattttgtggcatacagcattcctgggaagtgctgtactttgtttcgttttggttttagttttgcatttagagtgccttataattgatgcctattttaatagcatttctttttagcttttggttcgtatttccattcactgttcgtatctgttactttctattaaagcattatctgtttaccac

SEQ ID NO: 5984 - protein, 1254 aa, Homo sapiens; identical to SEQ ID NO: 5970

SEQ ID NO: 5985 - DNA, 7302 bp, Homo sapiens
gcggccgctgctccgcgggattaaattggccgcccggaggcggcggcgcggccgtggcggggcgcgaaggcgctggaggaaagtgttggcggcggcgcgggaggcggtggcggcggctgcccggggccaacatgaccaggctctgaaagtgttccagctgaaatttcagatcggacagactcgctgcggctccggaggcagtgattccaagctgctcgcgcacgctgctgccaagctgcaggatggtgcacgtagccaggctgctgctgctgctcctcactttcttcctccgcacggatgctgagacacctccaaggtttacacgaacacccgttgatcagacaggggtctctggcggagttgcctctttcatctgccaagctacgggagacccaagacctaaaattgtctggaacaaaaaaggaaagaaagtcagcaatcagagatttgaggtaatagagtttgacgatgggtctggatcagttctcagaatacaacccttacggactccgagggatgaggccatttatgaatgtgtggcctcaaataatgtgggagaaataagtgtatccaccagactcacagttttgcgggaagatcaaattcccaggggcttccctaccattgacatgggcccacagttgaaggtggttgagcgtactcgcacggccaccatgctttgtgcagccagtggtaatccggatccagaaatcacttggtttaaagatttcttacctgtggacacaagcaacaacaatggtcgtattaagcagttacgatcaggagcccttcagattgagcagagtgaagagtctgaccaaggaaaatatgagtgtgttgccaccaacagcgcgggcactcagagctgcgagaagttcgccgtgtcccaccaagattctctatcccacccactaatcatgaaatcatgccaggcggaagcgttaatatcacctgtgtggccgtggggtcaccaatgccttatgtaaagtggatgttgggggcagaagatctgacacctgaagatgatatgccaataggaagaaatgtgctagaactgaatgatgtaagacagtcagcaaattacacctgtgttgctatgtcaacactgggtgtcattgaagcaatagcacagatcactgtcaaagccttacccaaacctccaggaactcctgtagtgaccgagagcacagctacaagcatcacactgacgtgggactctgggaaccctgagcctgtttcttattacataattcagcataaacctaaaaactctgaggaactttacaaagaaattgatggggtggcgaccacacgctacagtgtcgctggactaagtccctactcggattatgaattcagggttgttgctgtcaataacattgggcgggggcctcccagcgaacctgtgctaacacaaacctcagagcaagcaccatccagtgccccgagggatgtccaggcacgaatgttgagttcgaccaccattttggtacagtggaaggaacctgaagagccaaatggacagatccaaggatatagagtttattatacaatggatcccactcaacatgtcaacaactggatgaaacacaatgtagctgacagccaaatcactactattggcaacttagtgccccagaaaacatattctgtcaaagtcctggcttttacctcaattggagatggtcccctttcaagtgacatacaagtcatcactcagacaggagtaccagggcagccactaaacttcaaagcagaacctgagtctgaaacaagtattttgctctcttggacacctccacgttcagataccattgccaactatgaactggtctacaaagatggggagcatggagaggagcaacgaattaccattgagccagggacatcatataggctgcaaggactgaaaccaaacagcttatactatttccgtctggctgcacgctcccctcaaggcctgggtgcttctactgcagaaatatcagctagaaccatgcagtcaaagccgtcagctcctcctcaagacattagttgcaccagcccaagttccactagtattttggtaagttggcaacctccaccagtggaaaaacagaatggcattatcactgaatactccatcaagtacactgcagtggatggggaagatgacaagcctcacgagattttgggaattccttcggacactaccaaataccttttggaacagctggaaaaatggactgaataccggatcactgtgacagcccatacagatgtcggccctggccctgagagcttgtccgtgttgattcgaaccaatgaagatgttcctagtggtcctcctcgcaaagtcgaggtagaggctgtcaactcaacatctgttaaagtctcatggcgctcacccgtgcccaataaacagcatggccagataagaggatatcaggtgcattatgtgaggatggaaaatggtgagcccaagggccagcccatgctgaaagatgtcatgctggctgatgcacaggacatgatcatttctgggctccagcctgaaacttcctactccctcaccgtcacagcctacacaaccaaaggagatggtgctcgcagcaagcccaaactggtgtccaccactggggcagttccagggaaacctcggcttgtgattaaccacactcagatgaatactgctcttattcagtggcaccctccggtggacacatttggacctcttcagggctaccgtctaaaatttggccgcaaggatatggagccacttactactcttgagttctctgaaaaagaagatcactttacagctacagacatccacaagggagcatcatacgtcttcaggctctcagccagaaacaaagtgggctttggggaggagatggtgaaggagatttccattccagaagaagtaccaactggattccctcaaaaccttcactcagaaggcaccacttcaacctccgtccagttatcttggcaaccacctgtcctggcagagagaaatggcattatcaccaagtatacccttctttatagggatatcaacatcccccttctcccgatggagcagcttattgttccagctgacaccactatgacactcactggcttaaaaccagataccacatacgatgtaaaagtacgtgctcatacgagcaaagggcccgggccatatagtcccagtgtccagttcaggacactgcctgtggatcaagtgtttgcaaaaaattttcatgtcaaagcagtaatgaagacttccgtgttgctgtcttgggagattccagagaattataactccgccatgcctttcaaaattctttatgatgatgggaaaatggtagaagaagtggatggccgagccacacagaagttaattgtcaacctgaagcctgagaaatcatattcatttgtgctgacaaatcgtggaaacagtgctggtgggctgcagcacagggtcacggcaaagactgcaccagatgtattacgtaccaagcctgccttcattgggaagaccaacttggatggcatgattactgtgcaactgcctgaagtacctgcaaatgagaatataaaaggttactacataataattgtgcctttgaagaaatctcgcgggaaatttatcaagccatgggagagtccagatgaaatggaattagatgagctgcttaaggagatatctaggaagcgcagaagcatccgttatgggagagaagttgaattaaagccatatattgccgctcactttgatgtccttcccactgagttcaccctgggggatgacaagcattatggtggatttacaaacaagcaactccaaagtggtcaagaatatgtcttctttgtgttagcagtaatggaacatgcagagtctaagatgtatgcaaccagcccttactccgaccccgtggtgtcaatggatctggatccgcagccaatcacggatgaagaagaaggcttgatctgggttgtaggtcctgtccttgcagtggtctttatcatctgcattgtcattgctattcttctttataaaaggaagagggcagagtccgactctagaaaaagcagcataccgaacaataaggagatcccttcacaccacccaacagaccctgtagaactgaggcgccttaactttcaaacaccgggtatggctagccatcctccaatacccatcttggaacttgcagaccacattgaaagattgaaagcaaatgacaacttgaagttttcccaggaatatgagtcaattgaccctggccagcagttcacttgggaacattcaaacttggaagtaaacaaaccaaagaatagatacgcgaatgtaatcgcatatgatcattcccgggttctcctatcagctatagaagggatcccaggaagtgactatgtgaatgccaactacatagatgggtataggaagcaaaatgcctatattgcaacacagggatctctccccgaaacatttggggacttttggagaatgatatgggaacaacggagtgccacagttgtcatgatgacaaaactagaagaaagatcaagggtgaagtgtgaccagtattggcctagcagaggcacagaaacccacggactcgttcaagtaacgctgcttgatactgtggagctggccacatattgtgttcgaacatttgcactttacaagaatggttcaagtgagaagagagaagtgagacaattccagttcaccgcctggcctgatcatggtgttccagaacaccctacaccttttctagctttcttacgtagagtcaaaacctgtaaccctcccgatgctggtccgatggttgtgcactgcagtgcgggagttggccggactggttgcttcatcgtcatagatgccatgttagaaagaataaagcatgaaaaaactgtagatatttatggccatgtaactttaatgagagcccagaggaactatatggttcaaacagaagaccaatacatctttatccatgatgcactgttagaagcagtgacttgtggaaataccgaagtgccagctagaaacttgtatgcctacattcagaagctgacacaaatagaaacgggagagaatgtcacaggaatggagctcgaatttaagcgtctagccagctcaaaagctcacacctcaaggtttatcagtgccaatcttccatgtaataaattcaaaaatcgccttgttaatattatgccatatgaatccacaagggtatgcctgcagcctatccgtggagtagaaggatctgattacatcaatgccagttttattgatggatacagacaacagaaagcctacatcgctacccaggggcccttggcagagaccactgaagacttctggcggatgctctgggaacacaattccaccatagttgtgatgctcaccaagctgcgtgaaatgggcagagagaaatgtcaccaatactggccagcagaacggtctgcaagataccagtactttgttgtagatcccatggctgagtacaacatgccacagtatatcctaagggaattcaaggtcacagatgccagggacggccagtcccgaacagtaaggcagttccagttcactgactggccagagcaaggagtgccaaagtccggagaaggatttattgacttcatcggccaagtccataaaacaaaagaacagtttggccaagatggacccatttcagtccattgcagcgcgggcgttggaagaactggagtcttcataacgctaagcattgttttggaaagaatgagatatgaaggagttgtagatatcttccagactgtcaaaatgttaagaacacaacgaccagctatggtacagacagaggatcaatatcagttttcctatcgtgccgcactagagtacctgggcagctttgaccactatgcaacgtagaaacccctgacccattctggatttttactacaggcccttcaatatccatggagtctcttctgagccatacagggcacttgagaagtccttcttaacttctagctaacaactacttagtgggactattacacacaaaacaaattaaaaacaaattattccaggtggaccaagaatctgctttgacatcgccccttcccaccatactgctcataataacattttagggggaaaggggagggaatgtttaaaaagaaagtccttgatttagttttttagtattgtaaagatactgctgacctgtgcttcatttctaactgtgtaaacttttttttaacaaaatgtatcattcgataaagtgaattttaaaaaagttacataactcttcatttttttatttccaaatcgtaggtttttttaagctgtagaactgttatctgtaatatcttgctgtagaaatatcaaatcatttgaaaatttgcacatttttgtgcaaaactcaatctacagtatcagtctcgtcagatatattaattttacacttcagttttgattggtgagaaagtacccattctcttcaaataatcaaagataattattattttgttttgtttttggaatcaacagggaggcgcaaagtataaagttgctgctaacatatatacatatatatccatattttataagggtgtctatgtatatatagacagtgtgtccacacaaaaaatagatacagttatcagtcagtcagttcttccatgatttagtttttttaaacgtagaaaagctattgtaaacatctctttccatttattcttaattttttgacatattggtatttctttaaagggaaatgaggaatgcacatcagtgattgattgtcaaacctcaccccctgatttcctacctaatctacccccacctaaccaatcaatcacatccacaaattgttttgtttgtttgttagtcaggcttccaacaaagttcaatatttctaacactctagtgcaataaaaattattattaaatagctaagaggtgtgcatgtgggaaaggtcagtgcatatccctttaggaggggagaatgttgtaatatatcagctatcgagttgtttaaaaaaagtgtattcaatcgtatattgtctatagtatgtgctatgaaatttgcatttatgatatgtaacaggggcaaagccaaattcatgttactctgttcagtcagaaacattttgtggcatacagcattcctgggaagtgctgtactttgtttcgttttggttttagttttgcatttagagtgccttataattgatgcctattttaatagcatttctttttagcttttggttcgtatttccattcactgttcgtatctgttactttctattaaagcattatctgtttaccac

SEQ ID NO: 5986 - protein, 1656 aa, Homo sapiens; identical to SEQ ID NO: 5968

SEQ ID NO: 5987 - DNA, 7329 bp, Homo sapiens
gcggccgctgctccgcgggattaaattggccgcccggaggcggcggcgcggccgtggcggggcgcgaaggcgctggaggaaagtgttggcggcggcgcgggaggcggtggcggcggctgcccggggccaacatgaccaggctctgaaagtgttccagctgaaatttcagatcggacagactcgctgcggctccggaggcagtgattccaagctgctcgcgcacgctgctgccaagctgcaggatggtgcacgtagccaggctgctgctgctgctcctcactttcttcctccgcacggatgctgagacacctccaaggtttacacgaacacccgttgatcagacaggggtctctggcggagttgcctctttcatctgccaagctacgggagacccaagacctaaaattgtctggaacaaaaaaggaaagaaagtcagcaatcagagatttgaggtaatagagtttgacgatgggtctggatcagttctcagaatacaacccttacggactccgagggatgaggccatttatgaatgtgtggcctcaaataatgtgggagaaataagtgtatccaccagactcacagttttgcgggaagatcaaattcccaggggcttccctaccattgacatgggcccacagttgaaggtggttgagcgtactcgcacggccaccatgctttgtgcagccagtggtaatccggatccagaaatcacttggtttaaagatttcttacctgtggacacaagcaacaacaatggtcgtattaagcagttacgatcaggagcccttcagattgagcagagtgaagagtctgaccaaggaaaatatgagtgtgttgccaccaacagcgcgggcactcagagctgcgagaagttcgccgtgtcccaccaagattctctatcccacccactaatcatgaaatcatgccaggcggaagcgttaatatcacctgtgtggccgtggggtcaccaatgccttatgtaaagtggatgttgggggcagaagatctgacacctgaagatgatatgccaataggaagaaatgtgctagaactgaatgatgtaagacagtcagcaaattacacctgtgttgctatgtcaacactgggtgtcattgaagcaatagcacagatcactgtcaaagccttacccaaacctccaggaactcctgtagtgaccgagagcacagctacaagcatcacactgacgtgggactctgggaaccctgagcctgtttcttattacataattcagcataaacctaaaaactctgaggaactttacaaagaaattgatggggtggcgaccacacgctacagtgtcgctggactaagtccctactcggattatgaattcagggttgttgctgtcaataacattgggcgggggcctcccagcgaacctgtgctaacacaaacctcagagcaagcaccatccagtgccccgagggatgtccaggcacgaatgttgagttcgaccaccattttggtacagtggaaggaacctgaagagccaaatggacagatccaaggatatagagtttattatacaatggatcccactcaacatgtcaacaactggatgaaacacaatgtagctgacagccaaatcactactattggcaacttagtgccccagaaaacatattctgtcaaagtcctggcttttacctcaattggagatggtcccctttcaagtgacatacaagtcatcactcagacaggagtaccagggcagccactaaacttcaaagcagaacctgagtctgaaacaagtattttgctctcttggacacctccacgttcagataccattgccaactatgaactggtctacaaagatggggagcatggagaggagcaacgaattaccattgagccagggacatcatataggctgcaaggactgaaaccaaacagcttatactatttccgtctggctgcacgctcccctcaaggcctgggtgcttctactgcagaaatatcagctagaaccatgcagtcaaagccgtcagctcctcctcaagacattagttgcaccagcccaagttccactagtattttggtaagttggcaacctccaccagtggaaaaacagaatggcattatcactgaatactccatcaagtacactgcagtggatggggaagatgacaagcctcacgagattttgggaattccttcggacactaccaaataccttttggaacagctggaaaaatggactgaataccggatcactgtgacagcccatacagatgtcggccctggccctgagagcttgtccgtgttgattcgaaccaatgaagatgttcctagtggtcctcctcgcaaagtcgaggtagaggctgtcaactcaacatctgttaaagtctcatggcgctcacccgtgcccaataaacagcatggccagataagaggatatcaggtgcattatgtgaggatggaaaatggtgagcccaagggccagcccatgctgaaagatgtcatgctggctgatgcacagtgggaatttgatgatactactgaacatgacatgatcatttctgggctccagcctgaaacttcctactccctcaccgtcacagcctacacaaccaaaggagatggtgctcgcagcaagcccaaactggtgtccaccactggggcagttccagggaaacctcggcttgtgattaaccacactcagatgaatactgctcttattcagtggcaccctccggtggacacatttggacctcttcagggctaccgtctaaaatttggccgcaaggatatggagccacttactactcttgagttctctgaaaaagaagatcactttacagctacagacatccacaagggagcatcatacgtcttcaggctctcagccagaaacaaagtgggctttggggaggagatggtgaaggagatttccattccagaagaagtaccaactggattccctcaaaaccttcactcagaaggcaccacttcaacctccgtccagttatcttggcaaccacctgtcctggcagagagaaatggcattatcaccaagtatacccttctttatagggatatcaacatcccccttctcccgatggagcagcttattgttccagctgacaccactatgacactcactggcttaaaaccagataccacatacgatgtaaaagtacgtgctcatacgagcaaagggcccgggccatatagtcccagtgtccagttcaggacactgcctgtggatcaagtgtttgcaaaaaattttcatgtcaaagcagtaatgaagacttccgtgttgctgtcttgggagattccagagaattataactccgccatgcctttcaaaattctttatgatgatgggaaaatggtagaagaagtggatggccgagccacacagaagttaattgtcaacctgaagcctgagaaatcatattcatttgtgctgacaaatcgtggaaacagtgctggtgggctgcagcacagggtcacggcaaagactgcaccagatgtattacgtaccaagcctgccttcattgggaagaccaacttggatggcatgattactgtgcaactgcctgaagtacctgcaaatgagaatataaaaggttactacataataattgtgcctttgaagaaatctcgcgggaaatttatcaagccatgggagagtccagatgaaatggaattagatgagctgcttaaggagatatctaggaagcgcagaagcatccgttatgggagagaagttgaattaaagccatatattgccgctcactttgatgtccttcccactgagttcaccctgggggatgacaagcattatggtggatttacaaacaagcaactccaaagtggtcaagaatatgtcttctttgtgttagcagtaatggaacatgcagagtctaagatgtatgcaaccagcccttactccgaccccgtggtgtcaatggatctggatccgcagccaatcacggatgaagaagaaggcttgatctgggttgtaggtcctgtccttgcagtggtctttatcatctgcattgtcattgctattcttctttataaaaggaagagggcagagtccgactctagaaaaagcagcataccgaacaataaggagatcccttcacaccacccaacagaccctgtagaactgaggcgccttaactttcaaacaccgggtatggctagccatcctccaatacccatcttggaacttgcagaccacattgaaagattgaaagcaaatgacaacttgaagttttcccaggaatatgagtcaattgaccctggccagcagttcacttgggaacattcaaacttggaagtaaacaaaccaaagaatagatacgcgaatgtaatcgcatatgatcattcccgggttctcctatcagctatagaagggatcccaggaagtgactatgtgaatgccaactacatagatgggtataggaagcaaaatgcctatattgcaacacagggatctctccccgaaacatttggggacttttggagaatgatatgggaacaacggagtgccacagttgtcatgatgacaaaactagaagaaagatcaagggtgaagtgtgaccagtattggcctagcagaggcacagaaacccacggactcgttcaagtaacgctgcttgatactgtggagctggccacatattgtgttcgaacatttgcactttacaagaatggttcaagtgagaagagagaagtgagacaattccagttcaccgcctggcctgatcatggtgttccagaacaccctacaccttttctagctttcttacgtagagtcaaaacctgtaaccctcccgatgctggtccgatggttgtgcactgcagtgcgggagttggccggactggttgcttcatcgtcatagatgccatgttagaaagaataaagcatgaaaaaactgtagatatttatggccatgtaactttaatgagagcccagaggaactatatggttcaaacagaagaccaatacatctttatccatgatgcactgttagaagcagtgacttgtggaaataccgaagtgccagctagaaacttgtatgcctacattcagaagctgacacaaatagaaacgggagagaatgtcacaggaatggagctcgaatttaagcgtctagccagctcaaaagctcacacctcaaggtttatcagtgccaatcttccatgtaataaattcaaaaatcgccttgttaatattatgccatatgaatccacaagggtatgcctgcagcctatccgtggagtagaaggatctgattacatcaatgccagttttattgatggatacagacaacagaaagcctacatcgctacccaggggcccttggcagagaccactgaagacttctggcggatgctctgggaacacaattccaccatagttgtgatgctcaccaagctgcgtgaaatgggcagagagaaatgtcaccaatactggccagcagaacggtctgcaagataccagtactttgttgtagatcccatggctgagtacaacatgccacagtatatcctaagggaattcaaggtcacagatgccagggacggccagtcccgaacagtaaggcagttccagttcactgactggccagagcaaggagtgccaaagtccggagaaggatttattgacttcatcggccaagtccataaaacaaaagaacagtttggccaagatggacccatttcagtccattgcagcgcgggcgttggaagaactggagtcttcataacgctaagcattgttttggaaagaatgagatatgaaggagttgtagatatcttccagactgtcaaaatgttaagaacacaacgaccagctatggtacagacagaggatcaatatcagttttcctatcgtgccgcactagagtacctgggcagctttgaccactatgcaacgtagaaacccctgacccattctggatttttactacaggcccttcaatatccatggagtctcttctgagccatacagggcacttgagaagtccttcttaacttctagctaacaactacttagtgggactattacacacaaaacaaattaaaaacaaattattccaggtggaccaagaatctgctttgacatcgccccttcccaccatactgctcataataacattttagggggaaaggggagggaatgtttaaaaagaaagtccttgatttagttttttagtattgtaaagatactgctgacctgtgcttcatttctaactgtgtaaacttttttttaacaaaatgtatcattcgataaagtgaattttaaaaaagttacataactcttcatttttttatttccaaatcgtaggtttttttaagctgtagaactgttatctgtaatatcttgctgtagaaatatcaaatcatttgaaaatttgcacatttttgtgcaaaactcaatctacagtatcagtctcgtcagatatattaattttacacttcagttttgattggtgagaaagtacccattctcttcaaataatcaaagataattattattttgttttgtttttggaatcaacagggaggcgcaaagtataaagttgctgctaacatatatacatatatatccatattttataagggtgtctatgtatatatagacagtgtgtccacacaaaaaatagatacagttatcagtcagtcagttcttccatgatttagtttttttaaacgtagaaaagctattgtaaacatctctttccatttattcttaattttttgacatattggtatttctttaaagggaaatgaggaatgcacatcagtgattgattgtcaaacctcaccccctgatttcctacctaatctacccccacctaaccaatcaatcacatccacaaattgttttgtttgtttgttagtcaggcttccaacaaagttcaatatttctaacactctagtgcaataaaaattattattaaatagctaagaggtgtgcatgtgggaaaggtcagtgcatatccctttaggaggggagaatgttgtaatatatcagctatcgagttgtttaaaaaaagtgtattcaatcgtatattgtctatagtatgtgctatgaaatttgcatttatgatatgtaacaggggcaaagccaaattcatgttactctgttcagtcagaaacattttgtggcatacagcattcctgggaagtgctgtactttgtttcgttttggttttagttttgcatttagagtgccttataattgatgcctattttaatagcatttctttttagcttttggttcgtatttccattcactgttcgtatctgttactttctattaaagcattatctgtttaccac

SEQ ID NO: 5988 - protein, 1665 aa, Homo sapiens; identical to SEQ ID NO: 5966

SEQ ID NO: 5989 - DNA, 6172 bp, Homo sapiens
tgagaccacagcagaatgtgccttggacaaaggtctcagggtggtgaactttttcttcgaattcctaacctgtgagcttacgatgatggtgcctgtccattaactgaacaactgtggttttgaacttcttgaggccagggactgtgtctgaaaacaccgacggtggctaactcaagggagacgtctggtgaacacccgtgggatctaaagaacaagctctgaaagtgttccagctgaaatttcagatcggacagactcgctgcggctccggaggcagtgattccaagctgctcgcgcacgctgctgccaagctgcaggatggtgcacgtagccaggctgctgctgctgctcctcactttcttcctccgcacggatgctgagacacctccaaggtttacacgaacacccgttgatcagacaggggtctctggcggagttgcctctttcatctgccaagctacgggagacccaagacctaaaattgtctggaacaaaaaaggaaagaaagtcagcaatcagagatttgaggtaatagagtttgacgatgggtctggatcagttctcagaatacaacccttacggactccgagggatgaggccatttatgaatgtgtggcctcaaataatgtgggagaaataagtgtatccaccagactcacagttttgcgggaagatcaaattcccaggggcttccctaccattgacatgggcccacagttgaaggtggttgagcgtactcgcacggccaccatgctttgtgcagccagtggtaatccggatccagaaatcacttggtttaaagatttcttacctgtggacacaagcaacaacaatggtcgtattaagcagttacgatcaggagcccttcagattgagcagagtgaagagtctgaccaaggaaaatatgagtgtgttgccaccaacagcgcgggcactcagagctgcgagaagttcgccgtgtcccaccaagattctctatcccacccactaatcatgaaatcatgccaggcggaagcgttaatatcacctgtgtggccgtggggtcaccaatgccttatgtaaagtggatgttgggggcagaagatctgacacctgaagatgatatgccaataggaagaaatgtgctagaactgaatgatgtaagacagtcagcaaattacacctgtgttgctatgtcaacactgggtgtcattgaagcaatagcacagatcactgtcaaagccttacccaaacctccaggaactcctgtagtgaccgagagcacagctacaagcatcacactgacgtgggactctgggaaccctgagcctgtttcttattacataattcagcataaacctaaaaactctgaggaactttacaaagaaattgatggggtggcgaccacacgctacagtgtcgctggactaagtccctactcggattatgaattcagggttgttgctgtcaataacattgggcgggggcctcccagcgaacctgtgctaacacaaacctcagagcaagcaccatccagtgccccgagggatgtccaggcacgaatgttgagttcgaccaccattttggtacagtggaaggaacctgaagagccaaatggacagatccaaggatatagagtttattatacaatggatcccactcaacatgtcaacaactggatgaaacacaatgtagctgacagccaaatcactactattggcaacttagtgccccagaaaacatattctgtcaaagtcctggcttttacctcaattggagatggtcccctttcaagtgacatacaagtcatcactcagacaggagtaccagggcagccactaaacttcaaagcagaacctgagtctgaaacaagtattttgctctcttggacacctccacgttcagataccattgccaactatgaactggtctacaaagatggggagcatggagaggagcaacgaattaccattgagccagggacatcatataggctgcaaggactgaaaccaaacagcttatactatttccgtctggctgcacgctcccctcaaggcctgggtgcttctactgcagaaatatcagctagaaccatgcagtcaatgtttgcaaaaaattttcatgtcaaagcagtaatgaagacttccgtgttgctgtcttgggagattccagagaattataactccgccatgcctttcaaaattctttatgatgatgggaaaatggtagaagaagtggatggccgagccacacagaagttaattgtcaacctgaagcctgagaaatcatattcatttgtgctgacaaatcgtggaaacagtgctggtgggctgcagcacagggtcacggcaaagactgcaccagatgtattacgtaccaagcctgccttcattgggaagaccaacttggatggcatgattactgtgcaactgcctgaagtacctgcaaatgagaatataaaaggttactacataataattgtgcctttgaagaaatctcgcgggaaatttatcaagccatgggagagtccagatgaaatggaattagatgagctgcttaaggagatatctaggaagcgcagaagcatccgttatgggagagaagttgaattaaagccatatattgccgctcactttgatgtccttcccactgagttcaccctgggggatgacaagcattatggtggatttacaaacaagcaactccaaagtggtcaagaatatgtcttctttgtgttagcagtaatggaacatgcagagtctaagatgtatgcaaccagcccttactccgaccccgtggtgtcaatggatctggatccgcagccaatcacggatgaagaagaaggcttgatctgggttgtaggtcctgtccttgcagtggtctttatcatctgcattgtcattgctattcttctttataaaaggaagagggcagagtccgactctagaaaaagcagcataccgaacaataaggagatcccttcacaccacccaacagaccctgtagaactgaggcgccttaactttcaaacaccgggtatggctagccatcctccaatacccatcttggaacttgcagaccacattgaaagattgaaagcaaatgacaacttgaagttttcccaggaatatgagtcaattgaccctggccagcagttcacttgggaacattcaaacttggaagtaaacaaaccaaagaatagatacgcgaatgtaatcgcatatgatcattcccgggttctcctatcagctatagaagggatcccaggaagtgactatgtgaatgccaactacatagatgggtataggaagcaaaatgcctatattgcaacacagggatctctccccgaaacatttggggacttttggagaatgatatgggaacaacggagtgccacagttgtcatgatgacaaaactagaagaaagatcaagggtgaagtgtgaccagtattggcctagcagaggcacagaaacccacggactcgttcaagtaacgctgcttgatactgtggagctggccacatattgtgttcgaacatttgcactttacaagaatggttcaagtgagaagagagaagtgagacaattccagttcaccgcctggcctgatcatggtgttccagaacaccctacaccttttctagctttcttacgtagagtcaaaacctgtaaccctcccgatgctggtccgatggttgtgcactgcagtgcgggagttggccggactggttgcttcatcgtcatagatgccatgttagaaagaataaagcatgaaaaaactgtagatatttatggccatgtaactttaatgagagcccagaggaactatatggttcaaacagaagaccaatacatctttatccatgatgcactgttagaagcagtgacttgtggaaataccgaagtgccagctagaaacttgtatgcctacattcagaagctgacacaaatagaaacgggagagaatgtcacaggaatggagctcgaatttaagcgtctagccagctcaaaagctcacacctcaaggtttatcagtgccaatcttccatgtaataaattcaaaaatcgccttgttaatattatgccatatgaatccacaagggtatgcctgcagcctatccgtggagtagaaggatctgattacatcaatgccagttttattgatggatacagacaacagaaagcctacatcgctacccaggggcccttggcagagaccactgaagacttctggcggatgctctgggaacacaattccaccatagttgtgatgctcaccaagctgcgtgaaatgggcagagagaaatgtcaccaatactggccagcagaacggtctgcaagataccagtactttgttgtagatcccatggctgagtacaacatgccacagtatatcctaagggaattcaaggtcacagatgccagggacggccagtcccgaacagtaaggcagttccagttcactgactggccagagcaaggagtgccaaagtccggagaaggatttattgacttcatcggccaagtccataaaacaaaagaacagtttggccaagatggacccatttcagtccattgcagcgcgggcgttggaagaactggagtcttcataacgctaagcattgttttggaaagaatgagatatgaaggagttgtagatatcttccagactgtcaaaatgttaagaacacaacgaccagctatggtacagacagaggatcaatatcagttttcctatcgtgccgcactagagtacctgggcagctttgaccactatgcaacgtagaaacccctgacccattctggatttttactacaggcccttcaatatccatggagtctcttctgagccatacagggcacttgagaagtccttcttaacttctagctaacaactacttagtgggactattacacacaaaacaaattaaaaacaaattattccaggtggaccaagaatctgctttgacatcgccccttcccaccatactgctcataataacattttagggggaaaggggagggaatgtttaaaaagaaagtccttgatttagttttttagtattgtaaagatactgctgacctgtgcttcatttctaactgtgtaaacttttttttaacaaaatgtatcattcgataaagtgaattttaaaaaagttacataactcttcatttttttatttccaaatcgtaggtttttttaagctgtagaactgttatctgtaatatcttgctgtagaaatatcaaatcatttgaaaatttgcacatttttgtgcaaaactcaatctacagtatcagtctcgtcagatatattaattttacacttcagttttgattggtgagaaagtacccattctcttcaaataatcaaagataattattattttgttttgtttttggaatcaacagggaggcgcaaagtataaagttgctgctaacatatatacatatatatccatattttataagggtgtctatgtatatatagacagtgtgtccacacaaaaaatagatacagttatcagtcagtcagttcttccatgatttagtttttttaaacgtagaaaagctattgtaaacatctctttccatttattcttaattttttgacatattggtatttctttaaagggaaatgaggaatgcacatcagtgattgattgtcaaacctcaccccctgatttcctacctaatctacccccacctaaccaatcaatcacatccacaaattgttttgtttgtttgttagtcaggcttccaacaaagttcaatatttctaacactctagtgcaataaaaattattattaaatagctaagaggtgtgcatgtgggaaaggtcagtgcatatccctttaggaggggagaatgttgtaatatatcagctatcgagttgtttaaaaaaagtgtattcaatcgtatattgtctatagtatgtgctatgaaatttgcatttatgatatgtaacaggggcaaagccaaattcatgttactctgttcagtcagaaacattttgtggcatacagcattcctgggaagtgctgtactttgtttcgttttggttttagttttgcatttagagtgccttataattgatgcctattttaatagcatttctttttagcttttggttcgtatttccattcactgttcgtatctgttactttctattaaagcattatctgtttaccac

SEQ ID NO: 5990 - protein, 1254 aa, Homo sapiens; identical to SEQ ID NO: 5970

SEQ ID NO: 5991 - DNA, 7393 bp, Homo sapiens
tgagaccacagcagaatgtgccttggacaaaggtctcagggtggtgaactttttcttcgaattcctaacctgtgagcttacgatgatggtgcctgtccattaactgaacaactgtggttttgaacttcttgaggccagggactgtgtctgaaaacaccgacggtggctaactcaagggagacgtctggtgaacacccgtgggatctaaagaacaagctctgaaagtgttccagctgaaatttcagatcggacagactcgctgcggctccggaggcagtgattccaagctgctcgcgcacgctgctgccaagctgcaggatggtgcacgtagccaggctgctgctgctgctcctcactttcttcctccgcacggatgctgagacacctccaaggtttacacgaacacccgttgatcagacaggggtctctggcggagttgcctctttcatctgccaagctacgggagacccaagacctaaaattgtctggaacaaaaaaggaaagaaagtcagcaatcagagatttgaggtaatagagtttgacgatgggtctggatcagttctcagaatacaacccttacggactccgagggatgaggccatttatgaatgtgtggcctcaaataatgtgggagaaataagtgtatccaccagactcacagttttgcgggaagatcaaattcccaggggcttccctaccattgacatgggcccacagttgaaggtggttgagcgtactcgcacggccaccatgctttgtgcagccagtggtaatccggatccagaaatcacttggtttaaagatttcttacctgtggacacaagcaacaacaatggtcgtattaagcagttacgatcaggagcccttcagattgagcagagtgaagagtctgaccaaggaaaatatgagtgtgttgccaccaacagcgcgggcactcagttcgccgtgtcccaccaagattctctatcccacccactaatcatgaaatcatgccaggcggaagcgttaatatcacctgtgtggccgtggggtcaccaatgccttatgtaaagtggatgttgggggcagaagatctgacacctgaagatgatatgccaataggaagaaatgtgctagaactgaatgatgtaagacagtcagcaaattacacctgtgttgctatgtcaacactgggtgtcattgaagcaatagcacagatcactgtcaaagccttacccaaacctccaggaactcctgtagtgaccgagagcacagctacaagcatcacactgacgtgggactctgggaaccctgagcctgtttcttattacataattcagcataaacctaaaaactctgaggaactttacaaagaaattgatggggtggcgaccacacgctacagtgtcgctggactaagtccctactcggattatgaattcagggttgttgctgtcaataacattgggcgggggcctcccagcgaacctgtgctaacacaaacctcagagcaagcaccatccagtgccccgagggatgtccaggcacgaatgttgagttcgaccaccattttggtacagtggaaggaacctgaagagccaaatggacagatccaaggatatagagtttattatacaatggatcccactcaacatgtcaacaactggatgaaacacaatgtagctgacagccaaatcactactattggcaacttagtgccccagaaaacatattctgtcaaagtcctggcttttacctcaattggagatggtcccctttcaagtgacatacaagtcatcactcagacaggagtaccagggcagccactaaacttcaaagcagaacctgagtctgaaacaagtattttgctctcttggacacctccacgttcagataccattgccaactatgaactggtctacaaagatggggagcatggagaggagcaacgaattaccattgagccagggacatcatataggctgcaaggactgaaaccaaacagcttatactatttccgtctggctgcacgctcccctcaaggcctgggtgcttctactgcagaaatatcagctagaaccatgcagtcaaagccgtcagctcctcctcaagacattagttgcaccagcccaagttccactagtattttggtaagttggcaacctccaccagtggaaaaacagaatggcattatcactgaatactccatcaagtacactgcagtggatggggaagatgacaagcctcacgagattttgggaattccttcggacactaccaaataccttttggaacagctggaaaaatggactgaataccggatcactgtgacagcccatacagatgtcggccctggccctgagagcttgtccgtgttgattcgaaccaatgaagatgttcctagtggtcctcctcgcaaagtcgaggtagaggctgtcaactcaacatctgttaaagtctcatggcgctcacccgtgcccaataaacagcatggccagataagaggatatcaggtgcattatgtgaggatggaaaatggtgagcccaagggccagcccatgctgaaagatgtcatgctggctgatgcacagtgggaatttgatgatactactgaacatgacatgatcatttctgggctccagcctgaaacttcctactccctcaccgtcacagcctacacaaccaaaggagatggtgctcgcagcaagcccaaactggtgtccaccactggggcagttccagggaaacctcggcttgtgattaaccacactcagatgaatactgctcttattcagtggcaccctccggtggacacatttggacctcttcagggctaccgtctaaaatttggccgcaaggatatggagccacttactactcttgagttctctgaaaaagaagatcactttacagctacagacatccacaagggagcatcatacgtcttcaggctctcagccagaaacaaagtgggctttggggaggagatggtgaaggagatttccattccagaagaagtaccaactggattccctcaaaaccttcactcagaaggcaccacttcaacctccgtccagttatcttggcaaccacctgtcctggcagagagaaatggcattatcaccaagtatacccttctttatagggatatcaacatcccccttctcccgatggagcagcttattgttccagctgacaccactatgacactcactggcttaaaaccagataccacatacgatgtaaaagtacgtgctcatacgagcaaagggcccgggccatatagtcccagtgtccagttcaggacactgcctgtggatcaagtgtttgcaaaaaattttcatgtcaaagcagtaatgaagacttccgtgttgctgtcttgggagattccagagaattataactccgccatgcctttcaaaattctttatgatgatgggaaaatggtagaagaagtggatggccgagccacacagaagttaattgtcaacctgaagcctgagaaatcatattcatttgtgctgacaaatcgtggaaacagtgctggtgggctgcagcacagggtcacggcaaagactgcaccagatgtattacgtaccaagcctgccttcattgggaagaccaacttggatggcatgattactgtgcaactgcctgaagtacctgcaaatgagaatataaaaggttactacataataattgtgcctttgaagaaatctcgcgggaaatttatcaagccatgggagagtccagatgaaatggaattagatgagctgcttaaggagatatctaggaagcgcagaagcatccgttatgggagagaagttgaattaaagccatatattgccgctcactttgatgtccttcccactgagttcaccctgggggatgacaagcattatggtggatttacaaacaagcaactccaaagtggtcaagaatatgtcttctttgtgttagcagtaatggaacatgcagagtctaagatgtatgcaaccagcccttactccgaccccgtggtgtcaatggatctggatccgcagccaatcacggatgaagaagaaggcttgatctgggttgtaggtcctgtccttgcagtggtctttatcatctgcattgtcattgctattcttctttataaaaggaagagggcagagtccgactctagaaaaagcagcataccgaacaataaggagatcccttcacaccacccaacagaccctgtagaactgaggcgccttaactttcaaacaccgggtatggctagccatcctccaatacccatcttggaacttgcagaccacattgaaagattgaaagcaaatgacaacttgaagttttcccaggaatatgagtcaattgaccctggccagcagttcacttgggaacattcaaacttggaagtaaacaaaccaaagaatagatacgcgaatgtaatcgcatatgatcattcccgggttctcctatcagctatagaagggatcccaggaagtgactatgtgaatgccaactacatagatgggtataggaagcaaaatgcctatattgcaacacagggatctctccccgaaacatttggggacttttggagaatgatatgggaacaacggagtgccacagttgtcatgatgacaaaactagaagaaagatcaagggtgaagtgtgaccagtattggcctagcagaggcacagaaacccacggactcgttcaagtaacgctgcttgatactgtggagctggccacatattgtgttcgaacatttgcactttacaagaatggttcaagtgagaagagagaagtgagacaattccagttcaccgcctggcctgatcatggtgttccagaacaccctacaccttttctagctttcttacgtagagtcaaaacctgtaaccctcccgatgctggtccgatggttgtgcactgcagtgcgggagttggccggactggttgcttcatcgtcatagatgccatgttagaaagaataaagcatgaaaaaactgtagatatttatggccatgtaactttaatgagagcccagaggaactatatggttcaaacagaagaccaatacatctttatccatgatgcactgttagaagcagtgacttgtggaaataccgaagtgccagctagaaacttgtatgcctacattcagaagctgacacaaatagaaacgggagagaatgtcacaggaatggagctcgaatttaagcgtctagccagctcaaaagctcacacctcaaggtttatcagtgccaatcttccatgtaataaattcaaaaatcgccttgttaatattatgccatatgaatccacaagggtatgcctgcagcctatccgtggagtagaaggatctgattacatcaatgccagttttattgatggatacagacaacagaaagcctacatcgctacccaggggcccttggcagagaccactgaagacttctggcggatgctctgggaacacaattccaccatagttgtgatgctcaccaagctgcgtgaaatgggcagagagaaatgtcaccaatactggccagcagaacggtctgcaagataccagtactttgttgtagatcccatggctgagtacaacatgccacagtatatcctaagggaattcaaggtcacagatgccagggacggccagtcccgaacagtaaggcagttccagttcactgactggccagagcaaggagtgccaaagtccggagaaggatttattgacttcatcggccaagtccataaaacaaaagaacagtttggccaagatggacccatttcagtccattgcagcgcgggcgttggaagaactggagtcttcataacgctaagcattgttttggaaagaatgagatatgaaggagttgtagatatcttccagactgtcaaaatgttaagaacacaacgaccagctatggtacagacagaggatcaatatcagttttcctatcgtgccgcactagagtacctgggcagctttgaccactatgcaacgtagaaacccctgacccattctggatttttactacaggcccttcaatatccatggagtctcttctgagccatacagggcacttgagaagtccttcttaacttctagctaacaactacttagtgggactattacacacaaaacaaattaaaaacaaattattccaggtggaccaagaatctgctttgacatcgccccttcccaccatactgctcataataacattttagggggaaaggggagggaatgtttaaaaagaaagtccttgatttagttttttagtattgtaaagatactgctgacctgtgcttcatttctaactgtgtaaacttttttttaacaaaatgtatcattcgataaagtgaattttaaaaaagttacataactcttcatttttttatttccaaatcgtaggtttttttaagctgtagaactgttatctgtaatatcttgctgtagaaatatcaaatcatttgaaaatttgcacatttttgtgcaaaactcaatctacagtatcagtctcgtcagatatattaattttacacttcagttttgattggtgagaaagtacccattctcttcaaataatcaaagataattattattttgttttgtttttggaatcaacagggaggcgcaaagtataaagttgctgctaacatatatacatatatatccatattttataagggtgtctatgtatatatagacagtgtgtccacacaaaaaatagatacagttatcagtcagtcagttcttccatgatttagtttttttaaacgtagaaaagctattgtaaacatctctttccatttattcttaattttttgacatattggtatttctttaaagggaaatgaggaatgcacatcagtgattgattgtcaaacctcaccccctgatttcctacctaatctacccccacctaaccaatcaatcacatccacaaattgttttgtttgtttgttagtcaggcttccaacaaagttcaatatttctaacactctagtgcaataaaaattattattaaatagctaagaggtgtgcatgtgggaaaggtcagtgcatatccctttaggaggggagaatgttgtaatatatcagctatcgagttgtttaaaaaaagtgtattcaatcgtatattgtctatagtatgtgctatgaaatttgcatttatgatatgtaacaggggcaaagccaaattcatgttactctgttcagtcagaaacattttgtggcatacagcattcctgggaagtgctgtactttgtttcgttttggttttagttttgcatttagagtgccttataattgatgcctattttaatagcatttctttttagcttttggttcgtatttccattcactgttcgtatctgttactttctattaaagcattatctgtttaccac

SEQ ID NO: 5992 - protein, 1665 aa, Homo sapiens; identical to SEQ ID NO: 5966

SEQ ID NO: 5993 - DNA, 7405 bp, Homo sapiens
tgagaccacagcagaatgtgccttggacaaaggtctcagggtggtgaactttttcttcgaattcctaacctgtgagcttacgatgatggtgcctgtccattaactgaacaactgtggttttgaacttcttgaggccagggactgtgtctgaaaacaccgacggtggctaactcaagggagacgtctggtgaacacccgtgggatctaaagaacaagctctgaaagtgttccagctgaaatttcagatcggacagactcgctgcggctccggaggcagtgattccaagctgctcgcgcacgctgctgccaagctgcaggatggtgcacgtagccaggctgctgctgctgctcctcactttcttcctccgcacggatgctgagacacctccaaggtttacacgaacacccgttgatcagacaggggtctctggcggagttgcctctttcatctgccaagctacgggagacccaagacctaaaattgtctggaacaaaaaaggaaagaaagtcagcaatcagagatttgaggtaatagagtttgacgatgggtctggatcagttctcagaatacaacccttacggactccgagggatgaggccatttatgaatgtgtggcctcaaataatgtgggagaaataagtgtatccaccagactcacagttttgcgggaagatcaaattcccaggggcttccctaccattgacatgggcccacagttgaaggtggttgagcgtactcgcacggccaccatgctttgtgcagccagtggtaatccggatccagaaatcacttggtttaaagatttcttacctgtggacacaagcaacaacaatggtcgtattaagcagttacgatcaggagcccttcagattgagcagagtgaagagtctgaccaaggaaaatatgagtgtgttgccaccaacagcgcgggcactcagagctgcgagaagttcgccgtgtcccaccaagattctctatcccacccactaatcatgaaatcatgccaggcggaagcgttaatatcacctgtgtggccgtggggtcaccaatgccttatgtaaagtggatgttgggggcagaagatctgacacctgaagatgatatgccaataggaagaaatgtgctagaactgaatgatgtaagacagtcagcaaattacacctgtgttgctatgtcaacactgggtgtcattgaagcaatagcacagatcactgtcaaagccttacccaaacctccaggaactcctgtagtgaccgagagcacagctacaagcatcacactgacgtgggactctgggaaccctgagcctgtttcttattacataattcagcataaacctaaaaactctgaggaactttacaaagaaattgatggggtggcgaccacacgctacagtgtcgctggactaagtccctactcggattatgaattcagggttgttgctgtcaataacattgggcgggggcctcccagcgaacctgtgctaacacaaacctcagagcaagcaccatccagtgccccgagggatgtccaggcacgaatgttgagttcgaccaccattttggtacagtggaaggaacctgaagagccaaatggacagatccaaggatatagagtttattatacaatggatcccactcaacatgtcaacaactggatgaaacacaatgtagctgacagccaaatcactactattggcaacttagtgccccagaaaacatattctgtcaaagtcctggcttttacctcaattggagatggtcccctttcaagtgacatacaagtcatcactcagacaggagtaccagggcagccactaaacttcaaagcagaacctgagtctgaaacaagtattttgctctcttggacacctccacgttcagataccattgccaactatgaactggtctacaaagatggggagcatggagaggagcaacgaattaccattgagccagggacatcatataggctgcaaggactgaaaccaaacagcttatactatttccgtctggctgcacgctcccctcaaggcctgggtgcttctactgcagaaatatcagctagaaccatgcagtcaaagccgtcagctcctcctcaagacattagttgcaccagcccaagttccactagtattttggtaagttggcaacctccaccagtggaaaaacagaatggcattatcactgaatactccatcaagtacactgcagtggatggggaagatgacaagcctcacgagattttgggaattccttcggacactaccaaataccttttggaacagctggaaaaatggactgaataccggatcactgtgacagcccatacagatgtcggccctggccctgagagcttgtccgtgttgattcgaaccaatgaagatgttcctagtggtcctcctcgcaaagtcgaggtagaggctgtcaactcaacatctgttaaagtctcatggcgctcacccgtgcccaataaacagcatggccagataagaggatatcaggtgcattatgtgaggatggaaaatggtgagcccaagggccagcccatgctgaaagatgtcatgctggctgatgcacagtgggaatttgatgatactactgaacatgacatgatcatttctgggctccagcctgaaacttcctactccctcaccgtcacagcctacacaaccaaaggagatggtgctcgcagcaagcccaaactggtgtccaccactggggcagttccagggaaacctcggcttgtgattaaccacactcagatgaatactgctcttattcagtggcaccctccggtggacacatttggacctcttcagggctaccgtctaaaatttggccgcaaggatatggagccacttactactcttgagttctctgaaaaagaagatcactttacagctacagacatccacaagggagcatcatacgtcttcaggctctcagccagaaacaaagtgggctttggggaggagatggtgaaggagatttccattccagaagaagtaccaactggattccctcaaaaccttcactcagaaggcaccacttcaacctccgtccagttatcttggcaaccacctgtcctggcagagagaaatggcattatcaccaagtatacccttctttatagggatatcaacatcccccttctcccgatggagcagcttattgttccagctgacaccactatgacactcactggcttaaaaccagataccacatacgatgtaaaagtacgtgctcatacgagcaaagggcccgggccatatagtcccagtgtccagttcaggacactgcctgtggatcaagtgtttgcaaaaaattttcatgtcaaagcagtaatgaagacttccgtgttgctgtcttgggagattccagagaattataactccgccatgcctttcaaaattctttatgatgatgggaaaatggtagaagaagtggatggccgagccacacagaagttaattgtcaacctgaagcctgagaaatcatattcatttgtgctgacaaatcgtggaaacagtgctggtgggctgcagcacagggtcacggcaaagactgcaccagatgtattacgtaccaagcctgccttcattgggaagaccaacttggatggcatgattactgtgcaactgcctgaagtacctgcaaatgagaatataaaaggttactacataataattgtgcctttgaagaaatctcgcgggaaatttatcaagccatgggagagtccagatgaaatggaattagatgagctgcttaaggagatatctaggaagcgcagaagcatccgttatgggagagaagttgaattaaagccatatattgccgctcactttgatgtccttcccactgagttcaccctgggggatgacaagcattatggtggatttacaaacaagcaactccaaagtggtcaagaatatgtcttctttgtgttagcagtaatggaacatgcagagtctaagatgtatgcaaccagcccttactccgaccccgtggtgtcaatggatctggatccgcagccaatcacggatgaagaagaaggcttgatctgggttgtaggtcctgtccttgcagtggtctttatcatctgcattgtcattgctattcttctttataaaaggaagagggcagagtccgactctagaaaaagcagcataccgaacaataaggagatcccttcacaccacccaacagaccctgtagaactgaggcgccttaactttcaaacaccgggtatggctagccatcctccaatacccatcttggaacttgcagaccacattgaaagattgaaagcaaatgacaacttgaagttttcccaggaatatgagtcaattgaccctggccagcagttcacttgggaacattcaaacttggaagtaaacaaaccaaagaatagatacgcgaatgtaatcgcatatgatcattcccgggttctcctatcagctatagaagggatcccaggaagtgactatgtgaatgccaactacatagatgggtataggaagcaaaatgcctatattgcaacacagggatctctccccgaaacatttggggacttttggagaatgatatgggaacaacggagtgccacagttgtcatgatgacaaaactagaagaaagatcaagggtgaagtgtgaccagtattggcctagcagaggcacagaaacccacggactcgttcaagtaacgctgcttgatactgtggagctggccacatattgtgttcgaacatttgcactttacaagaatggttcaagtgagaagagagaagtgagacaattccagttcaccgcctggcctgatcatggtgttccagaacaccctacaccttttctagctttcttacgtagagtcaaaacctgtaaccctcccgatgctggtccgatggttgtgcactgcagtgcgggagttggccggactggttgcttcatcgtcatagatgccatgttagaaagaataaagcatgaaaaaactgtagatatttatggccatgtaactttaatgagagcccagaggaactatatggttcaaacagaagaccaatacatctttatccatgatgcactgttagaagcagtgacttgtggaaataccgaagtgccagctagaaacttgtatgcctacattcagaagctgacacaaatagaaacgggagagaatgtcacaggaatggagctcgaatttaagcgtctagccagctcaaaagctcacacctcaaggtttatcagtgccaatcttccatgtaataaattcaaaaatcgccttgttaatattatgccatatgaatccacaagggtatgcctgcagcctatccgtggagtagaaggatctgattacatcaatgccagttttattgatggatacagacaacagaaagcctacatcgctacccaggggcccttggcagagaccactgaagacttctggcggatgctctgggaacacaattccaccatagttgtgatgctcaccaagctgcgtgaaatgggcagagagaaatgtcaccaatactggccagcagaacggtctgcaagataccagtactttgttgtagatcccatggctgagtacaacatgccacagtatatcctaagggaattcaaggtcacagatgccagggacggccagtcccgaacagtaaggcagttccagttcactgactggccagagcaaggagtgccaaagtccggagaaggatttattgacttcatcggccaagtccataaaacaaaagaacagtttggccaagatggacccatttcagtccattgcagcgcgggcgttggaagaactggagtcttcataacgctaagcattgttttggaaagaatgagatatgaaggagttgtagatatcttccagactgtcaaaatgttaagaacacaacgaccagctatggtacagacagaggatcaatatcagttttcctatcgtgccgcactagagtacctgggcagctttgaccactatgcaacgtagaaacccctgacccattctggatttttactacaggcccttcaatatccatggagtctcttctgagccatacagggcacttgagaagtccttcttaacttctagctaacaactacttagtgggactattacacacaaaacaaattaaaaacaaattattccaggtggaccaagaatctgctttgacatcgccccttcccaccatactgctcataataacattttagggggaaaggggagggaatgtttaaaaagaaagtccttgatttagttttttagtattgtaaagatactgctgacctgtgcttcatttctaactgtgtaaacttttttttaacaaaatgtatcattcgataaagtgaattttaaaaaagttacataactcttcatttttttatttccaaatcgtaggtttttttaagctgtagaactgttatctgtaatatcttgctgtagaaatatcaaatcatttgaaaatttgcacatttttgtgcaaaactcaatctacagtatcagtctcgtcagatatattaattttacacttcagttttgattggtgagaaagtacccattctcttcaaataatcaaagataattattattttgttttgtttttggaatcaacagggaggcgcaaagtataaagttgctgctaacatatatacatatatatccatattttataagggtgtctatgtatatatagacagtgtgtccacacaaaaaatagatacagttatcagtcagtcagttcttccatgatttagtttttttaaacgtagaaaagctattgtaaacatctctttccatttattcttaattttttgacatattggtatttctttaaagggaaatgaggaatgcacatcagtgattgattgtcaaacctcaccccctgatttcctacctaatctacccccacctaaccaatcaatcacatccacaaattgttttgtttgtttgttagtcaggcttccaacaaagttcaatatttctaacactctagtgcaataaaaattattattaaatagctaagaggtgtgcatgtgggaaaggtcagtgcatatccctttaggaggggagaatgttgtaatatatcagctatcgagttgtttaaaaaaagtgtattcaatcgtatattgtctatagtatgtgctatgaaatttgcatttatgatatgtaacaggggcaaagccaaattcatgttactctgttcagtcagaaacattttgtggcatacagcattcctgggaagtgctgtactttgtttcgttttggttttagttttgcatttagagtgccttataattgatgcctattttaatagcatttctttttagcttttggttcgtatttccattcactgttcgtatctgttactttctattaaagcattatctgtttaccac

SEQ ID NO: 5994 - protein, 1665 aa, Homo sapiens; identical to SEQ ID NO: 5966

SEQ ID NO: 5995 - DNA, 7378 bp, Homo sapiens
tgagaccacagcagaatgtgccttggacaaaggtctcagggtggtgaactttttcttcgaattcctaacctgtgagcttacgatgatggtgcctgtccattaactgaacaactgtggttttgaacttcttgaggccagggactgtgtctgaaaacaccgacggtggctaactcaagggagacgtctggtgaacacccgtgggatctaaagaacaagctctgaaagtgttccagctgaaatttcagatcggacagactcgctgcggctccggaggcagtgattccaagctgctcgcgcacgctgctgccaagctgcaggatggtgcacgtagccaggctgctgctgctgctcctcactttcttcctccgcacggatgctgagacacctccaaggtttacacgaacacccgttgatcagacaggggtctctggcggagttgcctctttcatctgccaagctacgggagacccaagacctaaaattgtctggaacaaaaaaggaaagaaagtcagcaatcagagatttgaggtaatagagtttgacgatgggtctggatcagttctcagaatacaacccttacggactccgagggatgaggccatttatgaatgtgtggcctcaaataatgtgggagaaataagtgtatccaccagactcacagttttgcgggaagatcaaattcccaggggcttccctaccattgacatgggcccacagttgaaggtggttgagcgtactcgcacggccaccatgctttgtgcagccagtggtaatccggatccagaaatcacttggtttaaagatttcttacctgtggacacaagcaacaacaatggtcgtattaagcagttacgatcaggagcccttcagattgagcagagtgaagagtctgaccaaggaaaatatgagtgtgttgccaccaacagcgcgggcactcagagctgcgagaagttcgccgtgtcccaccaagattctctatcccacccactaatcatgaaatcatgccaggcggaagcgttaatatcacctgtgtggccgtggggtcaccaatgccttatgtaaagtggatgttgggggcagaagatctgacacctgaagatgatatgccaataggaagaaatgtgctagaactgaatgatgtaagacagtcagcaaattacacctgtgttgctatgtcaacactgggtgtcattgaagcaatagcacagatcactgtcaaagccttacccaaacctccaggaactcctgtagtgaccgagagcacagctacaagcatcacactgacgtgggactctgggaaccctgagcctgtttcttattacataattcagcataaacctaaaaactctgaggaactttacaaagaaattgatggggtggcgaccacacgctacagtgtcgctggactaagtccctactcggattatgaattcagggttgttgctgtcaataacattgggcgggggcctcccagcgaacctgtgctaacacaaacctcagagcaagcaccatccagtgccccgagggatgtccaggcacgaatgttgagttcgaccaccattttggtacagtggaaggaacctgaagagccaaatggacagatccaaggatatagagtttattatacaatggatcccactcaacatgtcaacaactggatgaaacacaatgtagctgacagccaaatcactactattggcaacttagtgccccagaaaacatattctgtcaaagtcctggcttttacctcaattggagatggtcccctttcaagtgacatacaagtcatcactcagacaggagtaccagggcagccactaaacttcaaagcagaacctgagtctgaaacaagtattttgctctcttggacacctccacgttcagataccattgccaactatgaactggtctacaaagatggggagcatggagaggagcaacgaattaccattgagccagggacatcatataggctgcaaggactgaaaccaaacagcttatactatttccgtctggctgcacgctcccctcaaggcctgggtgcttctactgcagaaatatcagctagaaccatgcagtcaaagccgtcagctcctcctcaagacattagttgcaccagcccaagttccactagtattttggtaagttggcaacctccaccagtggaaaaacagaatggcattatcactgaatactccatcaagtacactgcagtggatggggaagatgacaagcctcacgagattttgggaattccttcggacactaccaaataccttttggaacagctggaaaaatggactgaataccggatcactgtgacagcccatacagatgtcggccctggccctgagagcttgtccgtgttgattcgaaccaatgaagatgttcctagtggtcctcctcgcaaagtcgaggtagaggctgtcaactcaacatctgttaaagtctcatggcgctcacccgtgcccaataaacagcatggccagataagaggatatcaggtgcattatgtgaggatggaaaatggtgagcccaagggccagcccatgctgaaagatgtcatgctggctgatgcacaggacatgatcatttctgggctccagcctgaaacttcctactccctcaccgtcacagcctacacaaccaaaggagatggtgctcgcagcaagcccaaactggtgtccaccactggggcagttccagggaaacctcggcttgtgattaaccacactcagatgaatactgctcttattcagtggcaccctccggtggacacatttggacctcttcagggctaccgtctaaaatttggccgcaaggatatggagccacttactactcttgagttctctgaaaaagaagatcactttacagctacagacatccacaagggagcatcatacgtcttcaggctctcagccagaaacaaagtgggctttggggaggagatggtgaaggagatttccattccagaagaagtaccaactggattccctcaaaaccttcactcagaaggcaccacttcaacctccgtccagttatcttggcaaccacctgtcctggcagagagaaatggcattatcaccaagtatacccttctttatagggatatcaacatcccccttctcccgatggagcagcttattgttccagctgacaccactatgacactcactggcttaaaaccagataccacatacgatgtaaaagtacgtgctcatacgagcaaagggcccgggccatatagtcccagtgtccagttcaggacactgcctgtggatcaagtgtttgcaaaaaattttcatgtcaaagcagtaatgaagacttccgtgttgctgtcttgggagattccagagaattataactccgccatgcctttcaaaattctttatgatgatgggaaaatggtagaagaagtggatggccgagccacacagaagttaattgtcaacctgaagcctgagaaatcatattcatttgtgctgacaaatcgtggaaacagtgctggtgggctgcagcacagggtcacggcaaagactgcaccagatgtattacgtaccaagcctgccttcattgggaagaccaacttggatggcatgattactgtgcaactgcctgaagtacctgcaaatgagaatataaaaggttactacataataattgtgcctttgaagaaatctcgcgggaaatttatcaagccatgggagagtccagatgaaatggaattagatgagctgcttaaggagatatctaggaagcgcagaagcatccgttatgggagagaagttgaattaaagccatatattgccgctcactttgatgtccttcccactgagttcaccctgggggatgacaagcattatggtggatttacaaacaagcaactccaaagtggtcaagaatatgtcttctttgtgttagcagtaatggaacatgcagagtctaagatgtatgcaaccagcccttactccgaccccgtggtgtcaatggatctggatccgcagccaatcacggatgaagaagaaggcttgatctgggttgtaggtcctgtccttgcagtggtctttatcatctgcattgtcattgctattcttctttataaaaggaagagggcagagtccgactctagaaaaagcagcataccgaacaataaggagatcccttcacaccacccaacagaccctgtagaactgaggcgccttaactttcaaacaccgggtatggctagccatcctccaatacccatcttggaacttgcagaccacattgaaagattgaaagcaaatgacaacttgaagttttcccaggaatatgagtcaattgaccctggccagcagttcacttgggaacattcaaacttggaagtaaacaaaccaaagaatagatacgcgaatgtaatcgcatatgatcattcccgggttctcctatcagctatagaagggatcccaggaagtgactatgtgaatgccaactacatagatgggtataggaagcaaaatgcctatattgcaacacagggatctctccccgaaacatttggggacttttggagaatgatatgggaacaacggagtgccacagttgtcatgatgacaaaactagaagaaagatcaagggtgaagtgtgaccagtattggcctagcagaggcacagaaacccacggactcgttcaagtaacgctgcttgatactgtggagctggccacatattgtgttcgaacatttgcactttacaagaatggttcaagtgagaagagagaagtgagacaattccagttcaccgcctggcctgatcatggtgttccagaacaccctacaccttttctagctttcttacgtagagtcaaaacctgtaaccctcccgatgctggtccgatggttgtgcactgcagtgcgggagttggccggactggttgcttcatcgtcatagatgccatgttagaaagaataaagcatgaaaaaactgtagatatttatggccatgtaactttaatgagagcccagaggaactatatggttcaaacagaagaccaatacatctttatccatgatgcactgttagaagcagtgacttgtggaaataccgaagtgccagctagaaacttgtatgcctacattcagaagctgacacaaatagaaacgggagagaatgtcacaggaatggagctcgaatttaagcgtctagccagctcaaaagctcacacctcaaggtttatcagtgccaatcttccatgtaataaattcaaaaatcgccttgttaatattatgccatatgaatccacaagggtatgcctgcagcctatccgtggagtagaaggatctgattacatcaatgccagttttattgatggatacagacaacagaaagcctacatcgctacccaggggcccttggcagagaccactgaagacttctggcggatgctctgggaacacaattccaccatagttgtgatgctcaccaagctgcgtgaaatgggcagagagaaatgtcaccaatactggccagcagaacggtctgcaagataccagtactttgttgtagatcccatggctgagtacaacatgccacagtatatcctaagggaattcaaggtcacagatgccagggacggccagtcccgaacagtaaggcagttccagttcactgactggccagagcaaggagtgccaaagtccggagaaggatttattgacttcatcggccaagtccataaaacaaaagaacagtttggccaagatggacccatttcagtccattgcagcgcgggcgttggaagaactggagtcttcataacgctaagcattgttttggaaagaatgagatatgaaggagttgtagatatcttccagactgtcaaaatgttaagaacacaacgaccagctatggtacagacagaggatcaatatcagttttcctatcgtgccgcactagagtacctgggcagctttgaccactatgcaacgtagaaacccctgacccattctggatttttactacaggcccttcaatatccatggagtctcttctgagccatacagggcacttgagaagtccttcttaacttctagctaacaactacttagtgggactattacacacaaaacaaattaaaaacaaattattccaggtggaccaagaatctgctttgacatcgccccttcccaccatactgctcataataacattttagggggaaaggggagggaatgtttaaaaagaaagtccttgatttagttttttagtattgtaaagatactgctgacctgtgcttcatttctaactgtgtaaacttttttttaacaaaatgtatcattcgataaagtgaattttaaaaaagttacataactcttcatttttttatttccaaatcgtaggtttttttaagctgtagaactgttatctgtaatatcttgctgtagaaatatcaaatcatttgaaaatttgcacatttttgtgcaaaactcaatctacagtatcagtctcgtcagatatattaattttacacttcagttttgattggtgagaaagtacccattctcttcaaataatcaaagataattattattttgttttgtttttggaatcaacagggaggcgcaaagtataaagttgctgctaacatatatacatatatatccatattttataagggtgtctatgtatatatagacagtgtgtccacacaaaaaatagatacagttatcagtcagtcagttcttccatgatttagtttttttaaacgtagaaaagctattgtaaacatctctttccatttattcttaattttttgacatattggtatttctttaaagggaaatgaggaatgcacatcagtgattgattgtcaaacctcaccccctgatttcctacctaatctacccccacctaaccaatcaatcacatccacaaattgttttgtttgtttgttagtcaggcttccaacaaagttcaatatttctaacactctagtgcaataaaaattattattaaatagctaagaggtgtgcatgtgggaaaggtcagtgcatatccctttaggaggggagaatgttgtaatatatcagctatcgagttgtttaaaaaaagtgtattcaatcgtatattgtctatagtatgtgctatgaaatttgcatttatgatatgtaacaggggcaaagccaaattcatgttactctgttcagtcagaaacattttgtggcatacagcattcctgggaagtgctgtactttgtttcgttttggttttagttttgcatttagagtgccttataattgatgcctattttaatagcatttctttttagcttttggttcgtatttccattcactgttcgtatctgttactttctattaaagcattatctgtttaccac

SEQ ID NO: 5996 - protein, 1656 aa, Homo sapiens; identical to SEQ ID NO: 5968

SEQ ID NO: 5997 - DNA, 582 bp, Homo sapiens
aggagcacaccgcggcgctagagaagaccaggaaaaaggacctgagccagcttgccgtcttaacaaaaatttcaaactttgcaaagcggtataccttcttattctccagttcagtattgccagtgaagtcatactgaacgcagacaaggaaaagaaagaaaaagaaactcaatgagatatgttgtcatcttccctgttttatggatgaagttctaagtagaggttcggagaaggtcttccaaattatgaaaattggcaattgggcgatgttcacagtgtcccgtctactgcctggggcccctgtcatgcagcagctgcagaaccaaggctgagaactctacaaatacaataagactgcagtaaaaggatcaattcattttcatatctggaaatcatgagaggcttcatggaggagataatatttgagctgagcttgaaaaatgagcagaattttgatagagtacatctctgactgagggaagagcataagcaaggatccccagtgcacgcctgtcccattcttcaagtagtcccagcccacttcctttggagtaagacacctcttccatgcaacattgcaag

SEQ ID NO: 5998 - protein, 43 aa, Homo sapiens
MDEVLSRGSEKVFQIMKIGNWAMFTVSRLLPGAPVMQQLQNQG

SEQ ID NO: 5999 - DNA, 698 bp, Homo sapiens
aaactctgcttggcacatggaaggttctccatcacaaggtattatgaagtggattcataaataccttggaaagaccaagtaggtattatgaatacactctacagaagaggacagtaagaatcaaatttgtggaagtctacccatctgtttccgtttaggtaaaatggatagaataatagtacttacctcaaaggattgttgaagagaatcaacaagatgatatccctgaagcactgggaatagtgtctggcacacagcactctcccaggagcacaccgcggcgctagagaagaccaggaaaaaggacctgagccagcttgccgtcttaacaaaaatttcaaactttgcaaagcggtataccttcttattctccagttcagtattgccagtgaagtcatactgaacgcagacaaggaaaagaaagaaaaagaaactcaatgagatatgttgtcatcttccctgttttatggatgaagttctaagtagaggttcggagaaggtcttccaaattatgaaaattggcaattgggcgatgttcacagtgtcccgtctactgcctggggcccctgtcatgcagcagctgcaggtgagtcactggctgggagagaaagtgagaacagctttccgtgcggagttgcctgacagccattccctgctcagggctcaccctgcagtcctgtggctgaacaagatttagg

SEQ ID NO: 6000 - protein, 76 aa, Homo sapiens
MDEVLSRGSEKVFQIMKIGNWAMFTVSRLLPGAPVMQQLQVSHWLGEKVRTAFRAELPDSHSLLRAHPAVLWLNKI

SEQ ID NO: 6001 - DNA, 494 bp, Homo sapiens
caggaaaaaggacctgagccagcttgccgtcttaacaaaaatttcaaactttgcaaagcggtataccttcttattctccagttcagtattgccagtgaagtcatactgaacgcagacaaggaaaagaaagaaaaagaaactcaatgagatatgttgtcatcttccctgttttatggatgaagttctaagtagaggttcggagaagatgttcagcctcagaacgtagccaccttgctgtgagaaagcccaaccatcttgtacagcgagaccacatggagaggcgcatgtggaaaggaacggaggctacaagccgatagccagcatcgactgccaggcacggagagtgagtcttcagatgaatccagcctcagcctagagtcttttgtctcaggccccagacactgtggagcagggacaagccatccccactgtgtcccacccgcattcctgatccacagaatctatgagcacaataaatagttgctttatggcag

SEQ ID NO: 6002 - protein, 48 aa, Homo sapiens
QEKGPEPACRLNKNFKLCKAVYLLILQFSIASEVILNADKEKKEKETQ

SEQ ID NO: 6003 - DNA, 425 bp, Homo sapiens
aagaccaggaaaaaggacctgagccagcttgccgtcttaacaaaaatttcaaactttgcaaagcggtataccttcttattctccagttcagtattgccagtgaagtcatactgaacgcagacaaggaaaagaaagaaaaagatgttcagcctcagaacgtagccaccttgctgtgagaaagcccaaccatcttgtacagcgagaccacatggagaggcgcatgtggaaaggaacggaggctacaagccgatagccagcatcgactgccaggcacggagagtgagtcttcagatgaatccagcctcagcctagagtcttttgtctcaggccccagacactgtggagcagggacaagccatccccactgtgtcccacccgcattcctgatccacagaatctatgagcacaataaatagttgctttat

SEQ ID NO: 6004 - protein, 57 aa, Homo sapiens
DQEKGPEPACRLNKNFKLCKAVYLLILQFSIASEVILNADKEKKEKDVQPQNVATLL

SEQ ID NO: 6005 - DNA, 3581 bp, Homo sapiens
gatgtaacaaggccaggctcgcgccgcgtcccctctttcccagactcagtgctccctcctcctcccgcgccccgcgctctgcgcgctgagctggcgccgggctccgcttgcacagcaccgggaccgacgggcactgctgggagagccgctctcccaggttccacctccccgatgcagagtccgtgggggaaaccaggctttcctcccagaaccaagggagcgagccgagggggcagctgctgtgggggcttctgaggagacagcctggcttctttccctacttcctggagagggcaggaaacctcagaatagaggaacgctgctccctggtcagcaagcagcccccaacctggatggagtgaaacatgcggcctgatgacattaacccgaggactgggctggtggtggccctggtcagtgtcttcctcgtctttggtttcatgttcaccgtctctgggatgaaaggggagactttgggaaacatccccctcctggccatcgggccagccatctgcctaccaggcatcgcagccattgccctggccaggaaaaccgagggatgcaccaagtggccagagaacgagctgctgtgggtccgcaaattgccctgcttccggaaacccaaagacaaggaggtggtagagctgctgaggaccccttcagacctagaatccggcaaggggagctcagatgagctggctaagaaggcgggcctcagggggaagcctcccccacaaagccagggtgaggtgtccgtggccagctccatcaacagccccacacccacggaggaaggagaatgccagagcctcgtccagaatgggcatcaggaggagacgtccagatacctggacggctactgcccctcgggcagttccctcacctacagtgccttggacgtcaagtgctcagcaagggacagatctgagtgccctgagcctgaggatagcatcttctttgtgccccaggacagtatcatcgtttgctcctacaagcagaacagcccgtatgacagatactgttgttatatcaatcagatacaaggcaggtgggaccacgagaccatcgtctaatctctgcctacaaaggtggctggattgatagaatatgactaagcccagctccccgtggaagcaaattgctctgcttggagagccttcacactgttagaaattgacctggtatgtgatgggtgtgataacctctggtacccgagagtcatgtaaataggcatgttggggacacattttagggaagggcgatgagggttaaggacactggaagaggcagtgggtaggaaaggaagctactccagttgcttcttaacaatttacacaatgttaaatgttttgtaaaataacccaaaaagtgctatccagaaccagctgagagcaagataaatctagagtgggctgcagatgtgaggcatcaaatgatgcatgagctgaccacagggaaactgagctgctttatgtttgaataagttgaaaataaaattaatgatccgttatataaagtaatttttgcctggttaaaagcttatcacacttggtatttgctgaaagaaaaaaaaatcaagatacaagagttaaaccctccttagatgggatggtttttgggaaaagggtagttaaagagagttggattatgtaactgagtcttgtggcattattgtctgacaagatcatggtctctaataaagtaaaataagtgtgagcagctatgtgaaaagttaacatttttagatggctatgttacttcttaaactcttcgtttaaatccatttattgcatctttatctgaaatgggttttttctaaacatttactatcattcatgtattatttccttaccaggtgcaacattatttgaaatgatactttcatagattggaatttgttttcatcaagacaaaatgaattttacatatatatccaagtctttaacattggcagacatgtactgataattaccattcctacataccttttaaaatctgaaaactataaagtctacacattagccttgaacattgcacataatttgtatgaaatgcaatggttaaacctttggaagtgtcattatttgtacatttgttcaactcctctcacagactgtaaatgccagtgaaacaagaactcatctactaaatttaactgaagcctagattttattaagctcacctgatcagtgaacattacatgataaaagtctctttatttcatacatttttgctgctgaggaaaacaacaaatcacaatgatatcctaaaatgtgctttctatttcacttgctcaactgcaatagataagaaggctatcaagcagaatgccatttgatccccggtgaagaaaaatatgaattatatataggaatggtgatagagttcatcttgaagatcagaagtattttgtatccttcaaagaatgatcattttaagtgatcatatagtcttagtcactttctcccaaaaggggaattgaggacaaaaatttgggcatatatgttttgtgtatttcaattccaactctgcaattctttcttaagtatagcaattgttctgtcttaagaatcatggtatttttaaaaaatcataattttcaagtcaagttcaagatcaaaaatatgtaattattttagtagggcttaaatatcagaaatgagatgcatgatcttgggcaaattttatcttcttacacctgagtttcctactctgtgaagggagggggaactgatttacacttgattatttctatcattcattttcagtgtaaatattctatggtgttatgtcaaaggcattttatatattgccaggaaatgagttacagcaaaatgcatgccaaagttatgaaatttatgataattatgtgacatacattgcacagctactactcaaaaaagaattttgtagatgtatgaaagcagattattcaacacaatgcattcctgagaataaaatgaacataatcagagtaaaatatttttgaggagaaaacttaaaatgttggtataactcaaagtaatctaatacacaaccttgcactaaatgtgattgacatttggatttgggatggggagagatagtttcctaaaatcacagtaacttttaataattgtaatgcattttgaaaacagagaatcatatttttataatggtgagaactatgcaataactctttaggaatgaaaacttcctttaagaagtttgccaccgttagagatgaggagatagtgagacagagagatgttcacagagactcagcaaatcttagacaataatgctgcaattttctgaaagaagatgcttgcagtgtcaggtatggtttgggggttggaaaagttacttttctgatttcttggaaccatttaaaactcctttatatcattctgtctctttccaaattgagggtcaactactagtttagagatataaggtattttatcttgttttcaagttctacttcagaagaaaacctatttcatgtttcttctcccattacctacttaagatacttaaggtatttaagtatgcatttgaggaaatattttcctgtgctaaaataaaggtttgcaaatgtt

SEQ ID NO: 6006 - protein, 235 aa, Homo sapiens; identical to SEQ ID NO: 809

SEQ ID NO: 6007 - DNA, 6386 bp, Homo sapiens
gcgcggatcccgggtggaatgacgggagggagtcccggcagctcctacctcccagcgatggcgtcgctgtgccgcgcccagtccccagcctgccggccggtactcaccgctacccggagttcgctcagacggtgagatttggggcgggtccgaggcagcggcgggacgctacctgcgaccgggaccatgaggagctgccagacccgtggggccggtaacgagagcagtcgcggcacctgctgagaggaaagagggagcggtccggcgcggctggggcgcggcagaggcttgcccgatcctcggccatgtcactgctctgcgtgcgcgttaaaagggccaaattccagggttcaccagataaatttaacacatatgtgaccctgaaagtacagaatgtgaagagcacaactgtagcagttcgtggtgatcagccttcctgggaacaggatttcatgtttgagattagtcgcctggacctgggtctaagtgtggaggtatggaacaaaggactgatctgggacaccatggtggggactgtgtggattgcgctgaagactattcgtcagtcggatgaggaagggcctggggaatggtccacattagaggcagagacgttaatgaaagacgatgagatctgtggaactagaaacccaactcctcataaaattttgcttgatacaagatttgagttgccttttgatatcccagaggaggaagccagatattggacctacaaatgggagcaaatcaatgccttgggagctgacaatgagtattctagtcaagaagaaagccagaggaagccattgcccactgctgccgcccagtgttcttttgaagaccctgatagtgccgtcgatgaccgagatagtgactatcgcagtgagaccagcaacagcttcccacctccttaccatacagcttcccagcccaacgcttctgtgcaccagttccctgtgccggtgcgatcgccacagcagctgctacttcaaggcagttcccgggactcttgtaatgactctatgcaaagttatgaccttgattatccagagcggcgggctatcagccccaccagcagcagtaggtatggctcctcctgtaatgtgagtcaaggaagctctcagctaagtgaactagaccagtatcacgaacaagatgacgaccatcgggagacggactcgattcattcttgccacagctctcacagcctgtccagagatggccaagcaggttttggagaacaagagaaacccttggaggtgacaggtcaagcagagaaggaggcagcatgtgaacccaaggagatgaaagaagatgccacaacccaccctcccccagatctggtgctgcaaaaagaccacttcctaggtccccaggagagttttcctgaggagaatgcatcttcaccatttacccaagccagagcacattggatccgagcagttaccaaggttcgactccagctgcaggagattccagatgatggtgacccctctctgcctcagtggctcccggaagggccagccggagggctctatggcattgacagcatgccagatttacgcagaaagaagccactgccacttgtcagtgatctgtcactggtccagtctcggaaggcaggaatcacttctgcaatggctacacgcacttctcttaaggacgaagagctgaaatcccacgtgtataagaaaaccctgcaggccttaatctaccccatttcgtgcaccactcctcataactttgaggtctggacggccactaccccaacctactgctatgagtgtgaaggcctgctctggggcattgcccggcagggcatgcgctgcagcgaatgtggagtcaagtgccatgagaagtgccaggatctgctcaatgctgactgcctgcagcgggctgcagaaaagagctgtaaacatggagctgaggaccggacccagaacattatcatggccatgaaggaccgcatgaagatccgagagcgaaataagccagagatctttgaagttatccgggacgtcttcacagtgaacaaagctgcccatgtgcagcagatgaaaacagtgaagcagagtgtactggatggcacctccaaatggtcagccaagatcaccattactgtggtgtgtgcccagggcctacaagccaaggacaaaacaggatccagtgacccttacgtgactgtgcaagtcagcaaaactaagaagcgtaccaagaccatttttggaaacttgaatcctgtttgggaggagaagttccattttgagtgccacaactcctctgaccgcattaaggtgcgtgtatgggatgaggatgatgacatcaagtcaagagtaaagcaacgcctaaagcgagagtctgatgatttccttggccaaaccatcattgaggttcggaccctaagtggcgagatggacgtctggtacaacttggagaagaggacagacaaatcagccgtctcaggggctatccgactacaaatcagtgtggagatcaagggggaggagaaagtagccccataccacgtgcagtatacatgtctccatgagaatcttttccattacctcacagacattcagggcagtggaggagtccgcatccctgaagctcgaggagacgatgcctggaaggtgtactttgatgagacagcccaagaaattgtggatgaatttgccatgcgttatggcattgagtccatatatcaggccatgacgcactttgcatgtttatcatccaagtacatgtgtcctggtgtgccagcagtgatgagcaccttactggccaacatcaacgcctactatgcccacacaactgcctctaccaatgtctctgcatctgatcgctttgcagcctccaactttgggaaagagagatttgtaaaactgctggaccagctacacaactcactgaggatcgacctctctacatacaggaataatttccctgctgggagtcctgaacggcttcaggacttaaaatccacagtggatttgctgaccagcattactttcttcagaatgaaggtacaagaactgcaaagccctccaagagccagccaggtggtaaaggattgtgtgaaggcctgtttgaactccacatatgaatatatcttcaacaactgccacgacttatacagccgccagtaccagctgaagcaggagctacctccagaggaacaagggcccagcattcggaacctggatttctggcccaagctcatcacactcatcgtgtcaatcatagaggaagataagaattcctacacacctgttctgaaccagtttcctcaggagttgaatgtgggaaaagtcagcgcagaagtgatgtggcatttgtttgcccaagacatgaaatatgcattggaggagcatgagaaagaccacctgtgtaaaagtgctgactacatgaacctgcacttcaaggtgaagtggctccacaatgaatacgtgcgggatctgcctgtcctccaggggcaggtgcctgagtacccagcgtggtttgagcagttcgtgctacaatggctggatgagaatgaggatgtatccctggaattcctgcgtggggccctggaacgagataagaaggatggattccagcagacatcagagcatgcactcttttcctgctctgtggtggatgtcttcacacaactcaatcagagctttgagatcatccggaagctggaatgcccagaccccagcatccttgcccactacatgaggaggtttgctaagaccatcgggaaggtgctgatgcagtatgcagacatcttgtcaaaggacttcccagcctattgcacaaaggagaaactgccctgcatcctgatgaacaacgtgcagcaactgagggtccagctggagaaaatgtttgaggccatgggaggcaaggagctggaccttgaagctgcagacagtctgaaggagctgcaggtgaaactgaatacggttctggatgagctcagcatggtgtttggaaacagtttccaggtacggattgatgagtgtgttcgacaaatggccgacatcctgggccaggttcggggcacagggaatgcatctccagacgccagggcctcagcggctcaggatgcagatagcgtactccggcctctcatggacttcctggatggcaacctcaccctctttgccactgtgtgtgagaagacggttctgaagcgtgtactgaaggagctctggcgcgtggtgatgaacacaatggagaggatgattgttctgcccccactcactgaccagacgggcacccagctgatcttcactgctgccaaggagctgagccatctttccaaactcaaggatcacatggtacgagaggaaacacggaatctcactccaaagcagtgtgcagtccttgacctcgccctggacaccatcaagcaatacttccatgcaggaggcaatgggctgaagaaaaccttcctggagaagagcccagatctgcagtctctacgctatgccctgtctctgtacacacagactactgacactctcatcaagacctttgtgcgctcgcagaccacccaagggtctggtgtggacgatcctgtgggagaagtctctattcaggtggacttgtttacacaccctggtactggggagcacaaggtcacagtgaaagtggtggctgccaatgacctcaagtggcagacagcgggtatgttccggcctttcgtggaggtgactatggttggcccacaccaaagtgataagaagaggaagttcacaaccaaatccaaaagcaacaactgggcccccaagtacaatgagacattccacttcctcctgggaaatgaggaggggcccgagtcctatgagttgcagatatgcgtgaaggattactgctttgcccgggaagatcgcgtgctagggctggctgtgatgcctctgagggatgtcacagccaagggcagctgtgcctgctggtgccccttgggccggaagatccatatggatgagacaggcctgaccattctccggattttatctcagaggagcaatgacgaggtggcccgagaatttgtgaaactcaaatcagagtctcgttccacggaggaggggagctgaacaccttcgactcctgtgccaatcaggcagcagcaatttcacaaatcagggccagtgggagttagctgtgtaaccggcttagggtctttgcagtcaagaggctgaccccttcagttaaagatatttaaggaaaaatttggggtggtgataatatggcttttcacagaaagggtcatgaagccctggcccaacaggactgtggtactaggggctgggatgtggggttaccacatggagagattttccattaagagagaaggacaaacatttctgagagtgtcagccattcttggtagacacctctccactcctcatcccacctctacccatctccatgccacaccttatccagttagacacatacataccaatcattagaagaacaagtttagaaggtgtggaacttgtgcctggctggctgggtagtcagctgagcctgttgctgagcccggtggtctggattggagtatggccagggcaggagtacacagaatagaatttagactgtcccttgagtagaatccactgattttctgtggctccagtgagaacaaggctttgaaactgaacaagataacttctagaaatgaactgtactaatccctttccccagattgtatcatgagtagaatcaggttcacgtggtgcttcaaagccctgagaagaatatttctttggaccccaggcactaggggccacctgcctgggagtctccctgcctcactcctctaggcaggggagtgatgcttcaggacgtgacaggctgttctaacatgtgtctacctgagggctagttgaaggatccaggagtattttcttcttgggtgggccctgaacaaagccaaaaattgtagaaaccagtctagaaaaagtcctgctcatctgtggccactgccttctagccgtcctccaccttgcagaaagaatctagcctttggtctctctctctctcatcggggtcatttgctattcccctctgatattcaaccctatagaaggagcctggactctgatccctctgtacaggctggatggaaggggccctccacacttcctgggaggtcagagacaaactgtttcagagagtcagatggacttcccaagacttgttgagagatgtgacatggttcttggatttcctctgtagcagcctcctggacttcctgaggactcgacattgtccacagatgtactggccattacatgaaacaagaaaccaagcatctttgctgttgttaattattatatgtgccattgttacaggagattataggctagtctgtaataaattatcttatagcagcc

SEQ ID NO: 6008 - protein, 1591 aa, Homo sapiens; identical to SEQ ID NO: 811

SEQ ID NO: 6009 - DNA, 6466 bp, Homo sapiens
gcgcggatcccgggtggaatgacgggagggagtcccggcagctcctacctcccagcgatggcgtcgctgtgccgcgcccagtccccagcctgccggccggtactcaccgctacccggagttcgctcagacggtgagatttggggcgggtccgaggcagcggcgggacgctacctgcgaccgggaccatgaggagctgccagacccgtggggccggtaacgagagcagtcgcggcacctgctgagaggaaagagggagcggtccggcgcggctggggcgcggcagaggcttgcccgatcctcggccatgtcactgctctgcgtgcgcgttaaaagggccaaattccagggttcaccagataaatttaacacatatgtgaccctgaaagtacagaatgtgaagagcacaactgtagcagttcgtggtgatcagccttcctgggaacaggatttcatgtttgagattagtcgcctggacctgggtctaagtgtggaggtatggaacaaaggactgatctgggacaccatggtggggactgtgtggattgcgctgaagactattcgtcagtcggatgaggaagggcctggggaatggtccacattagaggcagagacgttaatgaaagacgatgagatctgtggaactagaaacccaactcctcataaaattttgcttgatacaagatttgagttgccttttgatatcccagaggaggaagccagatattggacctacaaatgggagcaaatcaatgccttgggagctgacaatgagtattctagtcaagaagaaagccagaggaagccattgcccactgctgccgcccagtgttcttttgaagaccctgatagtgccgtcgatgaccgagatagtgactatcgcagtgagaccagcaacagcttcccacctccttaccatacagcttcccagcccaacgcttctgtgcaccagttccctgtgccggtgcgatcgccacagcagctgctacttcaaggcagttcccgggactcttgtaatgactctatgcaaagttatgaccttgattatccagagcggcgggctatcagccccaccagcagcagtaggtatggctcctcctgtaatgtgagtcaaggaagctctcagctaagtgaactagaccagtatcacgaacaagatgacgaccatcgggagacggactcgattcattcttgccacagctctcacagcctgtccagagatggccaagcaggttttggagaacaagagaaacccttggaggtgacaggtcaagcagagaaggaggcagcatgtgaacccaaggagatgaaagaagatgccacaacccaccctcccccagatctggtgctgcaaaaagaccacttcctaggtccccaggagagttttcctgaggagaatgcatcttcaccatttacccaagccagagcacattggatccgagcagttaccaaggttcgactccagctgcaggagaagaaaagcgaggagcccttcagattccagatgatggtgacccctctctgcctcagtggctcccggaagggccagccggagggctctatggcattgacagcatgccagatttacgcagaaagaagccactgccacttgtcagtgatctgtcactggtccagtctcggaaggcaggaatcacttctgcaatggctacacgcacttctcttaaggacgaagagctgaaatcccacgtgtataagaaaaccctgcaggccttaatctaccccatttcgtgcaccactcctcataactttgaggtctggacggccactaccccaacctactgctatgagtgtgaaggcctgctctggggcattgcccggcagggcatgcgctgcagcgaatgtggagtcaagtgccatgagaagtgccaggatctgctcaatgctgactgcctgcagcgggctgcagaaaagagctgtaaacatggagctgaggaccggacccagaacattatcatggccatgaaggaccgcatgaagatccgagagcgaaataagccagagatctttgaagttatccgggacgtcttcacagtgaacaaagctgcccatgtgcagcagatgaaaacagtgaagcagagtgtactggatggcacctccaaatggtcagccaagatcaccattactgtggtgtgtgcccagggcctacaagccaaggacaaaacaggatccagtgacccttacgtgactgtgcaagtcagcaaaactaagaagcgtaccaagaccatttttggaaacttgaatcctgtttgggaggagaagttccattttgagtgccacaactcctctgaccgcattaaggtgcgtgtatgggatgaggatgatgacatcaagtcaagagtaaagcaacgcctaaagcgagagtctgatgatttccttggccaaaccatcattgaggttcggaccctaagtggcgagatggacgtctggtacaacttggagaagaggacagacaaatcagccgtctcaggggctatccgactacaaatcagtgtggagatcaagggggaggagaaagtagccccataccacgtgcagtatacatgtctccatgagaatcttttccattacctcacagacattcagggcagtggaggagtccgcatccctgaagctcgaggagacgatgcctggaaggtgtactttgatgagacagcccaagaaattgtggatgaatttgccatgcgttatggcattgagtccatatatcaggccatgacgcactttgcatgtttatcatccaagtacatgtgtcctggtgtgccagcagtgatgagcaccttactggccaacatcaacgcctactatgcccacacaactgcctctaccaatgtctctgcatctgatcgctttgcagcctccaactttgggaaagagagatttgtaaaactgctggaccagctacacaactcactgaggatcgacctctctacatacaggaataatttccctgctgggagtcctgaacggcttcaggacttaaaatccacagtggatttgctgaccagcattactttcttcagaatgaaggtacaagaactgcaaagccctccaagagccagccaggtggtaaaggattgtgtgaaggcctgtttgaactccacatatgaatatatcttcaacaactgccacgacttatacagccgccagtaccagctgaagcaggagctacctccagaggaacaagggcccagcattcggaacctggatttctggcccaagctcatcacactcatcgtgtcaatcatagaggaagataagaattcctacacacctgttctgaaccagtttcctcaggagttgaatgtgggaaaagtcagcgcagaagtgatgtggcatttgtttgcccaagacatgaaatatgcattggaggagcatgagaaagaccacctgtgtaaaagtgctgactacatgaacctgcacttcaaggtgaagtggctccacaatgaatacgtgcgggatctgcctgtcctccaggggcaggtgcctgagtacccagcgtggtttgagcagttcgtgctacaatggctggatgagaatgaggatgtatccctggaattcctgcgtggggccctggaacgagataagaaggatggattccagcagacatcagagcatgcactcttttcctgctctgtggtggatgtcttcacacaactcaatcagagctttgagatcatccggaagctggaatgcccagaccccagcatccttgcccactacatgaggaggtttgctaagaccatcgggaaggtgctgatgcagtatgcagacatcttgtcaaaggacttcccagcctattgcacaaaggagaaactgccctgcatcctgatgaacaacgtgcagcaactgagggtccagctggagaaaatgtttgaggccatgggaggcaaggagctggaccttgaagctgcagacagtctgaaggagctgcaggtgaaactgaatacggttctggatgagctcagcatggtgtttggaaacagtttccaggtacggattgatgagtgtgttcgacaaatggccgacatcctgggccaggttcggggcacagggaatgcatctccagacgccagggcctcagcggctcaggatgcagatagcgtactccggcctctcatggacttcctggatggcaacctcaccctctttgccactgtgtgtgagaagacggttctgaagcgtgtactgaaggagctctggcgcgtggtgatgaacacaatggagaggatgattgttctgcccccactcactgaccagacgggcacccagctgatcttcactgctgccaaggagctgagccatctttccaaactcaaggatcacatggtacgagaggaaacacggaatctcactccaaagcagtgtgcagtccttgacctcgccctggacaccatcaagcaatacttccatgcaggaggcaatgggctgaagaaaaccttcctggagaagagcccagatctgcagtctctacgctatgccctgtctctgtacacacagactactgacactctcatcaagacctttgtgcgctcgcagaccacccaagtgcatgatgggaaaggtattagatttactgctaatgaggacattcgtccggaaaaggggtctggtgtggacgatcctgtgggagaagtctctattcaggtggacttgtttacacaccctggtactggggagcacaaggtcacagtgaaagtggtggctgccaatgacctcaagtggcagacagcgggtatgttccggcctttcgtggaggtgactatggttggcccacaccaaagtgataagaagaggaagttcacaaccaaatccaaaagcaacaactgggcccccaagtacaatgagacattccacttcctcctgggaaatgaggaggggcccgagtcctatgagttgcagatatgcgtgaaggattactgctttgcccgggaagatcgcgtgctagggctggctgtgatgcctctgagggatgtcacagccaagggcagctgtgcctgctggtgccccttgggccggaagatccatatggatgagacaggcctgaccattctccggattttatctcagaggagcaatgacgaggtggcccgagaatttgtgaaactcaaatcagagtctcgttccacggaggaggggagctgaacaccttcgactcctgtgccaatcaggcagcagcaatttcacaaatcagggccagtgggagttagctgtgtaaccggcttagggtctttgcagtcaagaggctgaccccttcagttaaagatatttaaggaaaaatttggggtggtgataatatggcttttcacagaaagggtcatgaagccctggcccaacaggactgtggtactaggggctgggatgtggggttaccacatggagagattttccattaagagagaaggacaaacatttctgagagtgtcagccattcttggtagacacctctccactcctcatcccacctctacccatctccatgccacaccttatccagttagacacatacataccaatcattagaagaacaagtttagaaggtgtggaacttgtgcctggctggctgggtagtcagctgagcctgttgctgagcccggtggtctggattggagtatggccagggcaggagtacacagaatagaatttagactgtcccttgagtagaatccactgattttctgtggctccagtgagaacaaggctttgaaactgaacaagataacttctagaaatgaactgtactaatccctttccccagattgtatcatgagtagaatcaggttcacgtggtgcttcaaagccctgagaagaatatttctttggaccccaggcactaggggccacctgcctgggagtctccctgcctcactcctctaggcaggggagtgatgcttcaggacgtgacaggctgttctaacatgtgtctacctgagggctagttgaaggatccaggagtattttcttcttgggtgggccctgaacaaagccaaaaattgtagaaaccagtctagaaaaagtcctgctcatctgtggccactgccttctagccgtcctccaccttgcagaaagaatctagcctttggtctctctctctctcatcggggtcatttgctattcccctctgatattcaaccctatagaaggagcctggactctgatccctctgtacaggctggatggaaggggccctccacacttcctgggaggtcagagacaaactgtttcagagagtcagatggacttcccaagacttgttgagagatgtgacatggttcttggatttcctctgtagcagcctcctggacttcctgaggactcgacattgtccacagatgtactggccattacatgaaacaagaaaccaagcatctttgctgttgttaattattatatgtgccattgttacaggagattataggctagtctgtaataaattatcttatagcagcc

SEQ ID NO: 6010 - protein, 1195 aa, Homo sapiens
MPDLRRKKPLPLVSDLSLVQSRKAGITSAMATRTSLKDEELKSHVYKKTLQALIYPISCTTPHNFEVWTATTPTYCYECEGLLWGIARQGMRCSECGVKCHEKCQDLLNADCLQRAAEKSCKHGAEDRTQNIIMAMKDRMKIRERNKPEIFEVIRDVFTVNKAAHVQQMKTVKQSVLDGTSKWSAKITITVVCAQGLQAKDKTGSSDPYVTVQVSKTKKRTKTIFGNLNPVWEEKFHFECHNSSDRIKVRVWDEDDDIKSRVKQRLKRESDDFLGQTIIEVRTLSGEMDVWYNLEKRTDKSAVSGAIRLQISVEIKGEEKVAPYHVQYTCLHENLFHYLTDIQGSGGVRIPEARGDDAWKVYFDETAQEIVDEFAMRYGIESIYQAMTHFACLSSKYMCPGVPAVMSTLLANINAYYAHTTASTNVSASDRFAASNFGKERFVKLLDQLHNSLRIDLSTYRNNFPAGSPERLQDLKSTVDLLTSITFFRMKVQELQSPPRASQVVKDCVKACLNSTYEYIFNNCHDLYSRQYQLKQELPPEEQGPSIRNLDFWPKLITLIVSIIEEDKNSYTPVLNQFPQELNVGKVSAEVMWHLFAQDMKYALEEHEKDHLCKSADYMNLHFKVKWLHNEYVRDLPVLQGQVPEYPAWFEQFVLQWLDENEDVSLEFLRGALERDKKDGFQQTSEHALFSCSVVDVFTQLNQSFEIIRKLECPDPSILAHYMRRFAKTIGKVLMQYADILSKDFPAYCTKEKLPCILMNNVQQLRVQLEKMFEAMGGKELDLEAADSLKELQVKLNTVLDELSMVFGNSFQVRIDECVRQMADILGQVRGTGNASPDARASAAQDADSVLRPLMDFLDGNLTLFATVCEKTVLKRVLKELWRVVMNTMERMIVLPPLTDQTGTQLIFTAAKELSHLSKLKDHMVREETRNLTPKQCAVLDLALDTIKQYFHAGGNGLKKTFLEKSPDLQSLRYALSLYTQTTDTLIKTFVRSQTTQVHDGKGIRFTANEDIRPEKGSGVDDPVGEVSIQVDLFTHPGTGEHKVTVKVVAANDLKWQTAGMFRPFVEVTMVGPHQSDKKRKFTTKSKSNNWAPKYNETFHFLLGNEEGPESYELQICVKDYCFAREDRVLGLAVMPLRDVTAKGSCACWCPLGRKIHMDETGLTILRILSQRSNDEVAREFVKLKSESRSTEEGS

SEQ ID NO: 6011 - DNA, 6443 bp, Homo sapiens
gcgcggatcccgggtggaatgacgggagggagtcccggcagctcctacctcccagcgatggcgtcgctgtgccgcgcccagtccccagcctgccggccggtactcaccgctacccggagttcgctcagacggtgagatttggggcgggtccgaggcagcggcgggacgctacctgcgaccgggaccatgaggagctgccagacccgtggggccggtaacgagagcagtcgcggcacctgctgagaggaaagagggagcggtccggcgcggctggggcgcggcagaggcttgcccgatcctcggccatgtcactgctctgcgtgcgcgttaaaagggccaaattccagggttcaccagataaatttaacacatatgtgaccctgaaagtacagaatgtgaagagcacaactgtagcagttcgtggtgatcagccttcctgggaacaggatttcatgtttgagattagtcgcctggacctgggtctaagtgtggaggtatggaacaaaggactgatctgggacaccatggtggggactgtgtggattgcgctgaagactattcgtcagtcggatgaggaagggcctggggaatggtccacattagaggcagagacgttaatgaaagacgatgagatctgtggaactagaaacccaactcctcataaaattttgcttgatacaagatttgagttgccttttgatatcccagaggaggaagccagatattggacctacaaatgggagcaaatcaatgccttgggagctgacaatgagtattctagtcaagaagaaagccagaggaagccattgcccactgctgccgcccagtgttcttttgaagaccctgatagtgccgtcgatgaccgagatagtgactatcgcagtgagaccagcaacagcttcccacctccttaccatacagcttcccagcccaacgcttctgtgcaccagttccctgtgccggtgcgatcgccacagcagctgctacttcaaggcagttcccgggactcttgtaatgactctatgcaaagttatgaccttgattatccagagcggcgggctatcagccccaccagcagcagtaggtatggctcctcctgtaatgtgagtcaaggaagctctcagctaagtgaactagaccagtatcacgaacaagatgacgaccatcgggagacggactcgattcattcttgccacagctctcacagcctgtccagagatggccaagcaggttttggagaacaagagaaacccttggaggtgacaggtcaagcagagaaggaggcagcatgtgaacccaaggagatgaaagaagatgccacaacccaccctcccccagatctggtgctgcaaaaagaccacttcctaggtccccaggagagttttcctgaggagaatgcatcttcaccatttacccaagccagagcacattggatccgagcagttaccaaggttcgactccagctgcaggagattccagatgatggtgacccctctctgcctcagtggctcccggaagggccagccggagggctctatggcattgacagcatgccagatttacgcagaaagaagccactgccacttgtcagtgatctgtcactggtccagtctcggaaggcaggaatcacttctgcaatggctacacgcacttctcttaaggacgaagagctgaaatcccacgtgtataagaaaaccctgcaggccttaatctaccccatttcgtgcaccactcctcataactttgaggtctggacggccactaccccaacctactgctatgagtgtgaaggcctgctctggggcattgcccggcagggcatgcgctgcagcgaatgtggagtcaagtgccatgagaagtgccaggatctgctcaatgctgactgcctgcagcgggctgcagaaaagagctgtaaacatggagctgaggaccggacccagaacattatcatggccatgaaggaccgcatgaagatccgagagcgaaataagccagagatctttgaagttatccgggacgtcttcacagtgaacaaagctgcccatgtgcagcagatgaaaacagtgaagcagagtgtactggatggcacctccaaatggtcagccaagatcaccattactgtggtgtgtgcccagggcctacaagccaaggacaaaacaggatccagtgacccttacgtgactgtgcaagtcagcaaaactaagaagcgtaccaagaccatttttggaaacttgaatcctgtttgggaggagaagttccattttgagtgccacaactcctctgaccgcattaaggtgcgtgtatgggatgaggatgatgacatcaagtcaagagtaaagcaacgcctaaagcgagagtctgatgatttccttggccaaaccatcattgaggttcggaccctaagtggcgagatggacgtctggtacaacttggagaagaggacagacaaatcagccgtctcaggggctatccgactacaaatcagtgtggagatcaagggggaggagaaagtagccccataccacgtgcagtatacatgtctccatgagaatcttttccattacctcacagacattcagggcagtggaggagtccgcatccctgaagctcgaggagacgatgcctggaaggtgtactttgatgagacagcccaagaaattgtggatgaatttgccatgcgttatggcattgagtccatatatcaggccatgacgcactttgcatgtttatcatccaagtacatgtgtcctggtgtgccagcagtgatgagcaccttactggccaacatcaacgcctactatgcccacacaactgcctctaccaatgtctctgcatctgatcgctttgcagcctccaactttgggaaagagagatttgtaaaactgctggaccagctacacaactcactgaggatcgacctctctacatacaggaataatttccctgctgggagtcctgaacggcttcaggacttaaaatccacagtggatttgctgaccagcattactttcttcagaatgaaggtacaagaactgcaaagccctccaagagccagccaggtggtaaaggattgtgtgaaggcctgtttgaactccacatatgaatatatcttcaacaactgccacgacttatacagccgccagtaccagctgaagcaggagctacctccagaggaacaagggcccagcattcggaacctggatttctggcccaagctcatcacactcatcgtgtcaatcatagaggaagataagaattcctacacacctgttctgaaccagtttcctcaggagttgaatgtgggaaaagtcagcgcagaagtgatgtggcatttgtttgcccaagacatgaaatatgcattggaggagcatgagaaagaccacctgtgtaaaagtgctgactacatgaacctgcacttcaaggtgaagtggctccacaatgaatacgtgcgggatctgcctgtcctccaggggcaggtgcctgagtacccagcgtggtttgagcagttcgtgctacaatggctggatgagaatgaggatgtatccctggaattcctgcgtggggccctggaacgagataagaaggatggattccagcagacatcagagcatgcactcttttcctgctctgtggtggatgtcttcacacaactcaatcagagctttgagatcatccggaagctggaatgcccagaccccagcatccttgcccactacatgaggaggtttgctaagaccatcgggaaggtgctgatgcagtatgcagacatcttgtcaaaggacttcccagcctattgcacaaaggagaaactgccctgcatcctgatgaacaacgtgcagcaactgagggtccagctggagaaaatgtttgaggccatgggaggcaaggagctggaccttgaagctgcagacagtctgaaggagctgcaggtgaaactgaatacggttctggatgagctcagcatggtgtttggaaacagtttccaggtacggattgatgagtgtgttcgacaaatggccgacatcctgggccaggttcggggcacagggaatgcatctccagacgccagggcctcagcggctcaggatgcagatagcgtactccggcctctcatggacttcctggatggcaacctcaccctctttgccactgtgtgtgagaagacggttctgaagcgtgtactgaaggagctctggcgcgtggtgatgaacacaatggagaggatgattgttctgcccccactcactgaccagacgggcacccagctgatcttcactgctgccaaggagctgagccatctttccaaactcaaggatcacatggtacgagaggaaacacggaatctcactccaaagcagtgtgcagtccttgacctcgccctggacaccatcaagcaatacttccatgcaggaggcaatgggctgaagaaaaccttcctggagaagagcccagatctgcagtctctacgctatgccctgtctctgtacacacagactactgacactctcatcaagacctttgtgcgctcgcagaccacccaagtgcatgatgggaaaggtattagatttactgctaatgaggacattcgtccggaaaaggggtctggtgtggacgatcctgtgggagaagtctctattcaggtggacttgtttacacaccctggtactggggagcacaaggtcacagtgaaagtggtggctgccaatgacctcaagtggcagacagcgggtatgttccggcctttcgtggaggtgactatggttggcccacaccaaagtgataagaagaggaagttcacaaccaaatccaaaagcaacaactgggcccccaagtacaatgagacattccacttcctcctgggaaatgaggaggggcccgagtcctatgagttgcagatatgcgtgaaggattactgctttgcccgggaagatcgcgtgctagggctggctgtgatgcctctgagggatgtcacagccaagggcagctgtgcctgctggtgccccttgggccggaagatccatatggatgagacaggcctgaccattctccggattttatctcagaggagcaatgacgaggtggcccgagaatttgtgaaactcaaatcagagtctcgttccacggaggaggggagctgaacaccttcgactcctgtgccaatcaggcagcagcaatttcacaaatcagggccagtgggagttagctgtgtaaccggcttagggtctttgcagtcaagaggctgaccccttcagttaaagatatttaaggaaaaatttggggtggtgataatatggcttttcacagaaagggtcatgaagccctggcccaacaggactgtggtactaggggctgggatgtggggttaccacatggagagattttccattaagagagaaggacaaacatttctgagagtgtcagccattcttggtagacacctctccactcctcatcccacctctacccatctccatgccacaccttatccagttagacacatacataccaatcattagaagaacaagtttagaaggtgtggaacttgtgcctggctggctgggtagtcagctgagcctgttgctgagcccggtggtctggattggagtatggccagggcaggagtacacagaatagaatttagactgtcccttgagtagaatccactgattttctgtggctccagtgagaacaaggctttgaaactgaacaagataacttctagaaatgaactgtactaatccctttccccagattgtatcatgagtagaatcaggttcacgtggtgcttcaaagccctgagaagaatatttctttggaccccaggcactaggggccacctgcctgggagtctccctgcctcactcctctaggcaggggagtgatgcttcaggacgtgacaggctgttctaacatgtgtctacctgagggctagttgaaggatccaggagtattttcttcttgggtgggccctgaacaaagccaaaaattgtagaaaccagtctagaaaaagtcctgctcatctgtggccactgccttctagccgtcctccaccttgcagaaagaatctagcctttggtctctctctctctcatcggggtcatttgctattcccctctgatattcaaccctatagaaggagcctggactctgatccctctgtacaggctggatggaaggggccctccacacttcctgggaggtcagagacaaactgtttcagagagtcagatggacttcccaagacttgttgagagatgtgacatggttcttggatttcctctgtagcagcctcctggacttcctgaggactcgacattgtccacagatgtactggccattacatgaaacaagaaaccaagcatctttgctgttgttaattattatatgtgccattgttacaggagattataggctagtctgtaataaattatcttatagcagcc

SEQ ID NO: 6012 - protein, 1610 aa, Homo sapiens
MSLLCVRVKRAKFQGSPDKFNTYVTLKVQNVKSTTVAVRGDQPSWEQDFMFEISRLDLGLSVEVWNKGLIWDTMVGTVWIALKTIRQSDEEGPGEWSTLEAETLMKDDEICGTRNPTPHKILLDTRFELPFDIPEEEARYWTYKWEQINALGADNEYSSQEESQRKPLPTAAAQCSFEDPDSAVDDRDSDYRSETSNSFPPPYHTASQPNASVHQFPVPVRSPQQLLLQGSSRDSCNDSMQSYDLDYPERRAISPTSSSRYGSSCNVSQGSSQLSELDQYHEQDDDHRETDSIHSCHSSHSLSRDGQAGFGEQEKPLEVTGQAEKEAACEPKEMKEDATTHPPPDLVLQKDHFLGPQESFPEENASSPFTQARAHWIRAVTKVRLQLQEIPDDGDPSLPQWLPEGPAGGLYGIDSMPDLRRKKPLPLVSDLSLVQSRKAGITSAMATRTSLKDEELKSHVYKKTLQALIYPISCTTPHNFEVWTATTPTYCYECEGLLWGIARQGMRCSECGVKCHEKCQDLLNADCLQRAAEKSCKHGAEDRTQNIIMAMKDRMKIRERNKPEIFEVIRDVFTVNKAAHVQQMKTVKQSVLDGTSKWSAKITITVVCAQGLQAKDKTGSSDPYVTVQVSKTKKRTKTIFGNLNPVWEEKFHFECHNSSDRIKVRVWDEDDDIKSRVKQRLKRESDDFLGQTIIEVRTLSGEMDVWYNLEKRTDKSAVSGAIRLQISVEIKGEEKVAPYHVQYTCLHENLFHYLTDIQGSGGVRIPEARGDDAWKVYFDETAQEIVDEFAMRYGIESIYQAMTHFACLSSKYMCPGVPAVMSTLLANINAYYAHTTASTNVSASDRFAASNFGKERFVKLLDQLHNSLRIDLSTYRNNFPAGSPERLQDLKSTVDLLTSITFFRMKVQELQSPPRASQVVKDCVKACLNSTYEYIFNNCHDLYSRQYQLKQELPPEEQGPSIRNLDFWPKLITLIVSIIEEDKNSYTPVLNQFPQELNVGKVSAEVMWHLFAQDMKYALEEHEKDHLCKSADYMNLHFKVKWLHNEYVRDLPVLQGQVPEYPAWFEQFVLQWLDENEDVSLEFLRGALERDKKDGFQQTSEHALFSCSVVDVFTQLNQSFEIIRKLECPDPSILAHYMRRFAKTIGKVLMQYADILSKDFPAYCTKEKLPCILMNNVQQLRVQLEKMFEAMGGKELDLEAADSLKELQVKLNTVLDELSMVFGNSFQVRIDECVRQMADILGQVRGTGNASPDARASAAQDADSVLRPLMDFLDGNLTLFATVCEKTVLKRVLKELWRVVMNTMERMIVLPPLTDQTGTQLIFTAAKELSHLSKLKDHMVREETRNLTPKQCAVLDLALDTIKQYFHAGGNGLKKTFLEKSPDLQSLRYALSLYTQTTDTLIKTFVRSQTTQVHDGKGIRFTANEDIRPEKGSGVDDPVGEVSIQVDLFTHPGTGEHKVTVKVVAANDLKWQTAGMFRPFVEVTMVGPHQSDKKRKFTTKSKSNNWAPKYNETFHFLLGNEEGPESYELQICVKDYCFAREDRVLGLAVMPLRDVTAKGSCACWCPLGRKIHMDETGLTILRILSQRSNDEVAREFVKLKSESRSTEEGS

SEQ ID NO: 6013 - DNA, 6585 bp, Homo sapiens
gcgcggatcccgggtggaatgacgggagggagtcccggcagctcctacctcccagcgatggcgtcgctgtgccgcgcccagtccccagcctgccggccggtactcaccgctacccggagttcgctcagacggtgagatttggggcgggtccgaggcagcggcgggacgctacctgcgaccgggaccatgaggagctgccagacccgtggggccggtaacgagagcagtcgcggcacctgctgagaggaaagagggagcggtccggcgcggctggggcgcggcagaggcttgcccgatcctcggccatgtcactgctctgcgtgcgcgttaaaagggccaaattccagggttcaccagataaatttaacacatatgtgaccctgaaagtacagaatgtgaagagcacaactgtagcagttcgtggtgatcagccttcctgggaacaggatttcatgtttgagattagtcgcctggacctgggtctaagtgtggaggtatggaacaaaggactgatctgggacaccatggtggggactgtgtggattgcgctgaagactattcgtcagtcggatgaggaagggcctggggaatggtccacattagaggcagagacgttaatgaaagacgatgagatctgtggaactagaaacccaactcctcataaaattttgcttgatacaagatttgagttgccttttgatatcccagaggaggaagccagatattggacctacaaatgggagcaaatcaatgccttgggagctgacaatgagtattctagtcaagaagaaagccagaggaagccattgcccactgctgccgcccagtgttcttttgaagaccctgatagtgccgtcgatgaccgagatagtgactatcgcagtgagaccagcaacagcttcccacctccttaccatacagcttcccagcccaacgcttctgtgcaccagttccctgtgccggtgcgatcgccacagcagctgctacttcaaggcagttcccgggactcttgtaatgactctatgcaaagttatgaccttgattatccagagcggcgggctatcagccccaccagcagcagtaggtatggctcctcctgtaatgtgagtcaaggaagctctcagctaagtgaactagaccagtatcacgaacaagatgacgaccatcgggagacggactcgattcattcttgccacagctctcacagcctgtccagagatggccaagcaggttttggagaacaagagaaacccttggaggtgacaggtcaagcagagaaggaggcagcatgtgaacccaaggagatgaaagaagatgccacaacccaccctcccccagatctggtgctgcaaaaagaccacttcctaggtccccaggagagttttcctgaggagaatgcatcttcaccatttacccaagccagagcacattggatccgagcagttaccaaggttcgactccagctgcaggagaagaaaagcgaggagcccttcagattccagatgatggtgacccctctctgcctcagtggctcccggaagggccagccggagggctctatggcattgacagcatgccagatttacgcagaaagaagccactgccacttgtcagtgatctgtcactggtccagtctcggaaggcaggaatcacttctgcaatggctacacgcacttctcttaaggacgaagagctgaaatcccacgtgtataagaaaaccctgcaggccttaatctaccccatttcgtgcaccactcctcataactttgaggtctggacggccactaccccaacctactgctatgagtgtgaaggcctgctctggggcattgcccggcagggcatgcgctgcagcgaatgtggagtcaagtgccatgagaagtgccaggatctgctcaatgctgactgcctgcagcgggctgcagaaaagagctgtaaacatggagctgaggaccggacccagaacattatcatggccatgaaggaccgcatgaagatccgagagcgaaataagccagagatctttgaagttatccgggacgtcttcacagtgaacaaagctgcccatgtgcagcagatgaaaacagtgaagcagagtgtactggatggcacctccaaatggtcagccaagatcaccattactgtggtgtgtgcccagggcctacaagccaaggacaaaacaggatccagtgacccttacgtgactgtgcaagtcagcaaaactaagaagcgtaccaagaccatttttggaaacttgaatcctgtttgggaggagaagttccattttgagtgccacaactcctctgaccgcattaaggtgcgtgtatgggatgaggatgatgacatcaagtcaagagtaaagcaacgcctaaagcgagagtctgatgatttccttggccaaaccatcattgaggttcggaccctaagtggcgagatggacgtctggtacaacttggagaagaggacagacaaatcagccgtctcaggggctatccgactacaaatcagtgtggagatcaagggggaggagaaagtagccccataccacgtgcagtatacatgtctccatgagaatcttttccattacctcacagacattcagggcagtggaggagtccgcatccctgaagctcgaggagacgatgcctggaaggtgtactttgatgagacagcccaagaaattgtggatgaatttgccatgcgttatggcattgagtccatatatcaggccatgacgcactttgcatgtttatcatccaagtacatgtgtcctggtgtgccagcagtgatgagcaccttactggccaacatcaacgcctactatgcccacacaactgcctctaccaatgtctctgcatctgatcgctttgcagcctccaactttgggaaagagagatttgtaaaactgctggaccagctacacaactcactgaggatcgacctctctacatacaggaataatttccctgctgggagtcctgaacggcttcaggacttaaaatccacagtggatttgctgaccagcattactttcttcagaatgaaggtacaagaactgcaaagccctccaagagccagccaggtggtaaaggattgtgtgaaggcctgtttgaactccacatatgaatatatcttcaacaactgccacgacttatacagccgccagtaccagctgaagcaggagctacctccagaggaacaagggcccagcattcggaacctggatttctggcccaagctcatcacactcatcgtgtcaatcatagaggaagataagaattcctacacacctgttctgaaccagtttcctcaggagttgaatgtgggaaaagtcagcgcagaagtgatgtggcatttgtttgcccaagacatgaaatatgcattggaggagcatgagaaagaccacctgtgtaaaagtgctgactacatgaacctgcacttcaaggtgaagtggctccacaatgaatacgtgcgggatctgcctgtcctccaggggcaggtgcctgagtacccagcgtggtttgagcagttcgtgctacaatggctggatgagaatgaggatgtatccctggaattcctgcgtggggccctggaacgagataagaaggatggattccagcagacatcagagcatgcactcttttcctgctctgtggtggatgtcttcacacaactcaatcagagctttgagatcatccggaagctggaatgcccagaccccagcatccttgcccactacatgaggaggtttgctaagaccatcgggaaggtgctgatgcagtatgcagacatcttgtcaaaggacttcccagcctattgcacaaaggagaaactgccctgcatcctgatgaacaacgtgcagcaactgagggtccagctggagaaaatgtttgaggccatgggaggcaaggagctggaccttgaagctgcagacagtctgaaggagctgcaggtgaaactgaatacggttctggatgagctcagcatggtgtttggaaacagtttccaggtacggattgatgagtgtgttcgacaaatggccgacatcctgggccaggttcggggcacagggaatgcatctccagacgccagggcctcagcggctcaggatgcagatagcgtactccggcctctcatggacttcctggatggcaacctcaccctctttgccactgtgtgtgagaagacggttctgaagcgtgtactgaaggagctctggcgcgtggtgatgaacacaatggagaggatgattgttctgcccccactcactgaccagacgggcacccagctgatcttcactgctgccaaggagctgagccatctttccaaactcaaggatcacatggtacgagaggaaacacggaatctcactccaaagcagtgtgcagtccttgacctcgccctggacaccatcaagcaatacttccatgcaggaggcaatgggctgaagaaaaccttcctggagaagagcccagatctgcagtctctacgctatgccctgtctctgtacacacagactactgacactctcatcaagacctttgtgcgctcgcagaccacccaagtgcatgatgggaaaggtattagatttactgctaatgaggacattcgtccggaaaaggggtctggtgtggacgatcctgtgggagaagtctctattcaggtggacttgtttacacaccctggtactggggagcacaaggtcacagtgaaagtggtggctgccaatgacctcaagtggcagacagcgggtatgttccggcctttcgtggaggtgactatggttggcccacaccaaagtgataagaagaggaagttcacaaccaaatccaaaagcaacaactgggcccccaagtacaatgagacattccacttcctcctgggaaatgaggaggggcccgagtcctatgagttgcagatatgcgtgaaggattactgctttgcccgggaagatcgcgtgctagggctggctgtgatgcctctgagggatgtcacagccaagggcagctgtgcctgctggtgccccttgggccggaagatccatatggatgagacaggcctgaccattctccggattttatctcagaggagcaatgacgaggtggcccgagaatttgtgaaactcaaatcagagtctcgttccacggaggaggggagctgaacaccttcgactcctgtgccaatcaggcagcagcaatttcacaaatcagggccagtgggagttagctgtgtaaccggcttagggtctttgcagtcaagaggctgaccccttcagttaaagatatttaaggaaaaatttggggtggtgataatatggcttttcacagaaagggtcatgaagccctggcccaacaggactgtggtactaggggctgggatgtggggttaccacatggagagattttccattaagagagaaggacaaacatttctgagagtgtcagccattcttggtagacacctctccactcctcatcccacctctacccatctccatgccacaccttatccagttagacacatacataccaatcattagaagaacaagtttagaaggtgtggaacttgtgcctggctggctgggtagtcagctgagcctgttgctgagcccggtggtctggattggagtatggccagggcaggagtacacagaatagaatttagactgtcccttgagtagaatccactgattttctgtggctccagtgagaacaaggctttgaaactgaacaagataacttctagaaatgaactgtactaatccctttccccagattgtatcatgagtagaatcaggttcacgtggtgcttcaaagccctgagaagaatatttctttggaccccaggcactaggggccacctgcctgggagtctccctgcctcactcctctaggcaggggagtgatgcttcaggacgtgacaggctgttctaacatgtgtctacctgagggctagttgaaggatccaggagtattttcttcttgggtgggccctgaacaaagccaaaaattgtagaaaccagtctagaaaaagtcctgctcatctgtggccactgccttctagccgtcctccaccttgcagaaagaatctagcctttggtctctctctctctcatcggggtcatttgctattcccctctgatattcaaccctatagaaggagcctggactctgatccctctgtacaggctggatggaaggggccctccacacttcctgggaggtcagagacaaactgtttcagagagtcagatggacttcccaagacttgttgagagatgtgacatggttcttggatttcctctgtagcagcctcctggacttcctgaggactcgacattgtccacagatgtactggccattacatgaaacaagaaaccaagcatctttgctgttgttaattattatatgtgccattgttacaggagattataggctagtctgtaataaattatcttatagcagcctttggggtttggtaattctgctaatgtgtggaaagccatggaaatgactgtcctttataatggtagattttggcctaatggtcctttgctgcttcacactcctccacccccatacctga

SEQ ID NO: 6014 - protein, 1195 aa, Homo sapiens; identical to SEQ ID NO: 6010

SEQ ID NO: 6015 - DNA, 6562 bp, Homo sapiens
gcgcggatcccgggtggaatgacgggagggagtcccggcagctcctacctcccagcgatggcgtcgctgtgccgcgcccagtccccagcctgccggccggtactcaccgctacccggagttcgctcagacggtgagatttggggcgggtccgaggcagcggcgggacgctacctgcgaccgggaccatgaggagctgccagacccgtggggccggtaacgagagcagtcgcggcacctgctgagaggaaagagggagcggtccggcgcggctggggcgcggcagaggcttgcccgatcctcggccatgtcactgctctgcgtgcgcgttaaaagggccaaattccagggttcaccagataaatttaacacatatgtgaccctgaaagtacagaatgtgaagagcacaactgtagcagttcgtggtgatcagccttcctgggaacaggatttcatgtttgagattagtcgcctggacctgggtctaagtgtggaggtatggaacaaaggactgatctgggacaccatggtggggactgtgtggattgcgctgaagactattcgtcagtcggatgaggaagggcctggggaatggtccacattagaggcagagacgttaatgaaagacgatgagatctgtggaactagaaacccaactcctcataaaattttgcttgatacaagatttgagttgccttttgatatcccagaggaggaagccagatattggacctacaaatgggagcaaatcaatgccttgggagctgacaatgagtattctagtcaagaagaaagccagaggaagccattgcccactgctgccgcccagtgttcttttgaagaccctgatagtgccgtcgatgaccgagatagtgactatcgcagtgagaccagcaacagcttcccacctccttaccatacagcttcccagcccaacgcttctgtgcaccagttccctgtgccggtgcgatcgccacagcagctgctacttcaaggcagttcccgggactcttgtaatgactctatgcaaagttatgaccttgattatccagagcggcgggctatcagccccaccagcagcagtaggtatggctcctcctgtaatgtgagtcaaggaagctctcagctaagtgaactagaccagtatcacgaacaagatgacgaccatcgggagacggactcgattcattcttgccacagctctcacagcctgtccagagatggccaagcaggttttggagaacaagagaaacccttggaggtgacaggtcaagcagagaaggaggcagcatgtgaacccaaggagatgaaagaagatgccacaacccaccctcccccagatctggtgctgcaaaaagaccacttcctaggtccccaggagagttttcctgaggagaatgcatcttcaccatttacccaagccagagcacattggatccgagcagttaccaaggttcgactccagctgcaggagattccagatgatggtgacccctctctgcctcagtggctcccggaagggccagccggagggctctatggcattgacagcatgccagatttacgcagaaagaagccactgccacttgtcagtgatctgtcactggtccagtctcggaaggcaggaatcacttctgcaatggctacacgcacttctcttaaggacgaagagctgaaatcccacgtgtataagaaaaccctgcaggccttaatctaccccatttcgtgcaccactcctcataactttgaggtctggacggccactaccccaacctactgctatgagtgtgaaggcctgctctggggcattgcccggcagggcatgcgctgcagcgaatgtggagtcaagtgccatgagaagtgccaggatctgctcaatgctgactgcctgcagcgggctgcagaaaagagctgtaaacatggagctgaggaccggacccagaacattatcatggccatgaaggaccgcatgaagatccgagagcgaaataagccagagatctttgaagttatccgggacgtcttcacagtgaacaaagctgcccatgtgcagcagatgaaaacagtgaagcagagtgtactggatggcacctccaaatggtcagccaagatcaccattactgtggtgtgtgcccagggcctacaagccaaggacaaaacaggatccagtgacccttacgtgactgtgcaagtcagcaaaactaagaagcgtaccaagaccatttttggaaacttgaatcctgtttgggaggagaagttccattttgagtgccacaactcctctgaccgcattaaggtgcgtgtatgggatgaggatgatgacatcaagtcaagagtaaagcaacgcctaaagcgagagtctgatgatttccttggccaaaccatcattgaggttcggaccctaagtggcgagatggacgtctggtacaacttggagaagaggacagacaaatcagccgtctcaggggctatccgactacaaatcagtgtggagatcaagggggaggagaaagtagccccataccacgtgcagtatacatgtctccatgagaatcttttccattacctcacagacattcagggcagtggaggagtccgcatccctgaagctcgaggagacgatgcctggaaggtgtactttgatgagacagcccaagaaattgtggatgaatttgccatgcgttatggcattgagtccatatatcaggccatgacgcactttgcatgtttatcatccaagtacatgtgtcctggtgtgccagcagtgatgagcaccttactggccaacatcaacgcctactatgcccacacaactgcctctaccaatgtctctgcatctgatcgctttgcagcctccaactttgggaaagagagatttgtaaaactgctggaccagctacacaactcactgaggatcgacctctctacatacaggaataatttccctgctgggagtcctgaacggcttcaggacttaaaatccacagtggatttgctgaccagcattactttcttcagaatgaaggtacaagaactgcaaagccctccaagagccagccaggtggtaaaggattgtgtgaaggcctgtttgaactccacatatgaatatatcttcaacaactgccacgacttatacagccgccagtaccagctgaagcaggagctacctccagaggaacaagggcccagcattcggaacctggatttctggcccaagctcatcacactcatcgtgtcaatcatagaggaagataagaattcctacacacctgttctgaaccagtttcctcaggagttgaatgtgggaaaagtcagcgcagaagtgatgtggcatttgtttgcccaagacatgaaatatgcattggaggagcatgagaaagaccacctgtgtaaaagtgctgactacatgaacctgcacttcaaggtgaagtggctccacaatgaatacgtgcgggatctgcctgtcctccaggggcaggtgcctgagtacccagcgtggtttgagcagttcgtgctacaatggctggatgagaatgaggatgtatccctggaattcctgcgtggggccctggaacgagataagaaggatggattccagcagacatcagagcatgcactcttttcctgctctgtggtggatgtcttcacacaactcaatcagagctttgagatcatccggaagctggaatgcccagaccccagcatccttgcccactacatgaggaggtttgctaagaccatcgggaaggtgctgatgcagtatgcagacatcttgtcaaaggacttcccagcctattgcacaaaggagaaactgccctgcatcctgatgaacaacgtgcagcaactgagggtccagctggagaaaatgtttgaggccatgggaggcaaggagctggaccttgaagctgcagacagtctgaaggagctgcaggtgaaactgaatacggttctggatgagctcagcatggtgtttggaaacagtttccaggtacggattgatgagtgtgttcgacaaatggccgacatcctgggccaggttcggggcacagggaatgcatctccagacgccagggcctcagcggctcaggatgcagatagcgtactccggcctctcatggacttcctggatggcaacctcaccctctttgccactgtgtgtgagaagacggttctgaagcgtgtactgaaggagctctggcgcgtggtgatgaacacaatggagaggatgattgttctgcccccactcactgaccagacgggcacccagctgatcttcactgctgccaaggagctgagccatctttccaaactcaaggatcacatggtacgagaggaaacacggaatctcactccaaagcagtgtgcagtccttgacctcgccctggacaccatcaagcaatacttccatgcaggaggcaatgggctgaagaaaaccttcctggagaagagcccagatctgcagtctctacgctatgccctgtctctgtacacacagactactgacactctcatcaagacctttgtgcgctcgcagaccacccaagtgcatgatgggaaaggtattagatttactgctaatgaggacattcgtccggaaaaggggtctggtgtggacgatcctgtgggagaagtctctattcaggtggacttgtttacacaccctggtactggggagcacaaggtcacagtgaaagtggtggctgccaatgacctcaagtggcagacagcgggtatgttccggcctttcgtggaggtgactatggttggcccacaccaaagtgataagaagaggaagttcacaaccaaatccaaaagcaacaactgggcccccaagtacaatgagacattccacttcctcctgggaaatgaggaggggcccgagtcctatgagttgcagatatgcgtgaaggattactgctttgcccgggaagatcgcgtgctagggctggctgtgatgcctctgagggatgtcacagccaagggcagctgtgcctgctggtgccccttgggccggaagatccatatggatgagacaggcctgaccattctccggattttatctcagaggagcaatgacgaggtggcccgagaatttgtgaaactcaaatcagagtctcgttccacggaggaggggagctgaacaccttcgactcctgtgccaatcaggcagcagcaatttcacaaatcagggccagtgggagttagctgtgtaaccggcttagggtctttgcagtcaagaggctgaccccttcagttaaagatatttaaggaaaaatttggggtggtgataatatggcttttcacagaaagggtcatgaagccctggcccaacaggactgtggtactaggggctgggatgtggggttaccacatggagagattttccattaagagagaaggacaaacatttctgagagtgtcagccattcttggtagacacctctccactcctcatcccacctctacccatctccatgccacaccttatccagttagacacatacataccaatcattagaagaacaagtttagaaggtgtggaacttgtgcctggctggctgggtagtcagctgagcctgttgctgagcccggtggtctggattggagtatggccagggcaggagtacacagaatagaatttagactgtcccttgagtagaatccactgattttctgtggctccagtgagaacaaggctttgaaactgaacaagataacttctagaaatgaactgtactaatccctttccccagattgtatcatgagtagaatcaggttcacgtggtgcttcaaagccctgagaagaatatttctttggaccccaggcactaggggccacctgcctgggagtctccctgcctcactcctctaggcaggggagtgatgcttcaggacgtgacaggctgttctaacatgtgtctacctgagggctagttgaaggatccaggagtattttcttcttgggtgggccctgaacaaagccaaaaattgtagaaaccagtctagaaaaagtcctgctcatctgtggccactgccttctagccgtcctccaccttgcagaaagaatctagcctttggtctctctctctctcatcggggtcatttgctattcccctctgatattcaaccctatagaaggagcctggactctgatccctctgtacaggctggatggaaggggccctccacacttcctgggaggtcagagacaaactgtttcagagagtcagatggacttcccaagacttgttgagagatgtgacatggttcttggatttcctctgtagcagcctcctggacttcctgaggactcgacattgtccacagatgtactggccattacatgaaacaagaaaccaagcatctttgctgttgttaattattatatgtgccattgttacaggagattataggctagtctgtaataaattatcttatagcagcctttggggtttggtaattctgctaatgtgtggaaagccatggaaatgactgtcctttataatggtagattttggcctaatggtcctttgctgcttcacactcctccacccccatacctga

SEQ ID NO: 6016 - protein, 1610 aa, Homo sapiens; identical to SEQ ID NO: 6012

SEQ ID NO: 6017 - DNA, 6505 bp, Homo sapiens
gcgcggatcccgggtggaatgacgggagggagtcccggcagctcctacctcccagcgatggcgtcgctgtgccgcgcccagtccccagcctgccggccggtactcaccgctacccggagttcgctcagacggtgagatttggggcgggtccgaggcagcggcgggacgctacctgcgaccgggaccatgaggagctgccagacccgtggggccggtaacgagagcagtcgcggcacctgctgagaggaaagagggagcggtccggcgcggctggggcgcggcagaggcttgcccgatcctcggccatgtcactgctctgcgtgcgcgttaaaagggccaaattccagggttcaccagataaatttaacacatatgtgaccctgaaagtacagaatgtgaagagcacaactgtagcagttcgtggtgatcagccttcctgggaacaggatttcatgtttgagattagtcgcctggacctgggtctaagtgtggaggtatggaacaaaggactgatctgggacaccatggtggggactgtgtggattgcgctgaagactattcgtcagtcggatgaggaagggcctggggaatggtccacattagaggcagagacgttaatgaaagacgatgagatctgtggaactagaaacccaactcctcataaaattttgcttgatacaagatttgagttgccttttgatatcccagaggaggaagccagatattggacctacaaatgggagcaaatcaatgccttgggagctgacaatgagtattctagtcaagaagaaagccagaggaagccattgcccactgctgccgcccagtgttcttttgaagaccctgatagtgccgtcgatgaccgagatagtgactatcgcagtgagaccagcaacagcttcccacctccttaccatacagcttcccagcccaacgcttctgtgcaccagttccctgtgccggtgcgatcgccacagcagctgctacttcaaggcagttcccgggactcttgtaatgactctatgcaaagttatgaccttgattatccagagcggcgggctatcagccccaccagcagcagtaggtatggctcctcctgtaatgtgagtcaaggaagctctcagctaagtgaactagaccagtatcacgaacaagatgacgaccatcgggagacggactcgattcattcttgccacagctctcacagcctgtccagagatggccaagcaggttttggagaacaagagaaacccttggaggtgacaggtcaagcagagaaggaggcagcatgtgaacccaaggagatgaaagaagatgccacaacccaccctcccccagatctggtgctgcaaaaagaccacttcctaggtccccaggagagttttcctgaggagaatgcatcttcaccatttacccaagccagagcacattggatccgagcagttaccaaggttcgactccagctgcaggagattccagatgatggtgacccctctctgcctcagtggctcccggaagggccagccggagggctctatggcattgacagcatgccagatttacgcagaaagaagccactgccacttgtcagtgatctgtcactggtccagtctcggaaggcaggaatcacttctgcaatggctacacgcacttctcttaaggacgaagagctgaaatcccacgtgtataagaaaaccctgcaggccttaatctaccccatttcgtgcaccactcctcataactttgaggtctggacggccactaccccaacctactgctatgagtgtgaaggcctgctctggggcattgcccggcagggcatgcgctgcagcgaatgtggagtcaagtgccatgagaagtgccaggatctgctcaatgctgactgcctgcagcgggctgcagaaaagagctgtaaacatggagctgaggaccggacccagaacattatcatggccatgaaggaccgcatgaagatccgagagcgaaataagccagagatctttgaagttatccgggacgtcttcacagtgaacaaagctgcccatgtgcagcagatgaaaacagtgaagcagagtgtactggatggcacctccaaatggtcagccaagatcaccattactgtggtgtgtgcccagggcctacaagccaaggacaaaacaggatccagtgacccttacgtgactgtgcaagtcagcaaaactaagaagcgtaccaagaccatttttggaaacttgaatcctgtttgggaggagaagttccattttgagtgccacaactcctctgaccgcattaaggtgcgtgtatgggatgaggatgatgacatcaagtcaagagtaaagcaacgcctaaagcgagagtctgatgatttccttggccaaaccatcattgaggttcggaccctaagtggcgagatggacgtctggtacaacttggagaagaggacagacaaatcagccgtctcaggggctatccgactacaaatcagtgtggagatcaagggggaggagaaagtagccccataccacgtgcagtatacatgtctccatgagaatcttttccattacctcacagacattcagggcagtggaggagtccgcatccctgaagctcgaggagacgatgcctggaaggtgtactttgatgagacagcccaagaaattgtggatgaatttgccatgcgttatggcattgagtccatatatcaggccatgacgcactttgcatgtttatcatccaagtacatgtgtcctggtgtgccagcagtgatgagcaccttactggccaacatcaacgcctactatgcccacacaactgcctctaccaatgtctctgcatctgatcgctttgcagcctccaactttgggaaagagagatttgtaaaactgctggaccagctacacaactcactgaggatcgacctctctacatacaggaataatttccctgctgggagtcctgaacggcttcaggacttaaaatccacagtggatttgctgaccagcattactttcttcagaatgaaggtacaagaactgcaaagccctccaagagccagccaggtggtaaaggattgtgtgaaggcctgtttgaactccacatatgaatatatcttcaacaactgccacgacttatacagccgccagtaccagctgaagcaggagctacctccagaggaacaagggcccagcattcggaacctggatttctggcccaagctcatcacactcatcgtgtcaatcatagaggaagataagaattcctacacacctgttctgaaccagtttcctcaggagttgaatgtgggaaaagtcagcgcagaagtgatgtggcatttgtttgcccaagacatgaaatatgcattggaggagcatgagaaagaccacctgtgtaaaagtgctgactacatgaacctgcacttcaaggtgaagtggctccacaatgaatacgtgcgggatctgcctgtcctccaggggcaggtgcctgagtacccagcgtggtttgagcagttcgtgctacaatggctggatgagaatgaggatgtatccctggaattcctgcgtggggccctggaacgagataagaaggatggattccagcagacatcagagcatgcactcttttcctgctctgtggtggatgtcttcacacaactcaatcagagctttgagatcatccggaagctggaatgcccagaccccagcatccttgcccactacatgaggaggtttgctaagaccatcgggaaggtgctgatgcagtatgcagacatcttgtcaaaggacttcccagcctattgcacaaaggagaaactgccctgcatcctgatgaacaacgtgcagcaactgagggtccagctggagaaaatgtttgaggccatgggaggcaaggagctggaccttgaagctgcagacagtctgaaggagctgcaggtgaaactgaatacggttctggatgagctcagcatggtgtttggaaacagtttccaggtacggattgatgagtgtgttcgacaaatggccgacatcctgggccaggttcggggcacagggaatgcatctccagacgccagggcctcagcggctcaggatgcagatagcgtactccggcctctcatggacttcctggatggcaacctcaccctctttgccactgtgtgtgagaagacggttctgaagcgtgtactgaaggagctctggcgcgtggtgatgaacacaatggagaggatgattgttctgcccccactcactgaccagacgggcacccagctgatcttcactgctgccaaggagctgagccatctttccaaactcaaggatcacatggtacgagaggaaacacggaatctcactccaaagcagtgtgcagtccttgacctcgccctggacaccatcaagcaatacttccatgcaggaggcaatgggctgaagaaaaccttcctggagaagagcccagatctgcagtctctacgctatgccctgtctctgtacacacagactactgacactctcatcaagacctttgtgcgctcgcagaccacccaagggtctggtgtggacgatcctgtgggagaagtctctattcaggtggacttgtttacacaccctggtactggggagcacaaggtcacagtgaaagtggtggctgccaatgacctcaagtggcagacagcgggtatgttccggcctttcgtggaggtgactatggttggcccacaccaaagtgataagaagaggaagttcacaaccaaatccaaaagcaacaactgggcccccaagtacaatgagacattccacttcctcctgggaaatgaggaggggcccgagtcctatgagttgcagatatgcgtgaaggattactgctttgcccgggaagatcgcgtgctagggctggctgtgatgcctctgagggatgtcacagccaagggcagctgtgcctgctggtgccccttgggccggaagatccatatggatgagacaggcctgaccattctccggattttatctcagaggagcaatgacgaggtggcccgagaatttgtgaaactcaaatcagagtctcgttccacggaggaggggagctgaacaccttcgactcctgtgccaatcaggcagcagcaatttcacaaatcagggccagtgggagttagctgtgtaaccggcttagggtctttgcagtcaagaggctgaccccttcagttaaagatatttaaggaaaaatttggggtggtgataatatggcttttcacagaaagggtcatgaagccctggcccaacaggactgtggtactaggggctgggatgtggggttaccacatggagagattttccattaagagagaaggacaaacatttctgagagtgtcagccattcttggtagacacctctccactcctcatcccacctctacccatctccatgccacaccttatccagttagacacatacataccaatcattagaagaacaagtttagaaggtgtggaacttgtgcctggctggctgggtagtcagctgagcctgttgctgagcccggtggtctggattggagtatggccagggcaggagtacacagaatagaatttagactgtcccttgagtagaatccactgattttctgtggctccagtgagaacaaggctttgaaactgaacaagataacttctagaaatgaactgtactaatccctttccccagattgtatcatgagtagaatcaggttcacgtggtgcttcaaagccctgagaagaatatttctttggaccccaggcactaggggccacctgcctgggagtctccctgcctcactcctctaggcaggggagtgatgcttcaggacgtgacaggctgttctaacatgtgtctacctgagggctagttgaaggatccaggagtattttcttcttgggtgggccctgaacaaagccaaaaattgtagaaaccagtctagaaaaagtcctgctcatctgtggccactgccttctagccgtcctccaccttgcagaaagaatctagcctttggtctctctctctctcatcggggtcatttgctattcccctctgatattcaaccctatagaaggagcctggactctgatccctctgtacaggctggatggaaggggccctccacacttcctgggaggtcagagacaaactgtttcagagagtcagatggacttcccaagacttgttgagagatgtgacatggttcttggatttcctctgtagcagcctcctggacttcctgaggactcgacattgtccacagatgtactggccattacatgaaacaagaaaccaagcatctttgctgttgttaattattatatgtgccattgttacaggagattataggctagtctgtaataaattatcttatagcagcctttggggtttggtaattctgctaatgtgtggaaagccatggaaatgactgtcctttataatggtagattttggcctaatggtcctttgctgcttcacactcctccacccccatacctga

SEQ ID NO: 6018 - protein, 1591 aa, Homo sapiens; identical to SEQ ID NO: 811

SEQ ID NO: 6019 - DNA, 518 bp, Homo sapiens
ttaaaaatgaaaacatttgcttttagtcaaggagaattatctgaactggccccagctcttagtgctgagggagaaacctatgtcatatgtgaagtccctgtggcttttgtgagagagggagggaacctaggctaatgggtcctatgctgaaaggagccaagactcaacagctacatctgtccccaaagccctgcatcctgatgaacaacgtgcagcaactgagggtccagctggagaaaatgtttgaggccatgggaggcaaggagctggaccttgaagctgcagacagtctgaaggagctgcaggtgaaactgaatacggttctggatgagctcagcatggtgtttggaaacaggtcagtgaccccacaatacaaggccctcagagccagatgtggtccctagccaatcccagagcccttgccccacacctctccatatagctgcaggtgtgtggatcttccctgtactcctgctgactgtccctgctggaaatgcaccatgagcatatgggaatgg

SEQ ID NO: 6020 - protein, 89 aa, Homo sapiens
MGPMLKGAKTQQLHLSPKPCILMNNVQQLRVQLEKMFEAMGGKELDLEAADSLKELQVKLNTVLDELSMVFGNRSVTPQYKALRARCGP

SEQ ID NO: 6021 - DNA, 518 bp, Homo sapiens
tccatgccacaccttatccagttagacacatacataccaatcattagaagaacaaccaaaaattgtagaaaccagtctagaaaaagtcctgctcatctgtggccactgccttctagccgtcctccaccttgcagaaagaatctagcctttggtctctctctctctcatcggggtcatttgctattcccctctgatattcaaccctatagaaggagcctggactctgatccctctgtacaggctggatggaaggggccctccacacttcctgggaggtcagagacaaactgtttcagagagtcagatggacttcccaagacttgttgagagatgtgacatggttcttggatttcctctgtagcagcctcctggacttcctgaggactcgacattgtccacagatgtactggccattacatgaaacaagaaaccaagcatctttgctgttgttaattattatatgtgccattgttacaggagattataggctagtctgtaataaattatcttatagcagc

SEQ ID NO: 6022 - protein, 107 aa, Homo sapiens [sequence omitted]

SEQ ID NO: 6023 - DNA, 423 bp, Homo sapiens
gggtctctagggcgtctgcgcaggaaggtgcgttgagatggcagttgccggagttggaggccgggcggcgacgaaattccatggaattatagttggtctactctgcaatgtctctatttaaaagcccaagtgaggacagacaagatgaacaacatgagagatatctgcaagccaacaacaaagaattcaacagtatttttggatatccgaacaatgccatcaagacctcaaaatatagtgtctttaatttcctgcccctgaacctatttgaacagttccagagacttgcaaatgcatatttcctcattttgctatttttacagttgattccccagatctcctccttgacatggtatacaactataacacccctgatggtggtgctgtccattaacagctgtgaaagatgccatcgatgacctg

SEQ ID NO: 6024 - protein, 103 aa, Homo sapiens
MSLFKSPSEDRQDEQHERYLQANNKEFNSIFGYPNNAIKTSKYSVFNFLPLNLFEQFQRLANAYFLILLFLQLIPQISSLTWYTTITPLMVVLSINSCERCHR

SEQ ID NO: 6025 - DNA, 2509 bp, Homo sapiens
gggtctctagggcgtctgcgcaggaaggtgcgttgagatggcagttgccggagttggaggccgggcggcgacgaaattccatggaattatagttggtctactctgcaatgtctctatttaaaagcccaagtgaggacagacaagatgaacaacatgagagatatctgcaagccaacaacaaagaattcaacagtatttttggatatccgaacaatgccatcaagacctcaaaatatagtgtctttaatttcctgcccctgaacctatttgaacagttccagagacttgcaaatgcatatttcctcattttgctatttttacagttgattccccagatctcctccttgacatggtatacaactataacacccctgatggtggtgctgtccattaacagctgtgaaagatgccatcgatgacctgaaaaggcatcaaagtgacgatcgagtcaacaaccagcctgttctgctactggtgaatggcaagataaaggaggacaaatggatgaatgttcaagtgggagatataataaaactagaaaataatcagcctgtcatggcagatatactattactctctagcagtgagccatatagtctgacatacatagagacagcagacctggatggtgaaaccaacctgaaagtgaagcaggccatctcagttaccagtgacatggaagatcgcctggagcttctgtctacctttaatggagaagtgagatgtgaggctcccaataacaaattggacaaattctcaggaatactgacctataaggggaaaaactacttcctggaccatgacaagctgctactctgaggctgcaacatcaggaatacagattggtgctatggcttggtgatctacactgggccagataccaaattaatgcagaatagtggaaagtccacttttaaacgaacacagatagaccatctcatgaatgtccttgtactctgggtaagttaaatacttttttttctttgtttctttacaaatagacatacttcccttcctttcacaggagaaatggtatttccagttcagaatttagctgtttgaaagtctcaagcacagcttcaagtgaagttaatctgaggtgaagcaaacagaaaattgtggaggttttgttggtgtgcaatggaggaacatggctcaagaaactaatcacagccaagtacctatgctttgttccactggctgcggattttatggaaaccctcgtacaaatggcacgtgttcagtatgctataaagaacatcttcaaagactgaatagtagtaatggtagaataagccaacctgcaacctctgaatctttaccagttcaatgcacagatggcagtgtcccagaagcccagtcaacattagactctacatcttcatctatgcagccaagccctgtatcaaatcagtcacttttatcagaatctgtagcatcttctcaattggacagtacatctgtggacaagcagtacctgaaacagaagatctgcaggcttcagtatcagacatggcacagcagccatctgaagagcaaagcaagtctcttgaaaaaccaaaacaaaaaaagaatctctgtttcatgtgcaggaagaaagtgggacttactaggtttgaatgcggtgtagaaatgtttactgtggtgtacactgttactcagatctacacaattgctcttaaaattacaaagctgatgccgctgagaaaatcagaaaagaaaatccagtagttgttggcgagaagatccaaaagatttgaactcctgctggaatacaaaattcttgatcatctgcaaactaaaaattgacttgaggtttttttttccctagtcattgggaaagtagagcagtgtatcttgcatgtcatcggatgaatagatttttgttttgattttgttttgaaaatgactctgaacatttatttccattgcaatttctgtggctgagaagacttaaactttacaagtattatccttataagatcattttaattttagttgagtgcagagggcttttataacaaacgtgcagaaattttggtggactgtgatttttccagtattaaatatgcatgcattaatcttgcagtttattttctcattgtgtacatatatattgcttttctttgcagcacgatttctcttttgataatgccctttggggcacaactagttatcggtaactgaatgtatcttaatcattatggctgcttctgttttttcattaacaaaggttattcatatgttagcatatagtttctttgcacccactatttatgtctgaatcatttgtcacgagagtgtgtgctgatgagattctaagtttgtgtgtttaaacttttttttgagcgagggaagaaaaagctgtatgcatttcattgctgtctacaggtttctttcagattatgttcatgggtttgtgtgtatacgatatgaagaatgatctgaagtaattgtgctgtatttatgtttattcaccagtctttgattaaataaaaaggaaaaccag

SEQ ID NO: 6026 - protein, 104 aa, Homo sapiens
MNVQVGDIIKLENNQPVMADILLLSSSEPYSLTYIETADLDGETNLKVKQAISVTSDMEDRLELLSTFNGEVRCEAPNNKLDKFSGILTYKGKNYFLDHDKLLL

SEQ ID NO: 6027 - DNA, 2853 bp, Homo sapiens
gtctgcgcaggaaggtgcgttgagatggcagttgccggagttggaggccgggcggcgacgaaattccatggaattatagttggtctactctgcaatgtctctatttaaaagcccaagtgaggacagacaagatgaacaacatgagagatatctgcaagccaacaacaaagaattcaacagtatttttggatatccgaacaatgccatcaagacctcaaaatatagtgtctttaatttcctgcccctgaacctatttgaacagttccagagacttgcaaatgcatatttcctcattttgctatttttacagttgattccccagatctcctccttgacatggtatacaactataacacccctgatggtggtgctgtccattaacagctgtgaaagatgccatcgatgacctgaaaaggcatcaaagtgacgatcgagtcaacaaccagcctgttctgctactggtgaatggcaagataaaggaggacaaatggatgaatgttcaagtgggagatataataaaactagaaaataatcagcctgtcatggcagatatactattactctctagcagtgagccatatagtctgacatacatagagacagcagacctggatggtgaaaccaacctgaaagtgaagcaggccatctcagttaccagtgacatggaagatcgcctggagcttctgtctacctttaatggagaagtgagatgtgaggctcccaataacaaattggacaaattctcaggaatactgacctataaggggaaaaactacttcctggaccatgacaagctgctactctgaggctgcaacatcaggaatacagattggtgctatggcttggtgatctacactgggccagataccaaattaatgcagaatagtggaaagtccacttttaaacgaacacagatagaccatctcatgaatgtccttgtactctgggcatcgtgtgttttgtcctagcagttgggcatggcatttggcagaacaagaaatgctaccacttccagatttttctgccatgggtaaaatatgtctcttcatcagctgtctctgccatcctcatattctggtcctacttcattattctcaataccatggtgcccatttccctctatgtcagtgttgaaataataagattgggcaacagtttatatatcaactgggatcggaagatgttttatgcaccaaggaacacaccagcacaggaggtgatacttatgacaaggatggacagagggtgacggtctctgagacagtttatgagacctggtttatcacatgctacagtctggtctacacttccctccctgtcctgtgcatgagtctgtttgatcagtaacccataaggaagctcctaggcagcctggcagcagacctggtgaggggagaagcctctactctgatggagatgggaccttctatggagagaccctgagcctccctccttaccctcgggtgcttccaggatgtgaatgagacatggagcctccatttcccagagctgtatgagccaggccagcacaacctctatttcaacaagaaagaatttgtgaagtgtttaatgcatgggatctacagttccttcgtgttgttctttgtccccatgggggctctttacaatgcagaacgaaatgatgggaaggacatctccgactaccagtccttctccctggtggtgcagacctccttgatctgggtggtcgcaatgcaggtgtggtcaggaattctctgaaccagccgcaaatgctgctgagcattatcctcagtgtggtcctctgtatgttgcctgtgattgggcaccaatttcttaaaccactattctggcctatcagcatggacaaagtttttgacagaattcaagagtgcaggagacttccacagcagtccccagtctggaccaaactgaaacactcaagcactcgacgttctgcctatgcattctcccataaacaaggctttggggccctcatcacttctggcaagatagtgaagcccaggatgtccaagagaaacaccctttttttgaaaaagatagaggccctagggaaattccaaaggaggcagtcagtgctcttcctccctcgtactcatgcaacttaggaagaattagagtccctgggaaaccagcataaacctgctccttcattctcactagggactaagcctcttaattgtccagaaggctattcccagaaaggcaaggaggggtaaggaaagagcccccagatatctgccagagttgcagcatttcaagaaaaagaaaaaaaaagcaacctcaggcctgcctcccaccatctcttgcaagttttaatccagacaagcatatgtagaggtagggggtgacaagagacagtatggggaagggaaaagaagatggaacctaagaattttactttgggccctatctcctatactcagagcaagcataaaccttcccagggccctacacaaacatattcccatcgaggcatcacataaaataaaatcaaccatttaaaaaggtataatttagtgacaattacttcccatttataagcaagggatgcatgagtgctacccatagaccggatatgggccatgtctttagcgtttcttgatctcgttagataaattatctgaaattttgaggagacttcagcagaaagaagcaggggatatgctgtcaaatgcctgtggatttatactaagaaagaaagaaggggcataaggaaaattttctttatctcgattttggaggtggttacatgggtatgtatttgtcaaaattcattgacctgtatacttaagatttatacattttattttatgtaaactatatctcaataaagttgagttttttaatgtc

SEQ ID NO: 6028 - protein, 118 aa, Homo sapiens
MLLSIILSVVLCMLPVIGHQFLKPLFWPISMDKVFDRIQECRRLPQQSPVWTKLKHSSTRRSAYAFSHKQGFGALITSGKIVKPRMSKRNTLFLKKIEALGKFQRRQSVLFLPRTHAT

SEQ ID NO: 6029 - DNA, 3914 bp, Homo sapiens
gagatggcagttgccggagttggaggccgggcggcgacgaaattccatggaattatagttggtctactctgcaatgtctctatttaaaagcccaagtgaggacagacaagatgaacaacatgagagatatctgcaagccaacaacaaagaattcaacagtatttttggatatccggtgagtgtcatccctctggctgtttcagaaggggaacaatgccatcaagacctcaaaatatagtgtctttaatttcctgcccctgaacctatttgaacagttccagagacttgcaaatgcatatttcctcattttgctatttttacagttgattccccagatctcctccttgacatggtatacaactataacacccctgatggtggtgctgtccattaacagctgtgaaagatgccatcgatgacctggtgaagtagcttcctgggcctctacttcctcactgcacctagtcagactgtgggcatgaaggacttcccagaactacctagtgctaacaagaaaccctgaatggaaagagatatttcctttcttctttccttattcatcccagagtaatatgcagtacctttaggcccaagattggtggtctgtgtatggccagaaaggggcaaaacaaggcctttctctatcttcctactgccaccacttttagcccctctcctgagcctccttccatctttaataacccactctttctttactcctctcttagctttttctagctttgttctcatcctttttcctctgctcctccttctcctactctatattccctttgccttcctctatctgcccctgctccatctctcctattctttctctttcttctctccacatttcctgtctcctctcgaactctattttcctttccaactttcaattctgttaagtgtgcacagctaggaaccctctgtcctggctttgaaagagaaactggctcacagtgagtgctgcatggcttcctctttgcctcttacagcaggcccagcatagaggggtgagagtaaggacccagtaccatgcctactagtaggatttggaaagccagtcctatagacctgcttgcagtttccctaagagggtctttctgattttgccagaatagatttttagcctagtttgagagcaccttgtttcctcagcactttatctctataaacccaggattagcatgttgtggtttacctttcagtcacaacttagatgtacgaaaatataactttatttctctataactgaactcagtttagcttataaccacatgcataccccatcttaactctctccagtgagaaccaaaaattaatttaccaattcatggtaacccaattacttctggcttagaattcagtctctttatgataaatatttggacaattttgaattctgacaaattcaggattctctctgccccactcccagtcctaccctttactcagggagtaatctcaactggaaggaagatatttatgtgaatcctggcatcaggacatagcctctatttgtttcccttctatttgatctttaaatattggcctctttcctcagccactatagaagcttctgtatgtcaaccatggttggaggtagggtaggagtctgcttgagaatactcagctttcccagcacctacccaggcagacagaattctgtagccctgcccatcatttggattgtgtcctctgcagcttttgatatgttattctcattcctccaggttttttgcttttgatatttaaaactaaaattttgtctctttcttctccctggattcttttcctgccctctcttcccagcttcccagagataatcaacctcttggcctagtttgaaggaaagaagggcttgggacaggggaaaaggagaattacaaagaagggaactacattgtgtaatatttcaaaatgttaatcttctatatgcagtttgttataggtctatttcctgaacattttcttgtgtgattttagaaaaggcatcaaagtgacgatcgagtcaacaaccagcctgttctgctactggtgaatggcaagataaaggaggacaaatggatgaatgttcaagtgggagatataataaaactagaaaataatcagcctgtcatggcagatatactattactctctagcagtgagccatatagtctgacatacatagagacagcagacctggatggtgaaaccaacctgaaagtgaagcaggccatctcagttaccagtgacatggaagatcgcctggagcttctgtctacctttaatggagaagtgagatgtgaggctcccaataacaaattggacaaattctcaggaatactgacctataaggggaaaaactacttcctggaccatgacaagctgctactctgaggctgcaacatcaggaatacagattggtgctatggcttggtgatctacactggagaaatggtatttccagttcagaatttagctgtttgaaagtctcaagcacagcttcaagtgaagttaatctgaggtgaagcaaacagaaaattgtggaggttttgttggtgtgcaatggaggaacatggctcaagaaactaatcacagccaagtacctatgctttgttccactggctgcggattttatggaaaccctcgtacaaatggcacgtgttcagtatgctataaagaacatcttcaaagactgaatagtagtaatggtagaataagccaacctgcaacctctgaatctttaccagttcaatgcacagatggcagtgtcccagaagcccagtcaacattagactctacatcttcatctatgcagccaagccctgtatcaaatcagtcacttttatcagaatctgtagcatcttctcaattggacagtacatctgtggacaagcagtacctgaaacagaagatctgcaggcttcagtatcagacatggcacagcagccatctgaagagcaaagcaagtctcttgaaaaaccaaaacaaaaaaagaatctctgtttcatgtgcaggaagaaagtgggacttactaggtttgaatgcggtgtagaaatgtttactgtggtgtacactgttactcagatctacacaattgctcttaaaattacaaagctgatgccgctgagaaaatcagaaaagaaaatccagtagttgttggcgagaagatccaaaagatttgaactcctgctggaatacaaaattcttgatcatctgcaaactaaaaattgacttgaggtttttttttccctagtcattgggaaagtagagcagtgtatcttgcatgtcatcggatgaatagatttttgttttgattttgttttgaaaatgactctgaacatttatttccattgcaatttctgtggctgagaagacttaaactttacaagtattatccttataagatcattttaattttagttgagtgcagagggcttttataacaaacgtgcagaaattttggtggactgtgatttttccagtattaaatatgcatgcattaatcttgcagtttattttctcattgtgtacatatatattgcttttctttgcagcacgatttctcttttgataatgccctttggggcacaactagttatcggtaactgaatgtatcttaatcattatggctgcttctgttttttcattaacaaaggttattcatatgttagcatatagtttctttgcacccactatttatgtctgaatcatttgtcacgagagtgtgtgctgatgagattctaagtttgtgtgtttaaacttttttttgagcgagggaagaaaaagctgtatgcatttcattgctgtctacaggtttctttcagattatgttcatgggtttgtgtgtatacgatatgaagaatgatctgaagtaattgtgctgtatttatgtttattcaccagtctttgattaaataaaaaggaaa

SEQ ID NO: 6030 - protein, 104 aa, Homo sapiens; identical to SEQ ID NO: 6026

SEQ ID NO: 6031 - DNA, 1008 bp, Homo sapiens
cacctccttcctcacctcaaaggaaaaaatccccatctgtcagtgcagctgtctcagacagggattactaataatcactcttataataaagcagactaacacacattaagtatgaatgatgataagaaggagaccccttaaaagtcttcactgttttaaaatgaacatgcttgttagccataaagaatctataatggacgctatttggagcagaagaggagtatgacagaggcaatagggaaaacttatataaaatgagaagaggttgttgtgggaggagacacaccacaggcaggctggctctgcctggaaatttatcagagggtcagcccataaactattcctgattttcatagcttctttccttcttctgaaataaactctgagtgtgtcaaggttctctgtcttccccatgtgacaggagcaataatcctccaattgggccaacacagccttttataagttaactgttactctatcacaccttgcattactgcagaaattccaaaattgtaacttttcctggatacattatggaaaaaaaaaaaaagaataaaagccagtgttgaaataataagattgggcaacagtttatatatcaactgggatcggaagatgttttatgcaccaaggaacacaccagcacaggaggtgatacttatgacaaggatggacagagggtgacggtctctgagacagtttatgagacctggtttatcacatgctacagtctggtctacacttccctccctgtcctgtgcatgagtctgtttgatcagtaacccataaggaagctcctaggcagcctggcagcagacctggtgaggggagaagcctctactctgatggagatgggaccttctatggagagaccctgagcctccctccttaccctcgggtgcttccaggatgtgaatgagacatggagcctccatttcccagagctgtatgagccaggccagcacaacctctatttcaacaagaaagaatttgtgaagtgtttaatgc

SEQ ID NO: 6032 - protein, 36 aa, Homo sapiens
MMIRRRPLKSLHCFKMNMLVSHKESIMDAIWSRRGV

SEQ ID NO: 6033 - DNA, 2611 bp, Homo sapiens
ttgtaaacggacagagacgagaggggcaagggaggacagtggatgacagggaagacgagtgggggcagagctgctcaggaccatggctgaggccatcacctatgcagatctgagacccaggggctgatgatgatggggaaatcacctacgagaatgttcaagtgcccgcagtcctaggggtgccctcaagcttggcttcttctgtactaggggacaaagcagcggtcaagtcggagcagccaactgcgtcctggagagccgtgacgtcaccagctgtcgggcggattctcccctgccgcacaacctgcctgcgatacctcctgctcggcctgctcctcacctgcctgctgttaggagtgaccgccatctgcctgggagtgcgctatctgcaggtgtctcagcagctccagcagacgaacagggttctggaagtcactaacagcagcctgaggcagcagctccgcctcaagataacgcagctgggacagagtgcagaggatctgcaggggtccaggagagagctggcgcagagtcaggaagcactacaggtggaacagagggctcatcaggcggccgaagggcagctacaggcctgccaggcagacagacagaagacgaaggagaccttgcaaagtgaggagcaacagaggagggccttggagcagaagctgagcaacatggagaacagactgaagcccttcttcacatgcggctcagcagacacctgctgtccgtcgggatggataatgcatcagaaaagctgcttttacatctcacttacttcaaaaaattggcaggagagccaaaaacaatgtgaaactctgtcttccaagctggccacattcagtgaaatttatccacaatcacactcttactacttcttaaattcactgttgccaaatggtggttcagggaattcatattggactggcctcagctctaacaaggattggaagttgactgatgatacacaacgcactaggacttatgctcaaagctcaaaatgtaacaaggtacataaaacttggtcatggtggacactggagtcagagtcatgtagaagttctcttccctacatctgtgagatgacagctttcaggtttccagattaggacagtcctttgcactgagttgacactcatgccaacaagaacctgtgcccctccttcctaacctgaggcctggggttcctcagaccatctccttcattctgggcagtgcccagccaccggctgacccacacctgacacttccagccagtctgctgcctgctccctcttcctgaaactggactgttcctgggaaaagggtgaagccacctctagaagggactttggcctccccccaagaacttcccatggtagaatggggtgggggaggagggcgcacgggctgagcggataggggcggcccggagccagccaggcagttttattgaaatctttttaaataattgcacgtgttagtctcatgtgtcagcaatgctgtgtctggttcagtgatccccacgggaacgcgagccggggggtcgactggaagtgctctgtcccttgagtccatgctggggctcccctacacggggagaagagccggtcagcccatctggaactggcactgtccagcaagtgtgctctgttcttacagggtgtcctgaaggccaaagttggaggcctgagaccacgggctccactgctaagagcgtgccccaggcagctgcaggctgggtgtgggtggcttggcgtggtgccctcggtggcagaggagactgcccgcctcacagttcaggttgcggtagcgggcaacagctggtgtggggcgggggcacatggacaggaagccaaagctgaaggggccgaggcagcagccaggacagggcagcccctcatcgggctcccggggagctgaagggggtggcgagggttctgtccgctccagggctgccgcccggggcaggctatgctgggcccggttccagggctccccagcccagccttgtggggagttcaccaccacagctgggggattgttattgaggacgggtcctgatctaggggaccagggttgggaggccgaggaacaggtgctgatgaagttgtctgtggccacagccagaggcagctggggcgctggccctggaggttccggctcagggctgctgccctcgcactccatcttctcttcagccgaggggcccacagcgggagggccaggacctggcagtgctgtctccatacggcgggggagctcgggggatgagggtagtgagcggcagcggcgggcaggtgtcccaggctggaccagggtctccggagtggtcaccaagggcagctgagtggatgggaatggtgatggtggcacaagaggcaggactggcttgctgggtgtgtctaagagcttgatcttgccacccctgaggtcttcccgtagtgagaaggggttgactcgagtcagattgtccccccagttggggggtgattctggtgatgggggcaggaagaggtctgaccggcttcgggaaagccggggatctggcctgggaagcgtggcagagggaccccctcttgcaacagagcctgtagatagagaagtctggaatcactgtcctcagcat

SEQ ID NO: 6034 - protein, 144 aa, Homo sapiens
MENRLKPFFTCGSADTCCPSGWIMHQKSCFYISLTSKNWQESQKQCETLSSKLATFSEIYPQSHSYYFLNSLLPNGGSGNSYWTGLSSNKDWKLTDDTQRTRTYAQSSKCNKVHKTWSWWTLESESCRSSLPYICEMTAFRFPD

SEQ ID NO: 6035 - DNA, 2960 bp, Homo sapiens
gcagtcacagagggaacacagagcctagttgtaaacggacagagacgagaggggcaagggaggacagtggatgacagggaagacgagtgggggcagagctgctcaggaccatggctgaggccatcacctatgcagatctgagacccaggggctgatgatgatggggaaatcacctacgagaatgttcaagtgcccgcagtcctaggggtgccctcaagcttggcttcttctgtactaggggacaaagcagcggtcaagtcggagcagccaactgcgtcctggagagccgtgacgtcaccagctgtcgggcggattctcccctgccgcacaacctgcctgcgatacctcctgctcggcctgctcctcacctgcctgctgttaggagtgaccgccatctgcctgggagtgcgctgtgagtaaggctgtccctacttcccacttacaccgaacgactttcgtcccgactctcgccccaaagctgatcttcctcagcagggatcatagtcactaccaccacctccttagctttgggtttggtttccagccagggctgttgtcttcctgaattgtcctcacctaatccagtacctccttacgctttagtcagtcaaatcttgtatttcagcctgtgatgcaaaaagttgcaagaagcagaaaaagggctgatgctgcagtctcagggcactagggcagggctggagaagacatccaccaaatctctgtggccaaacagatctgcaggtgtctcagcagctccagcagacgaacagggttctggaagtcactaacagcagcctgaggcagcagctccgcctcaagataacgcagctgggacagagtgcagaggatctgcaggggtccaggagagagctggcgcagagtcaggaagcactacaggtggaacagagggctcatcaggcggccgaagggcagctacaggcctgccaggcagacagacagaagacgaaggagaccttgcaaagtgaggagcaacagaggagggccttggagcagaagctgagcaacatggagaacagactgaagcccttcttcacatgcggctcagcagacacctgctgtccgtcgggatggataatgcatcagaaaagctgcttttacatctcacttacttcaaaaaattggcaggagagccaaaaacaatgtgaaactctgtcttccaagctggccacattcagtgaaatttatccacaatcacactcttactacttcttaaattcactgttgccaaatggtggttcagggaattcatattggactggcctcagctctaacaaggattggaagttgactgatgatacacaacgcactaggacttatgctcaaagctcaaaatgtaacaaggtacataaaacttggtcatggtggacactggagtcagagtcatgtagaagttctcttccctacatctgtgagatgacagctttcaggtttccagattaggacagtcctttgcactgagttgacactcatgccaacaagaacctgtgcccctccttcctaacctgaggcctggggttcctcagaccatctccttcattctgggcagtgcccagccaccggctgacccacacctgacacttccagccagtctgctgcctgctccctcttcctgaaactggactgttcctgggaaaagggtgaagccacctctagaagggactttggcctccccccaagaacttcccatggtagaatggggtgggggaggagggcgcacgggctgagcggataggggcggcccggagccagccaggcagttttattgaaatctttttaaataattgcacgtgttagtctcatgtgtcagcaatgctgtgtctggttcagtgatccccacgggaacgcgagccggggggtcgactggaagtgctctgtcccttgagtccatgctggggctcccctacacggggagaagagccggtcagcccatctggaactggcactgtccagcaagtgtgctctgttcttacagggtgtcctgaaggccaaagttggaggcctgagaccacgggctccactgctaagagcgtgccccaggcagctgcaggctgggtgtgggtggcttggcgtggtgccctcggtggcagaggagactgcccgcctcacagttcaggttgcggtagcgggcaacagctggtgtggggcgggggcacatggacaggaagccaaagctgaaggggccgaggcagcagccaggacagggcagcccctcatcgggctcccggggagctgaagggggtggcgagggttctgtccgctccagggctgccgcccggggcaggctatgctgggcccggttccagggctccccagcccagccttgtggggagttcaccaccacagctgggggattgttattgaggacgggtcctgatctaggggaccagggttgggaggccgaggaacaggtgctgatgaagttgtctgtggccacagccagaggcagctggggcgctggccctggaggttccggctcagggctgctgccctcgcactccatcttctcttcagccgaggggcccacagcgggagggccaggacctggcagtgctgtctccatacggcgggggagctcgggggatgagggtagtgagcggcagcggcgggcaggtgtcccaggctggaccagggtctccggagtggtcaccaagggcagctgagtggatgggaatggtgatggtggcacaagaggcaggactggcttgctgggtgtgtctaagagcttgatcttgccacccctgaggtcttcccgtagtgagaaggggttgactcgagtcagattgtccccccagttggggggtgattctggtgatgggggcaggaagaggtctgaccggcttcgggaaagccggggatctggcctgggaagcgtggcagagggaccccctcttgcaacagagcctgtagatagagaagtctggaatcactgtcctcagcat

SEQ ID NO: 6036 - protein, 144 aa, Homo sapiens; identical to SEQ ID NO: 6034

SEQ ID NO: 6037 - DNA, 4495 bp, Homo sapiens
ggggagatcgtctgggtcagtgcagctccagctacacatcataagccccagtggacaaggcagccaggaggagggtggggcagatcagggcagataaccagaaggaccgagtttggggcccagcatggcccatatgggtttaagatgcatggagaggaagcacagggaggacatggggacaggcccatcccctacccctgtgttctggacctcagcgtcccctccgtggcccctctggccctggcccagggatgccttctgcttcattgagcccatctgtttgagacttgctaacaccttcctcttttgtgactggaagtcacagggccaattgctaagccgtgcagtcacagagggaacacagagcctagttgtaaacggacagagacgagaggggcaagggaggacagtggatgacagggaagacgagtgggggcagagctgctcaggaccatggctgaggccatcacctatgcagatctgaggtttgtgaaggctcccctgaagaagagcatctccagccggttaggacaggacccaggggctgatgatgatggggaaatcacctacgagaatgttcaagtgcccgcagtcctaggggtgccctcaagcttggcttcttctgtactaggggacaaagcaggctggagtgcagtggtgtgatcatggctcactgcagcctcgacctcctgggctcaagtgatcctcctgccctggcctcccaaagtgttgggattgcaggcgtgcgcccccatgccatggccctcagtattcttgagagcacaataccctggggaaaggaggagggcggttcttaggaaacagaagaataggaacaggataaatgggagccaggggaggaagaaagattcctcccgcaaggtggagacccctttcggggagataagggctgcggagggatagggcagccctgtgggggatgagttctaatgggaaacggggagccatgggagggaaaagaggtgatgggagatggatgagagcaaagggggagagggtttggagccgacagataaggggcctctgaggaaacgataaagggagaactaggagagatgagggggtcccgggaaaagatacagtgagacccaggaggaagccgagagagtcccgggcagaggaggaactcaggagagtgacactgtgtcccagagcagctctagcaggcaacgtagggcagactggagtttcccagtggcgagggcgaagcgggtgcgcaggaggagaaggggcaacactcggggcttccggtctcacactggatgctcccctcgacagcggtcaagtcggagcagccaactgcgtcctggagagccgtgacgtcaccagctgtcgggcggattctcccctgtgagtgtgcctgtgcggggcagccgcggggccaagtgctcgcgcctgtcccggctgcggatggcgctgggccccgcggggtgcagctccttccgggataaacccgggcgcagtccttccgacgcccgggctgccgtgccacattcaccttcatccggtgcgcctgaatccgacgtgcaccgcccccctgcggatggtcccaattcacctacctgccccccttcccctctctccgtctgatatttccttccccttctcccaggtaacgcccccgagtccccaccagcactgattctggaacaccctctcccctacctgcgaaacaccccgctacccgacagaaaccaccatgcttgccccctcagctctgcaccgccctcctcttagggatgccttccccaggggtctcccccacggacctgtcccttcctctctacattctttacgggggctgactgccctcatccatcccactgtccccctaaggccgcacaacctgcctgcgatacctcctgctcggcctgctcctcacctgcctgctgttaggagtgaccgccatctgcctgggagtgcgctgtgagtaaggctgtccctacttcccacttacaccgaacgactttcgtcccgactctcgccccaaagctgatcttcctcagcagggatcatagtcactaccaccacctccttagctttgggtttggtttccagccagggctgttgtcttcctgaattgtcctcacctaatccagtacctccttacgctttagtcagtcaaatcttgtatttcagcctgtgatgcaaaaagttgcaagaagcagaaaaagggctgatgctgcagtctcagggcactagggcagggctggagaagacatccaccaaatctctgtggccaaacagatctgcaggtgtctcagcagctccagcagacgaacagggttctggaagtcactaacagcagcctgaggcagcagctccgcctcaagataacgcagctgggacagagtgcagaggatctgcaggggtccaggagagagctggcgcagagtcaggaagcactacaggtggaacagagggctcatcaggcggccgaagggcagctacaggcctgccaggcagacagacagaagacgaaggagaccttgcaaagtgaggagcaacagaggagggccttggagcagaagctgagcaacatggagaacagactgaagcccttcttcacatgcggctcagcagacacctgctgtccgtcgggatggataatgcatcagaaaagctgcttttacatctcacttacttcaaaaaattggcaggagagccaaaaacaatgtgaaactctgtcttccaagctggccacattcagtgaaatttatccacaatcacactcttactacttcttaaattcactgttgccaaatggtggttcagggaattcatattggactggcctcagctctaacaaggattggaagttgactgatgatacacaacgcactaggacttatgctcaaagctcaaaatgtaacaaggtacataaaacttggtcatggtggacactggagtcagagtcatgtagaagttctcttccctacatctgtgagatgacagctttcaggtttccagattaggacagtcctttgcactgagttgacactcatgccaacaagaacctgtgcccctccttcctaacctgaggcctggggttcctcagaccatctccttcattctgggcagtgcccagccaccggctgacccacacctgacacttccagccagtctgctgcctgctccctcttcctgaaactggactgttcctgggaaaagggtgaagccacctctagaagggactttggcctccccccaagaacttcccatggtagaatggggtgggggaggagggcgcacgggctgagcggataggggcggcccggagccagccaggcagttttattgaaatctttttaaataattgcacgtgttagtctcatgtgtcagcaatgctgtgtctggttcagtgatccccacgggaacgcgagccggggggtcgactggaagtgctctgtcccttgagtccatgctggggctcccctacacggggagaagagccggtcagcccatctggaactggcactgtccagcaagtgtgctctgttcttacagggtgtcctgaaggccaaagttggaggcctgagaccacgggctccactgctaagagcgtgccccaggcagctgcaggctgggtgtgggtggcttggcgtggtgccctcggtggcagaggagactgcccgcctcacagttcaggttgcggtagcgggcaacagctggtgtggggcgggggcacatggacaggaagccaaagctgaaggggccgaggcagcagccaggacagggcagcccctcatcgggctcccggggagctgaagggggtggcgagggttctgtccgctccagggctgccgcccggggcaggctatgctgggcccggttccagggctccccagcccagccttgtggggagttcaccaccacagctgggggattgttattgaggacgggtcctgatctaggggaccagggttgggaggccgaggaacaggtgctgatgaagttgtctgtggccacagccagaggcagctggggcgctggccctggaggttccggctcagggctgctgccctcgcactccatcttctcttcagccgaggggcccacagcgggagggccaggacctggcagtgctgtctccatacggcgggggagctcgggggatgagggtagtgagcggcagcggcgggcaggtgtcccaggctggaccagggtctccggagtggtcaccaagggcagctgagtggatgggaatggtgatggtggcacaagaggcaggactggcttgctgggtgtgtctaagagcttgatcttgccacccctgaggtcttcccgtagtgagaaggggttgactcgagtcagattgtccccccagttggggggtgattctggtgatgggggcaggaagaggtctgaccggcttcgggaaagccggggatctggcctgggaagcgtggcagagggaccccctcttgcaacagagcctgtagatagagaagtctggaatcactgtcctcagcat

SEQ ID NO: 6038 - protein, 144 aa, Homo sapiens; identical to SEQ ID NO: 6034

SEQ ID NO: 6039 - DNA, 2744 bp, Homo sapiens
caccaccaatcatccgagctgttggcatgtgtcacagggccaattgctaagccgtgcagtcacagagggaacacagagcctagttgtaaacggacagagacgagaggggcaagggaggacagtggatgacagggaagacgagtgggggcagagctgctcaggaccatggctgaggccatcacctatgcagatctgaggtttgtgaaggctcccctgaagaagagcatctccagccggttaggacaggacccaggggctgatgatgatggggaaatcacctacgagaatgttcaagtgcccgcagtcctaggggtgccctcaagcttggcttcttctgtactaggggacaaagcagcggtcaagtcggagcagccaactgcgtcctggagagccgtgacgtcaccagctgtcgggcggattctcccctgccgcacaacctgcctgcgatacctcctgctcggcctgctcctcacctgcctgctgttaggagtgaccgccatctgcctgggagtgcgctatctgcaggtgtctcagcagctccagcagacgaacagggttctggaagtcactaacagcagcctgaggcagcagctccgcctcaagataacgcagctgggacagagtgcagaggatctgcaggggtccaggagagagctggcgcagagtcaggaagcactacaggtggaacagagggctcatcaggcggccgaagggcagctacaggcctgccaggcagacagacagaagacgaaggagaccttgcaaagtgaggagcaacagaggagggccttggagcagaagctgagcaacatggagaacagactgaagcccttcttcacatgcggctcagcagacacctgctgtccgtcgggatggataatgcatcagaaaagctgcttttacatctcacttacttcaaaaaattggcaggagagccaaaaacaatgtgaaactctgtcttccaagctggccacattcagtgaaatttatccacaatcacactcttactacttcttaaattcactgttgccaaatggtggttcagggaattcatattggactggcctcagctctaacaaggattggaagttgactgatgatacacaacgcactaggacttatgctcaaagctcaaaatgtaacaaggtacataaaacttggtcatggtggacactggagtcagagtcatgtagaagttctcttccctacatctgtgagatgacagctttcaggtttccagattaggacagtcctttgcactgagttgacactcatgccaacaagaacctgtgcccctccttcctaacctgaggcctggggttcctcagaccatctccttcattctgggcagtgcccagccaccggctgacccacacctgacacttccagccagtctgctgcctgctccctcttcctgaaactggactgttcctgggaaaagggtgaagccacctctagaagggactttggcctccccccaagaacttcccatggtagaatggggtgggggaggagggcgcacgggctgagcggataggggcggcccggagccagccaggcagttttattgaaatctttttaaataattgcacgtgttagtctcatgtgtcagcaatgctgtgtctggttcagtgatccccacgggaacgcgagccggggggtcgactggaagtgctctgtcccttgagtccatgctggggctcccctacacggggagaagagccggtcagcccatctggaactggcactgtccagcaagtgtgctctgttcttacagggtgtcctgaaggccaaagttggaggcctgagaccacgggctccactgctaagagcgtgccccaggcagctgcaggctgggtgtgggtggcttggcgtggtgccctcggtggcagaggagactgcccgcctcacagttcaggttgcggtagcgggcaacagctggtgtggggcgggggcacatggacaggaagccaaagctgaaggggccgaggcagcagccaggacagggcagcccctcatcgggctcccggggagctgaagggggtggcgagggttctgtccgctccagggctgccgcccggggcaggctatgctgggcccggttccagggctccccagcccagccttgtggggagttcaccaccacagctgggggattgttattgaggacgggtcctgatctaggggaccagggttgggaggccgaggaacaggtgctgatgaagttgtctgtggccacagccagaggcagctggggcgctggccctggaggttccggctcagggctgctgccctcgcactccatcttctcttcagccgaggggcccacagcgggagggccaggacctggcagtgctgtctccatacggcgggggagctcgggggatgagggtagtgagcggcagcggcgggcaggtgtcccaggctggaccagggtctccggagtggtcaccaagggcagctgagtggatgggaatggtgatggtggcacaagaggcaggactggcttgctgggtgtgtctaagagcttgatcttgccacccctgaggtcttcccgtagtgagaaggggttgactcgagtcagattgtccccccagttggggggtgattctggtgatgggggcaggaagaggtctgaccggcttcgggaaagccggggatctggcctgggaagcgtggcagagggaccccctcttgcaacagagcctgtagatagagaagtctggaatcactgtcctcagcat

SEQ ID NO: 6040 - protein, 359 aa, Homo sapiens; identical to SEQ ID NO: 813

SEQ ID NO: 6041 - DNA, 1480 bp, Homo sapiens
ttgtaaacggacagagacgagaggggcaagggaggacagtggatgacagggaagacgagtgggggcagagctgctcaggaccatggctgaggccatcacctatgcagatctgagacccaggggctgatgatgatggggaaatcacctacgagaatgttcaagtgcccgcagtcctaggggtgccctcaagcttggcttcttctgtactaggggacaaagcagcggtcaagtcggagcagccaactgcgtcctggagagccgtgacgtcaccagctgtcgggcggattctcccctgccgcacaacctgcctgcgatacctcctgctcggcctgctcctcacctgcctgctgttaggagtgaccgccatctgcctgggagtgcgctatctgcaggtgtctcagcagctccagcagacgaacagggttctggaagtcactaacagcagcctgaggcagcagctccgcctcaagataacgcagctgggacagagtgcagaggatctgcaggggtccaggagagagctggcgcagagtcaggaagcactacaggtggaacagagggctcatcaggcggccgaagggcagctacaggcctgccaggcagacagacagaagacgaaggagaccttgcaaagtgaggagcaacagaggagggccttggagcagaagctgagcaacatggagaacagactgaagcccttcttcacatgcggctcagcagacacctgctgtccgtcgggatggataatgcatcagaaaagctgcttttacatctcacttacttcaaaaaattggcaggagagccaaaaacaatgtgaaactctgtcttccaagctggccacattcagtgaaatttatccacaatcacactcttactacttcttaaattcactgttgccaaatggtggttcagggaattcatattggactggcctcagctctaacaaggattggaagttgactgatgatacacaacgcactaggacttatgctcaaagctcaaaatgtaacaaggtacataaaacttggtcatggtggacactggagtcagagtcatgtagaagttctcttccctacatctgtgagatgacagctttcaggtttccagattaggacagtcctttgcactgagttgacactcatgccaacaagaacctgtgcccctccttcctaacctgaggcctggggttcctcagaccatctccttcattctgggcagtgcccagccaccggctgacccacacctgacacttccagccagtctgctgcctgctccctcttcctgaaactggactgttcctgggaaaagggtgaagccacctctagaagggactttggcctccccccaagaacttcccatggtagaatggggtgggggaggagggcgcacgggctgagcggataggggcggcccggagccagccaggcagttttattgaaatctttttaaataattgcacgtgttagtctcatgtgtcagc

SEQ ID NO: 6042 - protein, 144 aa, Homo sapiens; identical to SEQ ID NO: 6034

SEQ ID NO: 6043 - DNA, 1829 bp, Homo sapiens
gcagtcacagagggaacacagagcctagttgtaaacggacagagacgagaggggcaagggaggacagtggatgacagggaagacgagtgggggcagagctgctcaggaccatggctgaggccatcacctatgcagatctgagacccaggggctgatgatgatggggaaatcacctacgagaatgttcaagtgcccgcagtcctaggggtgccctcaagcttggcttcttctgtactaggggacaaagcagcggtcaagtcggagcagccaactgcgtcctggagagccgtgacgtcaccagctgtcgggcggattctcccctgccgcacaacctgcctgcgatacctcctgctcggcctgctcctcacctgcctgctgttaggagtgaccgccatctgcctgggagtgcgctgtgagtaaggctgtccctacttcccacttacaccgaacgactttcgtcccgactctcgccccaaagctgatcttcctcagcagggatcatagtcactaccaccacctccttagctttgggtttggtttccagccagggctgttgtcttcctgaattgtcctcacctaatccagtacctccttacgctttagtcagtcaaatcttgtatttcagcctgtgatgcaaaaagttgcaagaagcagaaaaagggctgatgctgcagtctcagggcactagggcagggctggagaagacatccaccaaatctctgtggccaaacagatctgcaggtgtctcagcagctccagcagacgaacagggttctggaagtcactaacagcagcctgaggcagcagctccgcctcaagataacgcagctgggacagagtgcagaggatctgcaggggtccaggagagagctggcgcagagtcaggaagcactacaggtggaacagagggctcatcaggcggccgaagggcagctacaggcctgccaggcagacagacagaagacgaaggagaccttgcaaagtgaggagcaacagaggagggccttggagcagaagctgagcaacatggagaacagactgaagcccttcttcacatgcggctcagcagacacctgctgtccgtcgggatggataatgcatcagaaaagctgcttttacatctcacttacttcaaaaaattggcaggagagccaaaaacaatgtgaaactctgtcttccaagctggccacattcagtgaaatttatccacaatcacactcttactacttcttaaattcactgttgccaaatggtggttcagggaattcatattggactggcctcagctctaacaaggattggaagttgactgatgatacacaacgcactaggacttatgctcaaagctcaaaatgtaacaaggtacataaaacttggtcatggtggacactggagtcagagtcatgtagaagttctcttccctacatctgtgagatgacagctttcaggtttccagattaggacagtcctttgcactgagttgacactcatgccaacaagaacctgtgcccctccttcctaacctgaggcctggggttcctcagaccatctccttcattctgggcagtgcccagccaccggctgacccacacctgacacttccagccagtctgctgcctgctccctcttcctgaaactggactgttcctgggaaaagggtgaagccacctctagaagggactttggcctccccccaagaacttcccatggtagaatggggtgggggaggagggcgcacgggctgagcggataggggcggcccggagccagccaggcagttttattgaaatctttttaaataattgcacgtgttagtctcatgtgtcagc

SEQ ID NO: 6044 - protein, 144 aa, Homo sapiens; identical to SEQ ID NO: 6034

SEQ ID NO: 6045 - DNA, 3364 bp, Homo sapiens
ggggagatcgtctgggtcagtgcagctccagctacacatcataagccccagtggacaaggcagccaggaggagggtggggcagatcagggcagataaccagaaggaccgagtttggggcccagcatggcccatatgggtttaagatgcatggagaggaagcacagggaggacatggggacaggcccatcccctacccctgtgttctggacctcagcgtcccctccgtggcccctctggccctggcccagggatgccttctgcttcattgagcccatctgtttgagacttgctaacaccttcctcttttgtgactggaagtcacagggccaattgctaagccgtgcagtcacagagggaacacagagcctagttgtaaacggacagagacgagaggggcaagggaggacagtggatgacagggaagacgagtgggggcagagctgctcaggaccatggctgaggccatcacctatgcagatctgaggtttgtgaaggctcccctgaagaagagcatctccagccggttaggacaggacccaggggctgatgatgatggggaaatcacctacgagaatgttcaagtgcccgcagtcctaggggtgccctcaagcttggcttcttctgtactaggggacaaagcaggctggagtgcagtggtgtgatcatggctcactgcagcctcgacctcctgggctcaagtgatcctcctgccctggcctcccaaagtgttgggattgcaggcgtgcgcccccatgccatggccctcagtattcttgagagcacaataccctggggaaaggaggagggcggttcttaggaaacagaagaataggaacaggataaatgggagccaggggaggaagaaagattcctcccgcaaggtggagacccctttcggggagataagggctgcggagggatagggcagccctgtgggggatgagttctaatgggaaacggggagccatgggagggaaaagaggtgatgggagatggatgagagcaaagggggagagggtttggagccgacagataaggggcctctgaggaaacgataaagggagaactaggagagatgagggggtcccgggaaaagatacagtgagacccaggaggaagccgagagagtcccgggcagaggaggaactcaggagagtgacactgtgtcccagagcagctctagcaggcaacgtagggcagactggagtttcccagtggcgagggcgaagcgggtgcgcaggaggagaaggggcaacactcggggcttccggtctcacactggatgctcccctcgacagcggtcaagtcggagcagccaactgcgtcctggagagccgtgacgtcaccagctgtcgggcggattctcccctgtgagtgtgcctgtgcggggcagccgcggggccaagtgctcgcgcctgtcccggctgcggatggcgctgggccccgcggggtgcagctccttccgggataaacccgggcgcagtccttccgacgcccgggctgccgtgccacattcaccttcatccggtgcgcctgaatccgacgtgcaccgcccccctgcggatggtcccaattcacctacctgccccccttcccctctctccgtctgatatttccttccccttctcccaggtaacgcccccgagtccccaccagcactgattctggaacaccctctcccctacctgcgaaacaccccgctacccgacagaaaccaccatgcttgccccctcagctctgcaccgccctcctcttagggatgccttccccaggggtctcccccacggacctgtcccttcctctctacattctttacgggggctgactgccctcatccatcccactgtccccctaaggccgcacaacctgcctgcgatacctcctgctcggcctgctcctcacctgcctgctgttaggagtgaccgccatctgcctgggagtgcgctgtgagtaaggctgtccctacttcccacttacaccgaacgactttcgtcccgactctcgccccaaagctgatcttcctcagcagggatcatagtcactaccaccacctccttagctttgggtttggtttccagccagggctgttgtcttcctgaattgtcctcacctaatccagtacctccttacgctttagtcagtcaaatcttgtatttcagcctgtgatgcaaaaagttgcaagaagcagaaaaagggctgatgctgcagtctcagggcactagggcagggctggagaagacatccaccaaatctctgtggccaaacagatctgcaggtgtctcagcagctccagcagacgaacagggttctggaagtcactaacagcagcctgaggcagcagctccgcctcaagataacgcagctgggacagagtgcagaggatctgcaggggtccaggagagagctggcgcagagtcaggaagcactacaggtggaacagagggctcatcaggcggccgaagggcagctacaggcctgccaggcagacagacagaagacgaaggagaccttgcaaagtgaggagcaacagaggagggccttggagcagaagctgagcaacatggagaacagactgaagcccttcttcacatgcggctcagcagacacctgctgtccgtcgggatggataatgcatcagaaaagctgcttttacatctcacttacttcaaaaaattggcaggagagccaaaaacaatgtgaaactctgtcttccaagctggccacattcagtgaaatttatccacaatcacactcttactacttcttaaattcactgttgccaaatggtggttcagggaattcatattggactggcctcagctctaacaaggattggaagttgactgatgatacacaacgcactaggacttatgctcaaagctcaaaatgtaacaaggtacataaaacttggtcatggtggacactggagtcagagtcatgtagaagttctcttccctacatctgtgagatgacagctttcaggtttccagattaggacagtcctttgcactgagttgacactcatgccaacaagaacctgtgcccctccttcctaacctgaggcctggggttcctcagaccatctccttcattctgggcagtgcccagccaccggctgacccacacctgacacttccagccagtctgctgcctgctccctcttcctgaaactggactgttcctgggaaaagggtgaagccacctctagaagggactttggcctccccccaagaacttcccatggtagaatggggtgggggaggagggcgcacgggctgagcggataggggcggcccggagccagccaggcagttttattgaaatctttttaaataattgcacgtgttagtctcatgtgtcagc

SEQ ID NO: 6046 - protein, 144 aa, Homo sapiens; identical to SEQ ID NO: 6034

SEQ ID NO: 6047 - DNA, 1613 bp, Homo sapiens
caccaccaatcatccgagctgttggcatgtgtcacagggccaattgctaagccgtgcagtcacagagggaacacagagcctagttgtaaacggacagagacgagaggggcaagggaggacagtggatgacagggaagacgagtgggggcagagctgctcaggaccatggctgaggccatcacctatgcagatctgaggtttgtgaaggctcccctgaagaagagcatctccagccggttaggacaggacccaggggctgatgatgatggggaaatcacctacgagaatgttcaagtgcccgcagtcctaggggtgccctcaagcttggcttcttctgtactaggggacaaagcagcggtcaagtcggagcagccaactgcgtcctggagagccgtgacgtcaccagctgtcgggcggattctcccctgccgcacaacctgcctgcgatacctcctgctcggcctgctcctcacctgcctgctgttaggagtgaccgccatctgcctgggagtgcgctatctgcaggtgtctcagcagctccagcagacgaacagggttctggaagtcactaacagcagcctgaggcagcagctccgcctcaagataacgcagctgggacagagtgcagaggatctgcaggggtccaggagagagctggcgcagagtcaggaagcactacaggtggaacagagggctcatcaggcggccgaagggcagctacaggcctgccaggcagacagacagaagacgaaggagaccttgcaaagtgaggagcaacagaggagggccttggagcagaagctgagcaacatggagaacagactgaagcccttcttcacatgcggctcagcagacacctgctgtccgtcgggatggataatgcatcagaaaagctgcttttacatctcacttacttcaaaaaattggcaggagagccaaaaacaatgtgaaactctgtcttccaagctggccacattcagtgaaatttatccacaatcacactcttactacttcttaaattcactgttgccaaatggtggttcagggaattcatattggactggcctcagctctaacaaggattggaagttgactgatgatacacaacgcactaggacttatgctcaaagctcaaaatgtaacaaggtacataaaacttggtcatggtggacactggagtcagagtcatgtagaagttctcttccctacatctgtgagatgacagctttcaggtttccagattaggacagtcctttgcactgagttgacactcatgccaacaagaacctgtgcccctccttcctaacctgaggcctggggttcctcagaccatctccttcattctgggcagtgcccagccaccggctgacccacacctgacacttccagccagtctgctgcctgctccctcttcctgaaactggactgttcctgggaaaagggtgaagccacctctagaagggactttggcctccccccaagaacttcccatggtagaatggggtgggggaggagggcgcacgggctgagcggataggggcggcccggagccagccaggcagttttattgaaatctttttaaataattgcacgtgttagtctcatgtgtcagc

SEQ ID NO: 6048 - protein, 359 aa, Homo sapiens; identical to SEQ ID NO: 813

SEQ ID NO: 6049 - DNA, 1348 bp, Homo sapiens
ctcacaggcccctgggtgatagactcctgccactactatctccttgctccaatccatccctcccttctctcctctccccagagcggatacctgctgagccgcatgtgaagaagggcttcagtctgttctccatgttgctcagcttctgctccaaggccctcctctgttgctcctcactttgcaaggtctccttcgtcttctgtctgtctgcctggcaggcctgtagctgcccttcggccgcctgatgagccctctgttccacctgtagtgcttcctgactctgcgccagctctctcctggacccctgcagatcctctgcactctgtcccagctgcgttatcttgaggcggagctgctgcctcaggctgctgttagtgacttccagaaccctgttcgtctgctggagctgctgagacacctgcagatctgtttggccacagagatttggtggatgtcttctccagccctgccctagtgccctgagactgcagcatcagccctttttctgcttcttgcaactttttgcatcacaggctgaaatacaagatttgactgactaaagcgtaaggaggtactggattaggtgaggacaattcaggaagacaacagccctggctggaaaccaaacccaaagctaaggaggtggtggtagtgactatgatccctgctgaggaagatcagctttggggcgagagtcgggacgaaagtcgttcggtgtaagtgggaagtagggacagccttactcacagcgcactcccaggcagatggcggtcactcctaacagcaggcaggggggcggtgcacgtcggattcaggcgcaccggatgaaggtgaatgtggcacggcagcccgggcgtcggaaggactgcgcccgggtttatcccggaaggagctgcaccccgcggggcccagcgccatccgcagccgggacaggcgcgagcacttggccccgcggctgccccgcacaggcacactcacaggggagaatccgcccgacagctggtgacgtcacggctctccaggacgcagttggctgctccgacttgaccgctgtcgaggggagcatccagtgtgagaccggaagccccgagtgttgccccttctcctcctgcgcacccgcttcgccctcgccactgggaaactccagtctgccctacgttgcctgctagagctgctctgggacacagtgtcactctcctgagttcctcctctgcccgggactctctcggcttcctcctgggtctcactgtatcttttcccgggaccccctcatctctcctagttctccctttatcgtttcctcagaggccccttatctgtcggctccaaaccctctccccctttgctc

SEQ ID NO: 6050 - protein, 134 aa, Homo sapiens [sequence omitted]

SEQ ID NO: 6051 - DNA, 826 bp, Homo sapiens
gtaaacggacagagacgagaggggcaagggaggacagtggatgacagggaagacgagtgggggcagagctgctcaggaccatggctgaggccatcacctatgcagatctgagacccaggggctgatgatgatggggaaatcacctacgagaatgttcaagtgcccgcagtcctaggggtgccctcaagcttggcttcttctgtactaggggacaaagcagcggtcaagtcggagcagccaactgcgtcctggagagccgtgacgtcaccagctgtcgggcggattctcccctgccgcacaacctgcctgcgatacctcctgctcggcctgctcctcacctgcctgctgttaggagtgaccgccatctgcctgggagtgcgctcctgtgatgcaaaaagttgcaagaagcagaaaaagggctgatgctgcagtctcagggcactagggcagggctggagaagacatccaccaaatctctgtggccaaacagatctgcaggtgtctcagcagctccagcagacgaacagggttctggaagtcactaacagcagcctgaggcagcagctccgcctcaagataacgcagctgggacagagtgcagaggatctgcaggggtccaggagagagctggcgcagagtcaggaagcactacaggtggaacagagggctcatcaggcggccgaagggcagctacaggcctgccaggcagacagacagaagacgaaggagaccttgcaaagtgaggagcaacagaggagggccttggagcagaagctgagcaacatggagaacagactgaagcccttcttcacatgcggctcagcag

SEQ ID NO: 6052 - protein, 40 aa, Homo sapiens
MLQSQGTRAGLEKTSTKSLWPNRSAGVSAAPADEQGSGSH

SEQ ID NO: 6053 - DNA, 901 bp, Homo sapiens
gtgcagtcacagagggaacacagagcctagttgtaaacggacagagacgagaggggcaagggaggacagtggatgacagggaagacgagtgggggcagagctgctcaggaccatggctgaggccatcacctatgcagatctgaggtttgtgaaggctcccctgaagaagagcatctccagccggttaggacaggacccaggggctgatgatgatggggaaatcacctacgagaatgttcaagtgcccgcagtcctaggggtgccctcaagcttggcttcttctgtactaggggacaaagcagcggtcaagtcggagcagccaactgcgtcctggagagccgtgacgtcaccagctgtcgggcggattctcccctgccgcacaacctgcctgcgatacctcctgctcggcctgctcctcacctgcctgctgttaggagtgaccgccatctgcctgggagtgcgctgtgagtaaggctgtccctacttcccacttacaccgaacgactttcgtcccgactctcgccccaaagctgatcttcctcagcagggatcatagtcactaccaccacctccttagctttgggtttggtttccagccagggctgttgtcttcctgaattgtcctcacctaatccagtacctccttacgctttagtcagtcaaatcttgtatttcagcctgtgatgcaaaaagttgcaagaagcagaaaaagggctgatgctgcagtctcagggcactagggcagggctggagaagacatccaccaaatctctgtggccaaacagatctgcaggtgtctcagcagctccagcagacgaacagggttctggaagtcactaacagcagcctgaggcagcagctccgcctcaagataacgcagctgggacagagtgcagaggat

SEQ ID NO: 6054 - protein, 119 aa, Homo sapiens
MAEAITYADLRFVKAPLKKSISSRLGQDPGADDDGEITYENVQVPAVLGVPSSLASSVLGDKAAVKSEQPTASWRAVTSPAVGRILPCRTTCLRYLLLGLLLTCLLLGVTAICLGVRCE

SEQ ID NO: 6055 - DNA, 774 bp, Homo sapiens
agtctcgacgcttcggggccaccccagggtctggtccctgacgacgcgcagtgagggccccgccgctaccccagcagtcgcctcccaagttcgcggaacgcagctgaccggctccctctggactgggtgacatgactgctcccaagcagtcgtttgtaaactgagtttctgtaaaacaattttatttttcatatgtgactgtagcggggtatgatttgaactttgttttccgtcccccagcccggattctctgtcttctcctgtacagccgttccgttttcttacctcgtctccgtcaccgaggccctcagccctgaacacaaggactgggcagtttccctattgattcctgaacctggaacttaagacatcttccgaggggcccccccttgccacaccctctagctgatcgactcacaaatacctgtgatttctctccccgtctccacctccagacccaggggctgatgatgatggggaaatcacctacgagaatgttcaagtgcccgcagtcctaggggtgccctcaagcttggcttcttctgtactaggggacaaagcagcggtcaagtcggagcagccaactgcgtcctggagagccgtgacgtcaccagctgtcgggcggattctcccctgccgcacaacctgcctgcgatacctcctgctcggcctgctcctcacctgcctgctgttaggagtgaccgccatctgcctgggaggttctggaagtcactaacagcagcctgaggcagcagctccgcctcaagataacgc

SEQ ID NO: 6056 - protein, 101 aa, Homo sapiens
FLSPSPPPDPGADDDGEITYENVQVPAVLGVPSSLASSVLGDKAAVKSEQPTASWRAVTSPAVGRILPCRTTCLRYLLLGLLLTCLLLGVTAICLGGSGSH

SEQ ID NO: 6057 - DNA, 661 bp, Homo sapiens
agggtctggtccctgacgacgcgcagtgagggccccgccgctaccccagcagtcgcctcccaagttcgcggaacgcagctgaccggctccctctggactggcccggattctctgtcttctcctgtacagccgttccgttttcttacctcgtctccgtcaccgaggccctcagccctgaacacaaggactgggcagtttccctattgattcctgaacctggaacttaagacatcttccgaggggcccccccttgccacaccctctagctgatcgactcacaaatacctgtgatttctctccccgtctccacctccagacccaggggctgatgatgatggggaaatcacctacgagaatgttcaagtgcccgcagtcctaggggtgccctcaagcttggcttcttctgtactaggggacaaagcagcggtcaagtcggagcagccaactgcgtcctggagagccgtgacgtcaccagctgtcgggcggattctcccctgccgcacaacctgcctgcgatacctcctgctcggcctgctcctcacctgcctgctgttaggagtgaccgccatctgcctgggagtgcgctcctgtgatgcaaaaagttgcaagaagcagaaaaagggctgatgctgcagtctcagggcactagggcagggctgga

SEQ ID NO: 6058 - protein, 111 aa, Homo sapiens
FLSPSPPPDPGADDDGEITYENVQVPAVLGVPSSLASSVLGDKAAVKSEQPTASWRAVTSPAVGRILPCRTTCLRYLLLGLLLTCLLLGVTAICLGVRSCDAKSCKKQKKG

SEQ ID NO: 6059 - DNA, 937 bp, Homo sapiens
atcatccgagctgttggcatgtggcctgttcctgaacccccagttactggaacccccaggatgatgagaagcgagggatgcaaaccaggaacccccagtctcatggggagaacggagcctcaccctggagctggggagatcgtctggacccaggggctgatgatgatggggaaatcacctacgagaatgttcaagtgcccgcagtcctaggggtgccctcaagcttggcttcttctgtactaggggacaaagcagcggtcaagtcggagcagccaactgcgtcctggagagccgtgacgtcaccagctgtcgggcggattctcccctgtgagtgtgcctgtgcggggcagccgcggggccaagtgctcgcgcctgtcccggctgcggatggcgctgggccccgcggggtgcagctccttccgggataaacccgggcgcagtccttccgacgcccgggctgccgtgccacattcaccttcatccggtgcgcctgaatccgacgtgcaccgcccccctgcggatggtcccaattcacctacctgccccccttcccctctctccgtctgatatttccttccccttctcccaggtaacgcccccgagtccccaccagcactgattctggaacaccctctcccctacctgcgaaacaccccgctacccgacagaaaccaccatgcttgccccctcagctctgcaccgccctcctcttagggatgccttccccaggggtctcccccacggacctgtcccttcctctctacattctttacgggggctgactgccctcatccatcccactgtccccctaaggccgcacaacctgcctgcgatacctcctgctcggcctgctcctcacctgcctgctgttaggagtgaccgccatctgcctgggagtgcgctgtgagtaaggctgtccctacttcccacttacacc

SEQ ID NO: 6060 - protein, 116 aa, Homo sapiens
MQTRNPQSHGENGASPWSWGDRLDPGADDDGEITYENVQVPAVLGVPSSLASSVLGDKAAVKSEQPTASWRAVTSPAVGRILPCECACAGQPRGQVLAPVPAADGAGPRGVQLLPG

SEQ ID NO: 6061 - DNA, 725 bp, Homo sapiens
agtctcgacgcttcggggccaccccagggtctggtccctgacgacgcgcagtgagggccccgccgctaccccagcagtcgcctcccaagttcgcggaacgcagctgaccggctccctctggactgggtgacatgactgctcccaagcagtcgtttgtaaactgagtttctgtaaaacaattttatttttcatatgtgactgtagcggggtatgatttgaactttgttttccgtcccccagcccggattctctgtcttctcctgtacagccgttccgttttcttacctcgtctccgtcaccgaggccctcagccctgaacacaaggactgggcagtttccctattgattcctgaacctggaacttaagacatcttccgaggggcccccccttgccacaccctctagctgatcgactcacaaatacctgtgatttctctccccgtctccacctccagacccaggggctgatgatgatggggaaatcacctacgagaatgttcaagtgcccgcagtcctaggggtgccctcaagcttggcttcttctgtactaggggacaaagcagcggtcaagtcggagcagccaactgcgtcctggagagccgtgacgtcaccagctgtcgggcggattctcccctgccgcacaacctgcctgcgatacctcctgctcggcctgctcctcacctgcctgctgttaggagtgaccgccatctgcctgggagtgcgct

SEQ ID NO: 6062 - protein, 97 aa, Homo sapiens
FLSPSPPPDPGADDDGEITYENVQVPAVLGVPSSLASSVLGDKAAVKSEQPTASWRAVTSPAVGRILPCRTTCLRYLLLGLLLTCLLLGVTAICLGV

SEQ ID NO: 6063 - DNA, 582 bp, Homo sapiens
ccccagggtctggtccctgacgacgcgcagtgagggccccgccgctaccccagcagtcgcctcccaagttcgcggaacgcagctgaccggctccctctggactggcccggattctctgtcttctcctgtacagccgttccgttttcttacctcgtctccgtcaccgaggccctcagccctgaacacaaggactgggcagtttccctattgattcctgaacctggaacttaagacatcttccgaggggcccccccttgccacaccctctagctgatcgactcacaaatacctgtgatttctctccccgtctccacctccagacccaggggctgatgatgatggggaaatcacctacgagaatgttcaagtgcccgcagtcctaggggtgccctcaagcttggcttcttctgtactaggggacaaagcagcggtcaagtcggagcagccaactgcgtcctggagagccgtgacgtcaccagctgtcgggcggattctcccctgccgcacaacctgcctgcgatacctcctgctcggcctgctcctcacctgcctgctgttaggagtgaccgccatctgcctggg

SEQ ID NO: 6064 - protein, 94 aa, Homo sapiens
FLSPSPPPDPGADDDGEITYENVQVPAVLGVPSSLASSVLGDKAAVKSEQPTASWRAVTSPAVGRILPCRTTCLRYLLLGLLLTCLLLGVTAIC

SEQ ID NO: 6065 - DNA, 621 bp, Homo sapiens
aattgctaagccgtgcagtcacagagggaacacagagcctagttgtaaacggacagagacgagaggggcaagggaggacagtggatgacagggaagacgagtgggggcagagctgctcaggaccatggctgaggccatcacctatgcagatctgagacccaggggctgatgatgatggggaaatcacctacgagaatgttcaagtgcccgcagtcctaggggtgccctcaagcttggcttcttctgtactaggggacaaagcagcggtcaagtcggagcagccaactgcgtcctggagagccgtgacgtcaccagctgtcgggcggattctcccctgtgagtgtgcctgtgcggggcagccgcggggccaagtgctcgcgcctgtcccggctgcggatggcgctgggccccgcggggtgcagctccttccgggataaacccgggcgcagtccttccgacgcccgggctgccgtgccacattcaccttcatccggtgcgcctgaatccgacgtgcaccgcccccctgcggatggtcccaattcacctacctgccccccttcccctctctccgtctgatatttccttccccttctcccaggtaacgcccccgagtccccacca

SEQ ID NO: 6066 - protein, 59 aa, Homo sapiens
MALGPAGCSSFRDKPGRSPSDARAAVPHSPSSGAPESDVHRPPADGPNSPTCPPSPLSV

SEQ ID NO: 6067 - DNA, 618 bp, Homo sapiens
aattgctaagccgtgcagtcacagagggaacacagagcctagttgtaaacggacagagacgagaggggcaagggaggacagtggatgacagggaagacgagtgggggcagagctgctcaggaccatggctgaggccatcacctatgcagatctgaggtttgtgaaggctcccctgaagaagagcatctccagccggttaggacaggacccaggggctgatgatgatggggaaatcacctacgagaatgttcaagtgcccgcagtcctaggggtgccctcaagcttggcttcttctgtactaggggacaaagcagcggtcaagtcggagcagccaactgcgtcctggagagccgtgacgtcaccagctgtcgggcggattctcccctgtgagtgtgcctgtgcggggcagccgcggggccaagtgctcgcgcctgtcccggctgcggatggcgctgggccccgcggggtgcagctccttccgggataaacccgggcgcagtccttccgacgcccgggctgccgtgccacattcaccttcatccggtgcgcctgaatccgacgtgcaccgcccccctgcggatggtcccaattcacctacctgccccccttcccctctct

SEQ ID NO: 6068 - protein, 120 aa, Homo sapiens
MAEAITYADLRFVKAPLKKSISSRLGQDPGADDDGEITYENVQVPAVLGVPSSLASSVLGDKAAVKSEQPTASWRAVTSPAVGRILPCECACAGQPRGQVLAPVPAADGAGPRGVQLLPG

SEQ ID NO: 6069 - DNA, 570 bp, Homo sapiens
aagatatttctacttaacgtgtgagttaatcagatcccttgtctagcttataaatttctagaatcatatagccaaaaggaggctgacagatctggcccaaagttacacccactgcaggaactgccctatgatttcttcttgaacacttccagaagctgaacctctccttgacccaggggctgatgatgatggggaaatcacctacgagaatgttcaagtgcccgcagtcctaggggtgccctcaagcttggcttcttctgtactaggggacaaagcagcggtcaagtcggagcagccaactgcgtcctggagagccgtgacgtcaccagctgtcgggcggattctcccctgtgagtgtgcctgtgcggggcagccgcggggccaagtgctcgcgcctgtcccggctgcggatggcgctgggccccgcggggtgcagctccttccgggataaacccgggcgcagtccttccgacgcccgggctgccgtgccacattcaccttcatccggtgcgcctgaatccgacgtgcaccgcccccctgcggatggtcccaattcacctacctgccccc

SEQ ID NO: 6070 - protein, 52 aa, Homo sapiens
MALGPAGCSSFRDKPGRSPSDARAAVPHSPSSGAPESDVHRPPADGPNSPTC

SEQ ID NO: 6071 - DNA, 784 bp, Homo sapiens
acgtgcatggcatttggtgctgaagacccgggacaggaggactccttcgggaggcgggtcccctgtcctcgccctaactctgtgaggagatccacctacaacctcgggtcctcagaccaaccagcccaaggaacatctcaccaatttcaaattgggaaaaaactccaacaattggattccggccctcaaaccccacaacaggacttaattaaccttgccttcaaggtgtacaataatagagaagaggcagccaagtgacaaggcatctctgagttacagctactcgcctctgctgtaagacaacccacaaccacgtctccagcacacaaaaacttcagaacatccaagccacagttcccaggggctccttcaaaacctcctcgtggacctggcttcaaatgccaaaagcctggccactgggcctgagaatgcccacagctcgggattcctcctaggccgtgccctgtctgtgtgggcccccactggaggttggactgtccgactcacatcgccaccattcctaaagctcctggagctcaaacccaacgttccttggctgactccttcccacatctgctcggcttagcagctgaagaccgacactgcccaatcgccttggaagccccctggaccatcacagacgcgcgtgacagtccccagcactgcagagatctgagatccaataacagtctgcagaggtctactcacaccatagccactgctctgggattcccattccatttaggcctcctgattgccccatgtgtccttacaataaacaacg

SEQ ID NO: 6072 - protein, 83 aa, Homo sapiens
MAFGAEDPGQEDSFGRRVPCPRPNSVRRSTYNLGSSDQPAQGTSHQFQIGKKLQQLDSGPQTPQQDLINLAFKVYNNREEAAK

SEQ ID NO: 6073 - DNA, 678 bp, Homo sapiens
tcaggtatgccacgtgttgcaagctcatccctcggacctgtgaaaaaactccaacaattggattccggccctcaaaccccacaacaggacttaattaaccttgccttcaaggtgtacaataatagagaagaggcagccaagtgacaaggcatctctgagttacagctactcgcctctgctgtaagacaacccacaaccacgtctccagcacacaaaaacttcagaacatccaagccacagttcccaggggctccttcaaaacctcctcgtggacctggcttcaaatgccaaaagcctggccactgggcctgagaatgcccacagctcgggattcctcctaggccgtgccctgtctgtgtgggcccccactggaggttggactgtccgactcacatcgccaccattcctaaagctcctggagctcaaacccaacgttccttggctgactccttcccacatctgctcggcttagcagctgaagaccgacactgcccaatcgccttggaagccccctggaccatcacagacgcgcgtgacagtccccagcactgcagagatctgagatccaataacagtctgcagaggtctactcacaccatagccactgctctgggattcccattccatttaggcctcctgattgccccatgtgtccttacaataaacaacgcttcactt

SEQ ID NO: 6074 - protein, 45 aa, Homo sapiens
MPRVASSSLGPVKKLQQLDSGPQTPQQDLINLAFKVYNNREEAAK

SEQ ID NO: 6075 - DNA, 948 bp, Homo sapiens
gaaagaggagggacagctggggccctaggagctccccctgagggtctgtccctgggaacggggcgctaggacgggcactccttctggctggaatgctacgccggtgagggaaaggagtccactagggaagtacctggaggtggagacggggagagaaatcacagaaactcagtttacaaacgactgcttgggagcagtcatgtcacccagtccagagggagccggtcagctgcgttccgcgaacttgggaggcgactgctggggtagcggcggggccctcactgcgcgtcgtcagggaccagaccctggggtggccccgaagcgtcgagactacaactcccgggatgccgcgggccaggctgcatcccgcctgcgcagaagtggtggcaactccgcccctcgccaggcggcggcgctgcggactcagtcctaagcgggcgaaggcggcgagcgccgtgggtctgggcgggccaggagaaccgggtgcttcgaggagatctgcgggctgggttgggggcgtttgaccccttggcttgtcccagtgggtaggcgggactccaacccccgcctcctccagggtaaagctctcacgtccacctggcgcgacgctgagccatcttcagaagcaccgcagccctcagaaccccacatcccgctgccggtggttccccgcatccggtgtccgcccccgaagcctccctccctccctcctccgcatccccagctacctgcccttaaccgcgacctgggcctctcctggggaggcccagggtggggtcctcagaggtccagggacccaggggcatttgtggggtctgtaggggggtgggcttaagggaagggtggtccctttcaaattgggaccaccaggcaggaatcaggcgcacgggttcctcctctgtggcttcctgtggcactccaagtgggaagaagagaagcttggaagtg

SEQ ID NO: 6076 - protein, 77 aa, Homo sapiens [sequence omitted]

SEQ ID NO: 6077 - DNA, 974 bp, Homo sapiens
gagagttctctcttaccgagaagtccccactcatcccctaaactctgcgttgcagctctggagagtctgtggaagaggtcccgctgtatgggaacctgcattatctacagacaggacggctgtctcaagacccagagccagaccagcaggatccaactcttggaggccctgccagggctgcagaggaggtgatgtgctataccagcctgcagctgcggcctcctcagggtcggatccccggtcctggaacccccgtcaagtactcggaggtggtgctggactctgagccaaagtcccaggcctcgggccccgagccggagctctatgcctcagtatgtgcccagacccgcagggcccgggcctccttcccggatcaggcctatgccaacagccagcctgcagccagctgagatggagggcctggcacagcggggcgtgcactgccccagccccccgtagcaggggcatgactgtttcccaaccagcacccaaagacgggcgccattgccaagtcacaggatgtgatctaccccggacttcctatctgagcttcaagggagacatctcagggcaaagctttcgtgatggaggaggcaaagacagtagccccctccttatttcttttttctatctgttcctcttagcccccaaactcccaggttctcacttccttcttctggagtttaaccagatcctccccacccccgctccctcatagtctacccccacgcctcagtgtctcctcaggcacaggaagtgggcggtgggggaggggtaagggcctgacagtgggtgggtgggtatattcctcaggagtccacagactggagtggacctggaacttagagacgggagggacccgagcctggcttttgacctaagaaccctagcaggagaatacagtctccatcctgctgtctctgtcctgtccccaagttttcaaataaaactttccaaaaagtgtttagattttt

SEQ ID NO: 6078 - protein, 34 aa, Homo sapiens
MGTCIIYRQDGCLKTQSQTSRIQLLEALPGLQRR

SEQ ID NO: 6079 - DNA, 1098 bp, Homo sapiens
cagtattggggatgctgagctgcggggtacgggcctgaggagggatgggagtaagaagtgctgtggaaaccgtcaggccatgaaccaggctgaccctcggctcagagcagtgtgcttgtggactctcacatctgcagccatgagcagaggcgacaactgcacggatctactcgcactggctctggagagtctgtggaagaggtcccgctgtatgggaacctgcattatctacagacaggacggctgtctcaagacccagagccagaccagcaggatccaactcttggaggccctgccagggctgcagaggaggtgatgtgctataccagcctgcagctgcggcctcctcagggtcggatccccggtcctggaacccccgtcaagtactcggaggtggtgctggactctgagccaaagtcccaggcctcgggccccgagccggagctctatgcctcagtatgtgcccagacccgcagggcccgggcctccttcccggatcaggcctatgccaacagccagcctgcagccagctgagatggagggcctggcacagcggggcgtgcactgccccagccccccgtagcaggggcatgactgtttcccaaccagcacccaaagacgggcgccattgccaagtcacaggatgtgatctaccccggacttcctatctgagcttcaagggagacatctcagggcaaagctttcgtgatggaggaggcaaagacagtagccccctccttatttcttttttctatctgttcctcttagcccccaaactcccaggttctcacttccttcttctggagtttaaccagatcctccccacccccgctccctcatagtctacccccacgcctcagtgtctcctcaggcacaggaagtgggcggtgggggaggggtaagggcctgacagtgggtgggtgggtatattcctcaggagtccacagactggagtggacctggaacttagagacgggagggacccgagcctggcttttgacctaagaaccctagcaggagaatacagtctccatcctgctgtctctgtcctgtccccaagttttcaaataaaactttccaaaaagtgtttagattttt

SEQ ID NO: 6080 - protein, 78 aa, Homo sapiens
MNQADPRLRAVCLWTLTSAAMSRGDNCTDLLALALESLWKRSRCMGTCIIYRQDGCLKTQSQTSRIQLLEALPGLQRR

SEQ ID NO: 6081 - DNA, 1252 bp, Homo sapiens
cagagactttgccaccaccagtattggggatgctgagctgcggggtacgggcctgaggagggatgggagtaagaagtgctgtggaaaccgtcaggccatgaaccaggctgaccctcggctcagagcagtgtgcttgtggactctcacatctgcagccatgagcagaggcgacaactgcacggatctactcgcactgggaatcccctccataacccaggcctggggactgtgggtcctcttaggggctgtgacgctgctatttctcatctcgctggctgcacacttgtcccagtggaccaggggccggagcaggagccatccggggcagggacgctctggagagtctgtggaagaggtcccgctgtatgggaacctgcattatctacagacaggacggctgtctcaagacccagagccagaccagcaggatccaactcttggaggccctgccagggctgcagaggaggtgatgtgctataccagcctgcagctgcggcctcctcagggtcggatccccggtcctggaacccccgtcaagtactcggaggtggtgctggactctgagccaaagtcccaggcctcgggccccgagccggagctctatgcctcagtatgtgcccagacccgcagggcccgggcctccttcccggatcaggcctatgccaacagccagcctgcagccagctgagatggagggcctggcacagcggggcgtgcactgccccagccccccgtagcaggggcatgactgtttcccaaccagcacccaaagacgggcgccattgccaagtcacaggatgtgatctaccccggacttcctatctgagcttcaagggagacatctcagggcaaagctttcgtgatggaggaggcaaagacagtagccccctccttatttcttttttctatctgttcctcttagcccccaaactcccaggttctcacttccttcttctggagtttaaccagatcctccccacccccgctccctcatagtctacccccacgcctcagtgtctcctcaggcacaggaagtgggcggtgggggaggggtaagggcctgacagtgggtgggtgggtatattcctcaggagtccacagactggagtggacctggaacttagagacgggagggacccgagcctggcttttgacctaagaaccctagcaggagaatacagtctccatcctgctgtctctgtcctgtccccaagttttcaaataaaactttccaaaaagtgtttagattttt

SEQ ID NO: 6082 - protein, 196 aa, Homo sapiens; identical to SEQ ID NO: 815

SEQ ID NO: 6083 - DNA, 281 bp, Homo sapiens
catccctcccctcccccttcctccccggaaaccagagactttgccacgcctcagtgtctcctcaggcacaggaagtgggcggtgggggaggggtaagggcctgacagtgggtgggtgggtatattcctcaggagtccacagactggagtggacctggaacttagagacgggagggacccgagcctggcttttgacctaagaaccctagcaggagaatacagtctccatcctgctgtctctgtcctgtccccaagttttcaaataaaactttccaaaaagtg

SEQ ID NO: 6084 - protein, 65 aa, Homo sapiens
IPPLPLPPRKPETLPRLSVSSGTGSGRWGRGKGLTVGGWVYSSGVHRLEWTWNLETGGTRAWLLT

SEQ ID NO: 6085 - DNA, 620 bp, Homo sapiens
cagtattggggatgctgagctgcggggtacgggcctgaggagggatgggagtaagaagtgctgtggaaaccgtcaggccatgaaccaggctgaccctcggctcagagcagtgtgcttgtggactctcacatctgcagccatgagcagaggcgacaactgcacggatctactcgcactgggaatcccctccataacccaggcctggggactgtgggtcctcttaggggctgtgacgctgctatttctcatctcgctggctgcacacttgtcccagtggaccaggggccggagcaggagccatccggggcagggacggtgggtgaaggacaacagggatgggttgactgagagttctctcttaccgagaagtccccactcatcccctaaactctgcgttgcagctctggagagtctgtggaagaggtcccgctgtatgggaacctgcattatctacagacaggacggctgtctcaagacccagagccagaccagcaggatccaactcttggaggccctgccagggtgagtcaactgtggctggagaaaagggggagggaaggaagtggggggcttttcgggcttttccgagggtccagtgaacttctaacagccttgcatct

SEQ ID NO: 6086 - protein, 148 aa, Homo sapiens
MNQADPRLRAVCLWTLTSAAMSRGDNCTDLLALGIPSITQAWGLWVLLGAVTLLFLISLAAHLSQWTRGRSRSHPGQGRWVKDNRDGLTESSLLPRSPHSSPKLCVAALESLWKRSRCMGTCIIYRQDGCLKTQSQTSRIQLLEALPG

SEQ ID NO: 6087 - DNA, 1486 bp, Homo sapiens
gcccaggagttcaagaccagcctgggcaacacagtgagtgagaccctgtctctatttaagaaaaaataattaagaaattttattaaaaaagaagaatcaggaaaccaagtccaacccaactaaacctcaaatgaaccagcccctaacacagatgaggggatttgggactgataagctctgtgctgtgtccatggcccgtcatttatcaaggctgcagctttgtaaatgtggctatttttatgttgtgtatagtttctatcatttatttttccactggatttgagtaaagttttttttcttttttttgggaaagacccttctgtctcagttttgctatgagaaaagggatttttgggccctgaacgcgggcatgctggtggcctcaggaatacgaggaaaagagctggagctccctctatcttctctgctgtcacactggaaggcagcctctttttgtcctaataaggacagctcttcaagaaggcccagttgtccttaggcacctagtatgggtgtgtacaaccaactaggatcgaaaaaacacacaggagcactccatcatgaaaacagactttgttttagtcgaccttcagctgtcgtccctccttcccagccaaggctgtgactggggccctttgccacagcctggctgcaccttctccgtagtccccgccccacctcccaggaagtagctaggttccatgtctctgtgctccagtttgtgggctcctcccaggcctgactgtcaccaatctcctcctcgtcctcctttaaacagaagtcctcaggaagaggtctgctggcctctgtgtggggagagatcaggaatgttccagtttcagagactttgtctccacctccagcagactcgcctcccgagccttcacctggttctgaagcctccatatccttgtccggcttgctatcttgcagcagctcgtggatggtccatagcttcatgttcagaagctcctgctgggctccagccagagtagtcacacgctcaaaaagggggtccagctgggccatcaggttgttcaggtgctgctctgtctgggccagctgttgtgtcaactgggccagctgttgctctgactgcagtggctgctgcttgcttgcctcctcgtggagaaccgcagtttcatctttcccctgcaaacacttgtacagcacaaaagccgcgacggccgcggtgtacagcgcccccagaggcagcgacccggcccgggtccgctcgcgttgatccttgagcggtggtcgccgccggggttccgtggctccagagccggggtgggctgcgttccctgggtgtgcccggaggtcgggattggcgcggtctcctaggaccccggacagcgcagacacaagcagcagccccaccacacccaagagcgaaactgcgcccgccattgccggcccacgggtggagggatcgggcgggcggtgccgaagcggtccggcattggccggccgccccaacgcgcac

SEQ ID NO: 6088 - protein, 99 aa, Homo sapiens
MVHSFMFRSSCWAPARVVTRSKRGSSWAIRLFRCCSVWASCCVNWASCCSDCSGCCLLASSWRTAVSSFPCKHLYSTKAATAAVYSAPRGSDPARVRSR

SEQ ID NO: 6089 - DNA, 1577 bp, Homo sapiens
gcccaggagttcaagaccagcctgggcaacacagtgagtgagaccctgtctctatttaagaaaaaataattaagaaattttattaaaaaagaagaatcaggaaaccaagtccaacccaactaaacctcaaatgaaccagcccctaacacagatgaggggatttgggactgataagctctgtgctgtgtccatggcccgtcatttatcaaggctgcagctttgtaaatgtggctatttttatgttgtgtatagtttctatcatttatttttccactggatttgagtaaagttttttttcttttttttgggaaagacccttctgtctcagttttgctatgagaaaagggatttttgggccctgaacgcgggcatgctggtggcctcaggaatacgaggaaaagagctggagctccctctatcttctctgctgtcacactggaaggcagcctctttttgtcctaataaggacagctcttcaagaaggcccagttgtccttaggcacctagtatgggtgtgtacaaccaactaggatcgaaaaaacacacaggagcactccatcatgaaaacagactttgttttagtcgaccttcagctgtcgtccctccttcccagccaaggctgtgactggggccctttgccacagcctggctgcaccttctccgtagtccccgccccacctcccaggaagtagctaggttccatgtctctgtgctccagtttgtgggctcctcccaggcctgactgtcaccaatctcctcctcgtcctcctttaaacagaagtcctcaggaagaggtctgctggcctctgtgtggggagagatcaggaatgttccagtttcagagactttgtctccacctccagcagactcgcctcccgagccttcacctggttctgaagcctccatatccttgtccggcttgctatcttgcagcagctcgtggatggtccatagcttcatgttcagaagctcctgctgggctccagccagagtagtcacactgaagaaatgtccactcagtggctcccaacctatgtccccattcctccctcctgccacaaattccccaaaaattcacagaatcattgctctcctcaccgctcaaaaagggggtccagctgggccatcaggttgttcaggtgctgctctgtctgggccagctgttgtgtcaactgggccagctgttgctctgactgcagtggctgctgcttgcttgcctcctcgtggagaaccgcagtttcatctttcccctgcaaacacttgtacagcacaaaagccgcgacggccgcggtgtacagcgcccccagaggcagcgacccggcccgggtccgctcgcgttgatccttgagcggtggtcgccgccggggttccgtggctccagagccggggtgggctgcgttccctgggtgtgcccggaggtcgggattggcgcggtctcctaggaccccggacagcgcagacacaagcagcagccccaccacacccaagagcgaaactgcgcccgccattgccggcccacgggtggagggatcgggcgggcggtgccgaagcggtccggcattggccggccgccccaa

SEQ ID NO: 6090 - protein, 134 aa, Homo sapiens
MVHSFMFRSSCWAPARVVTLKKCPLSGSQPMSPFLPPATNSPKIHRIIALLTAQKGGPAGPSGCSGAALSGPAVVSTGPAVALTAVAAACLPPRGEPQFHLSPANTCTAQKPRRPRCTAPPEAATRPGSARVDP

SEQ ID NO: 6091 - DNA, 1396 bp, Homo sapiens
gcccaggagttcaagaccagcctgggcaacacagtgagtgagaccctgtctctatttaagaaaaaataattaagaaattttattaaaaaagaagaatcaggaaaccaagtccaacccaactaaacctcaaatgaaccagcccctaacacagatgaggggatttgggactgataagctctgtgctgtgtccatggcccgtcatttatcaaggctgcagctttgtaaatgtggctatttttatgttgtgtatagtttctatcatttatttttccactggatttgagtaaagttttttttcttttttttgggaaagacccttctgtctcagttttgctatgagaaaagggatttttgggccctgaacgcgggcatgctggtggcctcaggaatacgaggaaaagagctggagctccctctatcttctctgctgtcacactggaaggcagcctctttttgtcctaataaggacagctcttcaagaaggcccagttgtccttaggcacctagtatgggtgtgtacaaccaactaggatcgaaaaaacacacaggagcactccatcatgaaaacagactttgttttagtcgaccttcagctgtcgtccctccttcccagccaaggctgtgactggggccctttgccacagcctggctgcaccttctccgtagtccccgccccacctcccaggaagtagctaggttccatgtctctgtgctccagtttgtgggctcctcccaggcctgactgtcaccaatctcctcctcgtcctcctttaaacagaagtcctcaggaagaggtctgctggcctctggttctgaagcctccatatccttgtccggcttgctatcttgcagcagctcgtggatggtccatagcttcatgttcagaagctcctgctgggctccagccagagtagtcacacgctcaaaaagggggtccagctgggccatcaggttgttcaggtgctgctctgtctgggccagctgttgtgtcaactgggccagctgttgctctgactgcagtggctgctgcttgcttgcctcctcgtggagaaccgcagtttcatctttcccctgcaaacacttgtacagcacaaaagccgcgacggccgcggtgtacagcgcccccagaggcagcgacccggcccgggtccgctcgcgttgatccttgagcggtggtcgccgccggggttccgtggctccagagccggggtgggctgcgttccctgggtgtgcccggaggtcgggattggcgcggtctcctaggaccccggacagcgcagacacaagcagcagccccaccacacccaagagcgaaactgcgcccgccattgccggcccacgggtggagggatcgggcgggcggtgccgaagcggtccggcattggccggccgcccc

SEQ ID NO: 6092 - protein, 99 aa, Homo sapiens; identical to SEQ ID NO: 6088

SEQ ID NO: 6093 - DNA, 903 bp, Homo sapiens
ctatctcttctagtttcatatatctaaactggttccatcggttctattttataatgcaagtacgtaatagggtcacggctaaagacacagccctggaaggtactgtttttcaaaatgtactgtcaacttacatttcagggcctcctcccaaggagaacatgagaccacttcatatctggaactctagaaacactggctgcagcaatcaacctcctgtgccaaggctggccccactcttgtagcatggacactgctagctgggttcaaatcccagctccagcagttgccagcgctgggtgacctcgagcaagtgactactcctcactggattgtaggagaactaaatgtgatagtcattatttacagttcaccacacgctcttcacatccgttacctccctggatcctcaaaataacctcataatattggaaggccaacggactactgtctttattttacagacagggaagctgtgtcttgttcttggtaccctggcacccccatgggagattcgggctcaggggatccccacgcccggcggtcccgcacctgcaggggcacccctacccccggccgccccgtacctgcaaacacttgtacagcacaaaagccgcgacggccgcggtgtacagcgcccccagaggcagcgacccggcccgggtccgctcgcgttgatccttgagcggtggtcgccgccggggttccgtggctccagagccggggtgggctgcgttccctgggtgtgcccggaggtcgggattggcgcggtctcctaggaccccggacagcgcagacacaagcagcagccccaccacacccaagagcgaaactgcgcccgccattgccggcccacgggtggagggatcgggcgggcggtgccgaagcggtccggcattggccggc

SEQ ID NO: 6094 - protein, 62 aa, Homo sapiens
MQVRNRVTAKDTALEGTVFQNVLSTYISGPPPKENMRPLHIWNSRNTGCSNQPPVPRLAPLL

SEQ ID NO: 6095 - DNA, 1617 bp, Homo sapiens
gcccaggagttcaagaccagcctgggcaacacagtgagtgagaccctgtctctatttaagaaaaaataattaagaaattttattaaaaaagaagaatcaggaaaccaagtccaacccaactaaacctcaaatgaaccagcccctaacacagatgaggggatttgggactgataagctctgtgctgtgtccatggcccgtcatttatcaaggctgcagctttgtaaatgtggctatttttatgttgtgtatagtttctatcatttatttttccactggatttgagtaaagttttttttcttttttttgggaaagacccttctgtctcagttttgctatgagaaaagggatttttgggccctgaacgcgggcatgctggtggcctcaggaatacgaggaaaagagctggagctccctctatcttctctgctgtcacactggaaggcagcctctttttgtcctaataaggacagctcttcaagaaggcccagttgtccttaggcacctagtatgggtgtgtacaaccaactaggatcgaaaaaacacacaggagcactccatcatgaaaacagactttgttttagtcgaccttcagctgtcgtccctccttcccagccaaggctgtgactggggccctttgccacagcctggctgcaccttctccgtagtccccgccccacctcccaggaagtagctaggttccatgtctctgtgctccagtttgtgggctcctcccaggcctgactgtcaccaatctcctcctcgtcctcctttaaacagaagtcctcaggaagaggtctgctggcctctgtgtggggagagatcaggaatgttccagtttcagagactttgtctccacctccagcagactcgcctcccgagccttcacctggttctgaagcctccatatccttgtccggcttgctatcttgcagcagctcgtggatggtccatagcttcatgttcagaagctcctgctgggctccagccagagtagtcacactgaagaaatgtccactcagtggctcccaacctatgtccccattcctccctcctgccacaaattccccaaaaattcacagaatcattgctctcctcaccgctcaaaaagggggtccagctgggccatcaggttgttcaggtgctgctctgtctgggccagctgttgtgtcaactgggccagctgttgctctggggataagggaaaaaagggggcagaagtggttatgtatcttctgctgtcccctaaactcccccgacccagcacagacttctgctaaacccacctgactgcagtggctgctgcttgcttgcctcctcgtggagaaccgcagtttcatctttcccctgcaaacacttgtacagcacaaaagccgcgacggccgcggtgtacagcgcccccagaggcagcgacccggcccgggtccgctcgcgttgatccttgagcggtggtcgccgccggggttccgtggctccagagccggggtgggctgcgttccctgggtgtgcccggaggtcgggattggcgcggtctcctaggaccccggacagcgcagacacaagcagcagccccaccacacccaagagcgaaactgcgcccgccattgccggcccacggg

SEQ ID NO: 6096 - protein, 114 aa, Homo sapiens
MVHSFMFRSSCWAPARVVTLKKCPLSGSQPMSPFLPPATNSPKIHRIIALLTAQKGGPAGPSGCSGAALSGPAVVSTGPAVALGIREKRGQKWLCIFCCPLNSPDPAQTSAKPT

SEQ ID NO: 6097 - DNA, 4497 bp, Homo sapiens
agggggcgcagggccgggcagaaggcggcgagctgggggcggatatccaccggggactggaagcggcccgcgcaggctggggacacccggggccagggcgggtcgcctggggtgggagagtatagtgaggaagtctgacgcctaggtcaggaacttagggaacccgggtagaaaaggtgagggggtgggacggtgggcggcgggtgggacgcccgggaccagtgttcagggacggctgtaggggagatccacagagctgggttcccagattgggtctgtgcagcgggtgggtgtctcacctccatagcgccaatgactctggtcatcccctgtataaatgaaaaggatgaaccgctcaagcttagagccccaatcccttcctggcgaccaaaacgatgtcacaaacgcagatgccttacaggagcattacgggtaacaaatgccttaagcgggccaggtgcaaagcacaggagaccgcacccaaactcaacaccgcagctgggtgggccaaacagcaatcctaccagcttgcaatcattgtcttagggtctgtaaaagtgagtggctgcttcaggccaggcgctgtggctcacgcctataatcccagcactttgggaggccagggtggttggatcacctgagatcaggagttcgagaccagcctgaccaacatggcgaaaccccgtctctactaaaaatacaaaaattagccgggcgtggtggcgcatgcctgtaatcgcagctacttggctagaggctgaggcaggagaatcacttgaacccgggaggtggaggttgcagtgagccgagatcgcgccattgcactccagcctgggcaacaaaagtgaaagtttgtctcaaaaaaaaaaaaaaaaaaagtgagtgggcacttcagtcctgagtcccaaatgagtgagtacaccatctttcctttctcccttctttcttctccccactcatccctctgccttgtatggtctccaacccctttccccaaattcctggcttgggagtcaagaagccacgtttctctacctgctgtgtcccttcttcctaggtctcaatttcctcattgtagcctaagatgagatgacttctaccagctcttcttgcttgtctctggtacccacttcacctcccaagctttccttttctcttcccctcaaactctctgactctccttctccacctatttttttcctctgtctgcacattttttctctcatctgcagttctcatccctttctcttctccagcctcccccttctctcccatctcatccagctcacctctctccttttgcaccctttttattttctctccacatctgtccctttctacctccgagagtggggatggggatattggtatgggacctctggaagggcttctgtggggagtacagtctcccctccttccctgagtgaacagagcctaggctggggtatgggaggggagtcatgaacctcctggaacctggatttggagattgatgaccacttaccttctttgtccctgtgggcattattctggggttcttgaggatctccaggagcctcaacagtaggtagatcctctaacttcagggagccctcttcttctgatttaggcttaacttcaggtagatcctcctctccaggtagatcctcctctccaggtagatcctcctctccgggtggatcctcctctctgggtgaatcctcttcactgggcagatcctcctcgcccagtgggtcatcttccccagaagagcctcctcccaagggggaatcctcctgcatccggggcaacctctggggatggacaggcaccagaagcagcagtgacagcagcagttgcacagtgaggcctggagcaggggccgggatcaacagagggagccaggggctggggcacaggggagccatgcggctgactgtggggtgtcccagcacacggtgtgtacgggctgtacgtgcattggaaacgagagctgggtgggggaggagcaagcctggaggggagcaggctgactcacagagcgcccttttgcagagatggagccaaagtctcacagctcactcatttttcaaatgcgattccctatggctctgtttctctgtctctctcgtctctggtctgagtggagaatgtggactctgaccctggatcatgctgggagtctgccaaaccctcaaacagtactttttggggatcctgaaagccaaggggaccctgcgaccacctgagcgccaggccctgtttggctcctgggagctcatctacggcgccagccaggagctgcttccctacctggaaggaggatgctggggccaagggctggagggcttctgccgccacttggagctctataaccaatttgctgccaactcagagaggtcccagaccaccctgcaggagcagctaaagaaaaataaaggtttccggaggtttgtacggcttcaggaaggccgccctgagtttgggggccttcagctccaggacctgctccctctgcctctgcaacggctccagcagtatgagaatctcgtcgtagctttggctgaaaacacaggtcccaacagccctgaccatcaacagctcacacgggctgcccgactgataagtgagactgcccagagagtccatactattggtcagaaacagaagaatgaccagcaccttcggcgtgtccaggctctgctcagtggacgccaggcaaaggggctgacctcagggcgctggttcctacgccagggctggctgttagtggtgcctccccatggggagcctcggccccgcatgttcttcctcttcactgatgtgctcctcatggccaagcctcggcctccactgcacctgctgcggagtggcacctttgcctgcaaggccctctaccccatggcccagtgtcatctcagcagggtctttggccactcaggaggcccttgtggtgggttgctcagtctgtccttccctcatgagaagctactgcttatgtccacagaccaggaggagctgtcacgctggtaccacagtctgacttgggctatcagcagccagaaaaactagaggaatcttatagattccagaactcaggatacctcagggataggtcacagccaagagtacaaaggaatcttcagtactgaacaaaacagaacccttcatgatttgacaaaggtcactttctgtttgcctggaccaagctactccagatcatctgaccaactcttaaaaatcacggccaggcacagtggctcatgcctgtaatcccagcactttgggaagcagaggtggcaggatcattccagcccaggagttcaagaccagcctgggcaacacaaagtcctcaggaagaggtctgctggcctctgtgtggggagagatcaggaatgttccagtttcagagactttgtctccacctccagcagactcgcctcccgagccttcacctggttctgaagcctccatatccttgtccggcttgctatcttgcagcagctcgtggatggtccatagcttcatgttcagaagctcctgctgggctccagccagagtagtcacactgaagaaatgtccactcagtggctcccaacctatgtccccattcctccctcctgccacaaattccccaaaaattcacagaatcattgctctcctcaccgctcaaaaagggggtccagctgggccatcaggttgttcaggtgctgctctgtctgggccagctgttgtgtcaactgggccagctgttgctctggggataagggaaaaaagggggcagaagtggttatgtatcttctgctgtcccctaaactcccccgacccagcacagacttctgctaaacccacctgactgcagtggctgctgcttgcttgcctcctcgtggagaaccgcagtttcatctttcccctgttgtggaagaaggaaagggcagtactgaagcaacaaggttctgctccatcacctcagtctccagagccagccaagagagagtgcaatttgagatggagacagtgattgggtttttacctcagagaatcacaatcctagtctatctagctcctcacccagcatatgaagcgacgtcctatgtcccacacatggtcagtttgctgaaacacctccaggaatgagcaactccctccggtttgaaaaaagctctggtggctgagtgctgtggctcacacctgtaatcccagcacttcgggaagccaagggcctcctcccaaggagaacatgagaccacttcatatctggaactctagaaacactggctgcagcaatcaacctcctgtgccaaggctggccccactcttgtagcatggacactgctagctgggttcaaatcccagctccagcagttgccagcgctgggtgacctcgagcaagtgactactcctcactggattgtaggagaactaaatgtgatagtcattatttacagttcaccacacgctcttcacatccgttacctccctggatcctcaaaataacctcataatattggaaggcca

SEQ ID NO: 6098 - protein, 299 aa, Homo sapiens
MLGVCQTLKQYFLGILKAKGTLRPPERQALFGSWELIYGASQELLPYLEGGCWGQGLEGFCRHLELYNQFAANSERSQTTLQEQLKKNKGFRRFVRLQEGRPEFGGLQLQDLLPLPLQRLQQYENLVVALAENTGPNSPDHQQLTRAARLISETAQRVHTIGQKQKNDQHLRRVQALLSGRQAKGLTSGRWFLRQGWLLVVPPHGEPRPRMFFLFTDVLLMAKPRPPLHLLRSGTFACKALYPMAQCHLSRVFGHSGGPCGGLLSLSFPHEKLLLMSTDQEELSRWYHSLTWAISSQKN

SEQ ID NO: 6099 - DNA, 2894 bp, Homo sapiens
gggatttgaatctgccgcggactgcagccggaagtgtcgatccctcagccagggcatggagctctcctgccccggttcgcggtgcccggtgcaagagcagcgtgcccgctgggagcggaaacgcgcctgcaccgcccgggagctgctagagaccgagcggcgctaccaagaacagctggggctggtggccacgtactttttggggatcctgaaagccaaggggaccctgcgaccacctgagcgccaggccctgtttggctcctgggagctcatctacggcgccagccaggagctgcttccctacctggaaggaggatgctggggccaagggctggagggcttctgccgccacttggagctctataaccaatttgctgccaactcagagaggtcccagaccaccctgcaggagcagctaaagaaaaataaaggtttccggaggtttgtacggcttcaggaaggccgccctgagtttgggggccttcagctccaggacctgctccctctgcctctgcaacggctccagcagtatgagaatctcgtcgtagctttggctgaaaacacaggtcccaacagccctgaccatcaacagctcacacctgtccttccctcatgagaagctactgcttatgtccacagaccaggaggagctgtcacgctggtaccacagtctgacttgggctatcagcagccagaaaaactagaggaatcttatagattccagaactcaggatacctcagggataggtcacagccaagagtacaaaggaatcttcagtactgaacaaaacagaacccttcatgatttgacaaaggtcactttctgtttgcctggaccaagctactccagatcatctgaccaactcttaaaaatcacggccaggcacagtggctcatgcctgtaatcccagcactttgggaagcagaggtggcaggatcattccagcccaggagttcaagaccagcctgggcaacacagtgagtgagaccctgtctctatttaagaaaaaataattaagaaattttattaaaaaagaagaatcaggaaaccaagtccaacccaactaaacctcaaatgaaccagcccctaacacagatgaggggatttgggactgataagctctgtgctgtgtccatggcccgtcatttatcaaggctgcagctttgtaaatgtggctatttttatgttgtgtatagtttctatcatttatttttccactggatttgagtaaagttttttttcttttttttgggaaagacccttctgtctcagttttgctatgagaaaagggatttttgggccctgaacgcgggcatgctggtggcctcaggaatacgaggaaaagagctggagctccctctatcttctctgctgtcacactggaaggcagcctctttttgtcctaataaggacagctcttcaagaaggcccagttgtccttaggcacctagtatgggtgtgtacaaccaactaggatcgaaaaaacacacaggagcactccatcatgaaaacagactttgttttagtcgaccttcagctgtcgtccctccttcccagccaaggctgtgactggggccctttgccacagcctggctgcaccttctccgtagtccccgccccacctcccaggaagtagctaggttccatgtctctgtgctccagtttgtgggctcctcccaggcctgactgtcaccaatctcctcctcgtcctcctttaaacagaagtcctcaggaagaggtctgctggcctctgtgtggggagagatcaggaatgttccagtttcagagactttgtctccacctccagcagactcgcctcccgagccttcacctggttctgaagcctccatatccttgtccggcttgctatcttgcagcagctcgtggatggtccatagcttcatgttcagaagctcctgctgggctccagccagagtagtcacactgaagaaatgtccactcagtggctcccaacctatgtccccattcctccctcctgccacaaattccccaaaaattcacagaatcattgctctcctcaccgctcaaaaagggggtccagctgggccatcaggttgttcaggtgctgctctgtctgggccagctgttgtgtcaactgggccagctgttgctctggggataagggaaaaaagggggcagaagtggttatgtatcttctgctgtcccctaaactcccccgacccagcacagacttctgctaaacccacctgactgcagtggctgctgcttgcttgcctcctcgtggagaaccgcagtttcatctttcccctgttgtggaagaaggaaagggcagtactgaagcaacaaggttctgctccatcacctcagtctccagagccagccaagagagagtgcaatttgagatggagacagtgattgggtttttacctcagagaatcacaatcctagtctatctagctcctcacccagcatatgaagcgacgtcctatgtcccacacatggtcagtttgctgaaacacctccaggaatgagcaactccctccggtttgaaaaaagctctggtggctgagtgctgtggctcacacctgtaatcccagcacttcgggaagccaagggcctcctcccaaggagaacatgagaccacttcatatctggaactctagaaacactggctgcagcaatcaacctcctgtgccaaggctggccccactcttgtagcatggacactgctagctgggttcaaatcccagctccagcagttgccagcgctgggtgacctcgagcaagtgactactcctcactggattgtaggagaactaaatgtgatagtcattatttacagttcaccacacgctcttcacatccgttacctccctggatcctcaaaataacctcataatattggaaggcc

SEQ ID NO: 6100 - protein, 186 aa, Homo sapiens
MELSCPGSRCPVQEQRARWERKRACTARELLETERRYQEQLGLVATYFLGILKAKGTLRPPERQALFGSWELIYGASQELLPYLEGGCWGQGLEGFCRHLELYNQFAANSERSQTTLQEQLKKNKGFRRFVRLQEGRPEFGGLQLQDLLPLPLQRLQQYENLVVALAENTGPNSPDHQQLTPVLPS

SEQ ID NO: 6101 - DNA, 2606 bp, Homo sapiens
atgctccttcctgcgcgctgccctccccggccccgcctccgcggctcccgcccgcgagcggttgggatttgaatctgccgcggactgcagccggaagtgtcgatccctcagccagggcatggagctctcctgccccggttcgcggtgcccggtgcaagagcagcgtgcccgctgggagcggaaacgcgcctgcaccgcccgggagctgctagagaccgagcggcgctaccaagaacagctggggctggtggccacgtactttttggggatcctgaaagccaaggggaccctgcgaccacctgagcgccaggccctgtttggctcctgggagctcatctacggcgccagccaggagctgcttccctacctggaaggaggatgctggggccaagggctggagggcttctgccgccacttggagctctataaccaatttgctgccaactcagagaggtcccagaccaccctgcaggagcagctaaagaaaaataaaggtttccggaggtttgtacggcttcaggaaggccgccctgagtttgggggccttcagctccaggacctgctccctctgcctctgcaacggctccagcagtatgagaatctcgtcgtagctttggctgaaaacacaggtcccaacagccctgaccatcaacagctcacacgggctgcccgactgataagtgagactgcccagagagtccatactattggtcagaaacagaagaatgaccagcaccttcggcgtgtccaggctctgctcagtggacgccaggcaaaggggctgacctcagggcgctggttcctacgccagggctggctgttagtggtgcctccccatggggagcctcggccccgcatgttcttcctcttcactgatgtgctcctcatggccaagcctcggcctccactgcacctgctgcggagtggcacctttgcctgcaaggccctctaccccatggcccagtgtcatctcagcagggtctttggccactcaggaggcccttgtggtgggttgctcagtctgtccttccctcatgagaagctactgcttatgtccacagaccaggaggagctgtcacgctggtaccacagtctgacttgggctatcagcagccagaaaaactagaggaatcttatagattccagaactcaggatacctcagggataggtcacagccaagagtacaaaggaatcttcagtactgaacaaaacagaacccttcatgatttgacaaaggtcactttctgtttgcctggaccaagctactccagatcatctgaccaactcttaaaaatcacattaagaaattttattaaaaaagaagaatcaggaaaccaagtccaacccaactaaacctcaaatgaaccagcccctaacacagatgaggggatttgggactgataagctctgtgctgtgtccatggcccgtcatttatcaaggctgcagctttgtaaatgtggctatttttatgttgtgtatagtttctatcatttatttttccactggatttgagtaaagttttttttcttttttttgggaaagacccttctgtctcagttttgctatgagaaaagggatttttgggccctgaacgcgggcatgctggtggcctcaggaatacgaggaaaagagctggagctccctctatcttctctgctgtcacactggaaggcagcctctttttgtcctaataaggacagctcttcaagaaggcccagttgtccttaggcacctagtatgggtgtgtacaaccaactaggatcgaaaaaacacacaggagcactccatcatgaaaacagactttgttttagtcgaccttcagctgtcgtccctccttcccagccaaggctgtgactggggccctttgccacagcctggctgcaccttctccgtagtccccgccccacctcccaggaagtagctaggttccatgtctctgtgctccagtttgtgggctcctcccaggcctgactgtcaccaatctcctcctcgtcctcctttaaacagaagtcctcaggaagaggtctgctggcctctggttctgaagcctccatatccttgtccggcttgctatcttgcagcagctcgtggatggtccatagcttcatgttcagaagctcctgctgggctccagccagagtagtcacacgctcaaaaagggggtccagctgggccatcaggttgttcaggtgctgctctgtctgggccagctgttgtgtcaactgggccagctgttgctctgactgcagtggctgctgcttgcttgcctcctcgtggagaaccgcagtttcatctttcccatttcagggcctcctcccaaggagaacatgagaccacttcatatctggaactctagaaacactggctgcagcaatcaacctcctgtgccaaggctggccccactcttgtagcatggacactgctagctgggttcaaatcccagctccagcagttgccagcgctgggtgacctcgagcaagtgactactcctcactggattgtaggagaactaaatgtgatagtcattatttacagttcaccacacgctcttcacatccgttacctccctggatcctcaaaataacctcataatattggaaggcc

SEQ ID NO: 6102 - protein, 335 aa, Homo sapiens; identical to SEQ ID NO: 819

SEQ ID NO: 6103 - DNA, 3316 bp, Homo sapiens
atgctccttcctgcgcgctgccctccccggccccgcctccgcggctcccgcccgcgagcggttgggatttgaatctgccgcggactgcagccggaagtgtcgatccctcagccagggcatggagctctcctgccccggttcgcggtgcccggtgcaagagcagcgtgcccgctgggagcggaaacgcgcctgcaccgcccgggagctgctagagaccgagcggcgctaccaagaacagctggggctggtggccacgtactttttggggatcctgaaagccaaggggaccctgcgaccacctgagcgccaggccctgtttggctcctgggagctcatctacggcgccagccaggagctgcttccctacctggaaggaggatgctggggccaagggctggagggcttctgccgccacttggagctctataaccaatttgctgccaactcagagaggtcccagaccaccctgcaggagcagctaaagaaaaataaaggtttccggaggtttgtacggcttcaggaaggccgccctgagtttgggggccttcagctccaggacctgctccctctgcctctgcaacggctccagcagtatgagaatctcgtcgtagctttggctgaaaacacaggtcccaacagccctgaccatcaacagctcacacgggctgcccgactgataagtgagactgcccagagagtccatactattggtcagaaacagaagaatgaccagcaccttcggcgtgtccaggctctgctcagtggacgccaggcaaaggggctgacctcagggcgctggttcctacgccagggctggctgttagtggtgcctccccatggggagcctcggccccgcatgttcttcctcttcactgatgtgctcctcatggccaagcctcggcctccactgcacctgctgcggagtggcacctttgcctgcaaggccctctaccccatggcccagtgtcatctcagcagggtctttggccactcaggaggcccttgtggtgggttgctcagtctgtccttccctcatgagaagctactgcttatgtccacagaccaggaggagctgtcacgctggtaccacagtctgacttgggctatcagcagccagaaaaactagaggaatcttatagattccagaactcaggatacctcagggataggtcacagccaagagtacaaaggaatcttcagtactgaacaaaacagaacccttcatgatttgacaaaggtcactttctgtttgcctggaccaagctactccagatcatctgaccaactcttaaaaatcacggccaggcacagtggctcatgcctgtaatcccagcactttgggaagcagaggtggcaggatcattccagcccaggagttcaagaccagcctgggcaacacagtgagtgagaccctgtctctatttaagaaaaaataattaagaaattttattaaaaaagaagaatcaggaaaccaagtccaacccaactaaacctcaaatgaaccagcccctaacacagatgaggggatttgggactgataagctctgtgctgtgtccatggcccgtcatttatcaaggctgcagctttgtaaatgtggctatttttatgttgtgtatagtttctatcatttatttttccactggatttgagtaaagttttttttcttttttttgggaaagacccttctgtctcagttttgctatgagaaaagggatttttgggccctgaacgcgggcatgctggtggcctcaggaatacgaggaaaagagctggagctccctctatcttctctgctgtcacactggaaggcagcctctttttgtcctaataaggacagctcttcaagaaggcccagttgtccttaggcacctagtatgggtgtgtacaaccaactaggatcgaaaaaacacacaggagcactccatcatgaaaacagactttgttttagtcgaccttcagctgtcgtccctccttcccagccaaggctgtgactggggccctttgccacagcctggctgcaccttctccgtagtccccgccccacctcccaggaagtagctaggttccatgtctctgtgctccagtttgtgggctcctcccaggcctgactgtcaccaatctcctcctcgtcctcctttaaacagaagtcctcaggaagaggtctgctggcctctgtgtggggagagatcaggaatgttccagtttcagagactttgtctccacctccagcagactcgcctcccgagccttcacctggttctgaagcctccatatccttgtccggcttgctatcttgcagcagctcgtggatggtccatagcttcatgttcagaagctcctgctgggctccagccagagtagtcacactgaagaaatgtccactcagtggctcccaacctatgtccccattcctccctcctgccacaaattccccaaaaattcacagaatcattgctctcctcaccgctcaaaaagggggtccagctgggccatcaggttgttcaggtgctgctctgtctgggccagctgttgtgtcaactgggccagctgttgctctggggataagggaaaaaagggggcagaagtggttatgtatcttctgctgtcccctaaactcccccgacccagcacagacttctgctaaacccacctgactgcagtggctgctgcttgcttgcctcctcgtggagaaccgcagtttcatctttcccctgttgtggaagaaggaaagggcagtactgaagcaacaaggttctgctccatcacctcagtctccagagccagccaagagagagtgcaatttgagatggagacagtgattgggtttttacctcagagaatcacaatcctagtctatctagctcctcacccagcatatgaagcgacgtcctatgtcccacacatggtcagtttgctgaaacacctccaggaatgagcaactccctccggtttgaaaaaagctctggtggctgagtgctgtggctcacacctgtaatcccagcacttcgggaagccaagggcctcctcccaaggagaacatgagaccacttcatatctggaactctagaaacactggctgcagcaatcaacctcctgtgccaaggctggccccactcttgtagcatggacactgctagctgggttcaaatcccagctccagcagttgccagcgctgggtgacctcgagcaagtgactactcctcactggattgtaggagaactaaatgtgatagtcattatttacagttcaccacacgctcttcacatccgttacctccctggatcctcaaaataacctcataatattggaaggcc

SEQ ID NO: 6104 - protein, 335 aa, Homo sapiens; identical to SEQ ID NO: 819

SEQ ID NO: 6105 - DNA, 1057 bp, Homo sapiens
gcccaggagttcaagaccagcctgggcaacacagtgagtgagaccctgtctctatttaagaaaaaataattaagaaattttattaaaaaagaagaatcaggaaaccaagtccaacccaactaaacctcaaatgaaccagcccctaacacagatgaggggatttgggactgataagctctgtgctgtgtccatggcccgtcatttatcaaggctgcagctttgtaaatgtggctatttttatgttgtgtatagtttctatcatttatttttccactggatttgagtaaagttttttttcttttttttgggaaagacccttctgtctcagttttgctatgagaaaagggatttttgggccctgaacgcgggcatgctggtggcctcaggaatacgaggaaaagagctggagctccctctatcttctctgctgtcacactggaaggcagcctctttttgtcctaataaggacagctcttcaagaaggcccagttgtccttaggcacctagtatgggtgtgtacaaccaactaggatcgaaaaaacacacaggagcactccatcatgaaaacagactttgttttagtcgaccttcagctgtcgtccctccttcccagccaaggctgtgactggggccctttgccacagcctggctgcaccttctccgtagtccccgccccacctcccaggaagtagctaggttccatgtctctgtgctccagtttgtgggctcctcccaggcctgactgtcaccaatctcctcctcgtcctcctttaaacagaagtcctcaggaagaggtctgctggcctctggttctgaagcctccatatccttgtccggcttgctatcttgcagcagctcgtggatggtccatagcttcatgttcagaagctcctgctgggctccagccagagtagtcacacgctcaaaaagggggtccagctgggccatcaggttgttcaggtgctgctctgtctgggccagctgttgtgtcaactgggccagctgttgctctggggataagggaaaaaagggggcagaagtggttatgtatcttctg

SEQ ID NO: 6106 - protein, 70 aa, Homo sapiens
MSLCSSLWAPPRPDCHQSPPRPPLNRSPQEEVCWPLVLKPPYPCPACYLAAARGWSIASCSEAPAGLQPE

SEQ ID NO: 6107 - DNA, 1650 bp, Homo sapiens
ccggccccgcctccgcggctcccgcccgcgagcggttgggatttgaatctgccgcggactgcagccggaagtgtcgatccctcagccagggcatggagctctcctgccccggttcgcggtgcccggtgcaagagcagcgtgcccgctgggagcggaaacgcgcctgcaccgcccgggagctgctagagaccgagcggcgctaccaagaacagctggggctggtggccacgtactttttggggatcctgaaagccaaggggaccctgcgaccacctgagcgccaggccctgtttggctcctgggagctcatctacggcgccagccaggagctgcttccctacctggaaggaggatgctggggccaagggctggagggcttctgccgccacttggagctctataaccaatttgctgccaactcagagaggtcccagaccaccctgcaggagcagctaaagaaaaataaaggtttccggaggtttgtacggcttcaggaaggccgccctgagtttgggggccttcagctccaggacctgctccctctgcctctgcaacggctccagcagtatgagaatctcgtcgtagctttggctgaaaacacaggtcccaacagccctgaccatcaacagctcacacgggctgcccgactgataagtgagactgcccagagagtccatactattggtcagaaacagaagaatgaccagcaccttcggcgtgtccaggctctgctcagtggacgccaggcaaaggggctgacctcagggcgctggttcctacgccagggctggctgttagtggtgcctccccatggggagcctcggccccgcatgttcttcctcttcactgatgtgctcctcatggccaagcctcggcctccactgcacctgctgcggagtggcacctttgcctgcaaggccctctaccccatggcccagtgtcatctcagcagggtctttggccactcaggaggcccttgtggtgggttgctcagtctgtccttccctcatgagaagctactgcttatgtccacagaccaggaggagctgtcacgctggtaccacagtctgacttgggctatcagcagccagaaaaactagaggaatcttatagattccagaactcaggatacctcagggataggtcacagccaagagtacaaaggaatcttcagtactgaacaaaacagaacccttcatgatttgacaaaggtcactttctgtttgcctggaccaagctactccagatcatctgaccaactcttaaaaatcacggccaggcacagtggctcatgcctgtaatcccagcactttgggaagcagaggtggcaggatcattccagcccaggagttcaagaccagcctgggcaacacagtgagtgagaccctgtctctatttaagaaaaaataattaagaaattttattaaaaaagaagaatcaggaaaccaagtccaacccaactaaacctcaaatgaaccagcccctaacacagatgaggggatttgggactgataagctctgtgctgtgtccatggcccgtcatttatcaaggctgcagctttgtaaatgtggctatttttatgttgtgtatagtttctatcatttatttttccactggatttgagtaaagttttttttcttttttttggg

SEQ ID NO: 6108 - protein, 335 aa, Homo sapiens; identical to SEQ ID NO: 819

SEQ ID NO: 6109 - DNA, 504 bp, Homo sapiens
agctccgcgctcacctcggcagggaaacggtggccttccacagtgtgctccgagcccggacgacctgcagccccccagtgcagatgcagctgcagagcccggagcagctaaagaaaaataaaggtttccggaggtttgtacggcttcaggaaggccgccctgagtttgggggccttcagctccaggacctgctccctctgcctctgcaacggctccagcagtatgagaatctcgtcgtagctttggctgaaaacacaggtcccaacagccctgaccatcaacagctcacacgtaggttcttgctcctcggcaacgcaggctggaggcttcctctcctgtattcctttctgattctgacctccaacaatgtctgctgtccttccctcatgagaagctactgcttatgtccacagaccaggaggagctgtcacgctggtaccacagtctgacttgggctatcagcagccagaaaaactagaggaatcttatagattccagaactca

SEQ ID NO: 6110 - protein, 121 aa, Homo sapiens
MQLQSPEQLKKNKGFRRFVRLQEGRPEFGGLQLQDLLPLPLQRLQQYENLVVALAENTGPNSPDHQQLTRRFLLLGNAGWRLPLLYSFLILTSNNVCCPSLMRSYCLCPQTRRSCHAGTTV

SEQ ID NO: 6111 - DNA, 824 bp, Homo sapiens
cgatccctcagccagggcatggagctctcctgccccggttcgcggtgcccggtgcaagagcagcgtgcccgctgggagcggaaacgcgcctgcaccgcccgggagctgctagagaccgagcggcgctaccaagaacagctggggctggtggccacgggagctgcttccctacctggaaggaggatgctggggccaagggctggagggcttctgccgccacttggagctctataaccaatttgctgccaactcagagaggtcccagaccaccctgcaggagcagctaaagaaaaataaaggtttccggaggtttgtacggcttcaggaaggccgccctgagtttgggggccttcagctccaggacctgctccctctgcctctgcaacggctccagcagtatgagaatctcgtcgtagctttggctgaaaacacaggtcccaacagccctgaccatcaacagctcacacggcgctggttcctacgccagggctggctgttagtggtgcctccccatggggagcctcggccccgcatgttcttcctcttcactgatgtgctcctcatggccaagcctcggcctccactgcacctgctgcggagtggcacctttgcctgcaaggccctctaccccatggcccagtgtcatctcagcagggtctttggccactcaggaggcccttgtggtgggttgctcagtctgtccttccctcatgagaagctactgcttatgtccacagaccaggaggagctgtcacgctggtaccacagtctgacttgggctatcagcagccagaaaaactagaggaatcttatagattccagaa

SEQ ID NO: 6112 - protein, 89 aa, Homo sapiens [sequence omitted]

SEQ ID NO: 6113 - DNA, 636 bp, Homo sapiens
gggatttgaatctgccgcggactgcagccggaagtgtcgatccctcagccagggcatggagctctcctgccccggttcgcggtgcccggtgcaagagcagcgtgcccgctgggagcggaaacgcgcctgcaccgcccgggagctgctagagaccgagcggcgctaccaagaacagctggggctggtggccacgtactttttggggatcctgaaagccaaggggaccctgcgaccacctgagcgccaggccctgtttggctcctgggagctcatctacggcgccagccaggagctgcttccctacctggaaggaggatgctggggccaagggctggagggcttctgccgccacttggagctctataaccaatttgctgccaactcagagaggtcccagaccaccctgcaggagcagctaaagaaaaataaaggtttccggaggtttgtacggcttcaggaaggccgccctgagtttgggggccttcagctccaggacctgctccctctgcctctgcaacggctccagcagtatgagaatctcgtcgtagctttggctgaaaacacaggtcccaacagccctgaccatcaacagctcacacctgtcacgctggtaccacagtctgacttgggctatca

SEQ ID NO: 6114 - protein, 192 aa, Homo sapiens
MELSCPGSRCPVQEQRARWERKRACTARELLETERRYQEQLGLVATYFLGILKAKGTLRPPERQALFGSWELIYGASQELLPYLEGGCWGQGLEGFCRHLELYNQFAANSERSQTTLQEQLKKNKGFRRFVRLQEGRPEFGGLQLQDLLPLPLQRLQQYENLVVALAENTGPNSPDHQQLTPVTLVPQSDLG

SEQ ID NO: 6115 - DNA, 6728 bp, Homo sapiens
tagtgaggctaatcccgaagcagcacattccaaggggctaatctgcccaagttcattgcttacttgaaacgtctcttgggggaagagccgaacaagtgactttttttttccagtgggcggtcataagagcattattaacggaatgaccagccctagctgcagcaaaatgaaagcaacaggagctgctccggggactgcttttgccagtacccagaatcagtgctcaggctcagaaatcctggatagaaagagcattttataaaagagaatgtgtccacatcatacccagcaccaaagacccccataggtgttgctgtgggcgtctgataggccagcatgttggcctcacccccagtatctccgtgcttcagaatgagaaaaatgaaagtcgcctctcccgaaatgacatccagtctgaaaagtggtccatcagcaaacacactcaactcagccctacggatgcttttgggaccattgagttccaaggaggtggccattccaacaaagccatgtatgtgcgagtatcttttgatacaaaacctgatctcctcttacacctgatgaccaaggaatggcagttggagcttcccaagcttctcatctctgtccatgggggcctgcagaactttgaactccagccaaaactcaagcaagtctttgggaaagggctcatcaaagcagcaatgacaactggagcgtggatattcactggaggggttaacacaggtgttattcgtcatgttggcgatgccttgaaggatcatgcctctaagtctcgaggaaagatatgcaccataggtattgccccctggggaattgtggaaaaccaggaggacctcattggaagagatgttgtccggccataccagaccatgtccaatcccatgagcaagctcactgttctcaacagcatgcattcccacttcattctggctgacaacgggaccactggaaaatatggagcagaggtgaaacttcgaagacaactggaaaagcatatttcactccagaagataaacacaagatgcctgccgtttttctctcttgactcccgcttgttttattcattttggggtagttgccagttagactcagttggaatcggtcaaggtgttcctgtggtggcactcatagtggaaggaggacccaatgtgatctcgattgttttggagtaccttcgagacacccctcccgtgccagtggttgtctgtgatgggagtggacgggcatcggacatcctggcctttgggcataaatactcagaagaaggcggactgataaatgaatctttgagggaccagctgttggtgactatacagaagactttcacatacactcgaacccaagctcagcatctgttcatcatcctcatggagtgcatgaagaagaaggaattgattacggtatttcggatgggatcagaaggacaccaggacattgatttggctatcctgacagctttactcaaaggagccaatgcctcggccccagaccaactgagcttagctttagcctggaacagagtcgacatcgctcgcagccagatctttatttacgggcaacagtggccggtgggatctctggagcaagccatgttggatgccttagttctggacagagtggattttgtgaaattactcatagagaatggagtaagcatgcaccgttttctcaccatctccagactagaggaattgtacaatacgagacatgggccctcaaatacattgtaccacttggtcagggatgtcaaaaaggggaacctgcccccagactacagaatcagcctgattgacatcggcctggtgatcgagtacctgatgggcggggcttatcgctgcaactacacgcgcaagcgcttccggaccctctaccacaacctcttcggccccaagaggcccaaagccttgaaactgctgggaatggaggatgatattcccttgaggcgaggaagaaagacaaccaagaaacgtgaagaagaggtggacattgacttggatgatcctgagatcaaccacttccccttccctttccatgagctcatggtgtgggctgttctcatgaagcggcagaagatggccctgttcttctggcagcacggtgaggaggccatggccaaggccctggtggcctgcaagctctgcaaagccatggctcatgaggcctctgagaacgacatggttgacgacatttcccaggagctgaatcacaattccagagactttggccagctggctgtggagctcctggaccagtcctacaagcaggacgaacagctggccatgaaactgctgacgtatgagctgaagaactggagcaacgccacgtgcctgcagcttgccgtggctgccaaacaccgcgacttcatcgcgcacacgtgcagccagatgctgctcaccgacatgtggatgggccggctccgcatgcgcaagaactcaggcctcaaggtaattctgggaattctacttcctccttcaattctcagcttggagttcaagaacaaagacgacatgccctatatgtctcaggcccaggaaatccacctccaagagaaggaggcagaagaaccagagaagcccacaaaggaaaaagaggaagaggacatggagctcacagcaatgttgggacgaaacaacggggagtcctccaggaagaaggatgaagaggaagttcagagcaagcaccggttaatccccctcggcagaaaaatctatgaattctacaatgcacccatcgtgaagttctggttctacacactggcgtatatcggatacctgatgctcttcaactatatcgtgttagtgaagatggaacgctggccgtccacccaggaatggatcgtaatctcctatattttcaccctgggaatagaaaagatgagagagattctgatgtcagagccagggaagttgctacagaaagtgaaggtatggctgcaggagtactggaatgtcacggacctcatcgccatccttctgttttctgtcggaatgatccttcgtctccaagaccagcccttcaggagtgacgggagggtcatctactgcgtgaacatcatttactggtatatccgtctcctagacatcttcggcgtgaacaagtatttgggcccgtatgtaatgatgattggaaaaatgatgatagacatgatgtactttgtcatcattatgctggtggttctgatgagctttggggtcgccaggcaagccatcctttttcccaatgaggagccatcatggaaactggccaagaacatcttctacatgccctattggatgatttatggggaagtgtttgcggaccagatagaccctccctgtggacagaatgagacccgagaggatggtaaaataatccagctgcctccctgcaagacaggagcttggatcgtgccggccatcatggcctgctacctcttagtggcaaacatcttgctggtcaacctcctcattgctgtctttaacaatacattttttgaagtaaaatcgatatccaaccaagtctggaagtttcagaggtatcagctcatcatgactttccatgaaaggccagttctgcccccaccactgatcatcttcagccacatgaccatgatattccagcacctgtgctgccgatggaggaaacacgagagcgacccggatgaaagggactacggcctgaaactcttcataaccgatgatgagctcaagaaagtacatgactttgaagagcaatgcatagaagaatacttcagagaaaaggatgatcggttcaactcatctaatgatgagaggatacgggtgacttcagaaagggtggagaacatgtctatgcggctggaggaagtcaacgagagagagcactccatgaaggcttcactccagaccgtggacatccggctggcgcagctggaagaccttatcgggcgcatggccacggccctggagcgcctgacaggtctggagcgggccgagtccaacaaaatccgctcgaggacctcgtcagactgcacggacgccgcctacattgtccgtcagagcagcttcaacagccaggaagggaacaccttcaagctccaagagagtatagaccctgcaggtgaggagaccatgtccccaacttctccaaccttaatgccccgtatgcgaagccattctttctattcggtcaatatgaaagacaaaggtggtatagaaaagttggaaagtatttttaaagaaaggtccctgagcctacaccgggctactagttcccactctgtagcaaaagaacccaaagctcctgcagcccctgccaacaccttggccattgttcctgattccagaagaccatcatcgtgtatagacatctatgtctctgctatggatgagctccactgtgatatagaccctctggacaattccgtgaacatccttgggctgggcgagccaagcttttcaactccagtaccttccacagccccttcaagtagtgcctatgcaacacttgcacccacagacagacctccaagccggagcattgattttgaggacatcacctccatggacactagatctttttcttcagactacacccacctcccagaatgccaaaacccctgggactcagagcctccgatgtaccacaccattgagcgttccaaaagtagccgctacctagccaccacaccctttcttctagaagaggctcccattgtgaaatctcatagctttatgttttccccctcaaggagctattatgccaactttggggtgcctgtaaaaacagcagaatacacaagtattacagactgtattgacacaaggtgtgtcaatgcccctcaagcaattgcggacagagctgccttccctggaggtcttggagacaaagtggaggacttaacttgctgccatccagagcgagaagcagaactgagtcaccccagctctgacagtgaggagaatgaggccaaaggccgcagagccaccattgcaatatcctcccaggagggtgataactcagagagaaccctgtccaacaacatcactgttcccaagatagagcgcgccaacagctactcggcagaggagccaagtgcgccatatgcacacaccaggaagagcttctccatcagtgacaaactcgacaggcagcggaacacagcaagcctgcgaaatcccttccagagaagcaagtcctccaagccggagggccgaggggacagcctgtccatgaggagactgtccagaacatcggctttccaaagctttgaaagcaagcacaactaaaccttcttaatatccgccacagaaggctcaagaatccagccctaaaattctctccaactccagtttttcccctttccttgaatcatacctgctttattcttagctgagcaaaacaagcaatgctttgggaggtgttaactcaaaggtgacttctgggccacagatcaagaaagcatttgatctgacccagtgccagacacaggggatttaaggcatgttcacacttgctgggcagggagggggaagagagggagaaggaagggttagagatgaatgtgtatccgcagtcacagcagaaagccatgagagcaggggaaacaaggggcttcgagcacgctccatgccaggaggcatctgttgatttctgaccattatcaagagttgtaggatgcagggctaaattgcaaaataaaataaaatagccagcgtacacaatgagatattctaaacttccattctgttttcttttcacattggctccatcactggtgactgatgaagagcatcctctttattcagtataagccggcagcaagcagttctacctaacgtcccacatccttctcatgccaacacttctgtaattgatcattataaagaaaaaacaaggtaacagtcatagttcacctgtctcttatctattcacttctggtgccacaactgtttatccttttttgaagaaaataagggaacagaaatgcctttttgtattgcaatcgaaatgaaagaagagttgatgttaaaaaaacaaaagtcaagtgatttattatatacagtgggcgttcaagtctagtcgagcaagctcaggagaatgtaattaaataattttatattttttaatttattttgtatctcacctgtcatggatgaattcattcactgaatatgtaatattgaacttaaaaaaaaaaaaaaaaaaacagtggacagaactagcctgaaattgccatgtgggatgttctgttctcaccgttcatgtcgtgtgttgtgctgctgtgtgaccgtcatcatttgcatggctccaccacgtcctcctgaacacctccaagacgtaactgccaatttttcacaccactcatcacatgaccattttgtatatgaatatatggttatatgtggatattttcatacctagagttttgccatctaatctgagctcagcataaatttaattggagtttttcaagggctggtatcttttctatggaaatgttccaaagtactttttaaggaagtttcaaaactataaataaccttagatttgactgggagtttggtatcaacccaaagccatcagttgcaagcataccatgaatatttttcttatagacagagctataaaaaaagatacagtagaccaaaatagaaagcaaataaaccatataaagagttctatagtatatgccacttatacacatgtatatgcatttatgcagagacacatatttatatataaaataaatggacataaagagcttt

SEQ ID NO: 6116 - protein, 1579 aa, Homo sapiens; identical to SEQ ID NO: 833

SEQ ID NO: 6117 - DNA, 6653 bp, Homo sapiens
tagtgaggctaatcccgaagcagcacattccaaggggctaatctgcccaagttcattgcttacttgaaacgtctcttgggggaagagccgaacaagtgactttttttttccagtgggcggtcataagagcattattaacggaatgaccagccctagctgcagcaaaatgaaagcaacaggagctgctccggggactgcttttgccagtacccagaatcagtgctcaggctcagaaatcctggatagaaagagcattttataaaagagaatgtgtccacatcatacccagcaccaaagacccccataggtgttgctgtgggcgtctgataggccagcatgttggcctcacccccagtatctccgtgcttcagaatgagaaaaatgaaagtcgcctctcccgaaatgacatccagtctgaaaagtggtccatcagcaaacacactcaactcagccctacggatgcttttgggaccattgagttccaaggaggtggccattccaacaaagccatgtatgtgcgagtatcttttgatacaaaacctgatctcctcttacacctgatgaccaaggaatggcagttggagcttcccaagcttctcatctctgtccatgggggcctgcagaactttgaactccagccaaaactcaagcaagtctttgggaaagggctcatcaaagcagcaatgacaactggagcgtggatattcactggaggggttaacacaggtgttattcgtcatgttggcgatgccttgaaggatcatgcctctaagtctcgaggaaagatatgcaccataggtattgccccctggggaattgtggaaaaccaggaggacctcattggaagagatgttgtccggccataccagaccatgtccaatcccatgagcaagctcactgttctcaacagcatgcattcccacttcattctggctgacaacgggaccactggaaaatatggagcagaggtgaaacttcgaagacaactggaaaagcatatttcactccagaagataaacacaagaatcggtcaaggtgttcctgtggtggcactcatagtggaaggaggacccaatgtgatctcgattgttttggagtaccttcgagacacccctcccgtgccagtggttgtctgtgatgggagtggacgggcatcggacatcctggcctttgggcataaatactcagaagaaggcggactgataaatgaatctttgagggaccagctgttggtgactatacagaagactttcacatacactcgaacccaagctcagcatctgttcatcatcctcatggagtgcatgaagaagaaggaattgattacggtatttcggatgggatcagaaggacaccaggacattgatttggctatcctgacagctttactcaaaggagccaatgcctcggccccagaccaactgagcttagctttagcctggaacagagtcgacatcgctcgcagccagatctttatttacgggcaacagtggccggtgggatctctggagcaagccatgttggatgccttagttctggacagagtggattttgtgaaattactcatagagaatggagtaagcatgcaccgttttctcaccatctccagactagaggaattgtacaatacgagacatgggccctcaaatacattgtaccacttggtcagggatgtcaaaaaggggaacctgcccccagactacagaatcagcctgattgacatcggcctggtgatcgagtacctgatgggcggggcttatcgctgcaactacacgcgcaagcgcttccggaccctctaccacaacctcttcggccccaagaggcccaaagccttgaaactgctgggaatggaggatgatattcccttgaggcgaggaagaaagacaaccaagaaacgtgaagaagaggtggacattgacttggatgatcctgagatcaaccacttccccttccctttccatgagctcatggtgtgggctgttctcatgaagcggcagaagatggccctgttcttctggcagcacggtgaggaggccatggccaaggccctggtggcctgcaagctctgcaaagccatggctcatgaggcctctgagaacgacatggttgacgacatttcccaggagctgaatcacaattccagagactttggccagctggctgtggagctcctggaccagtcctacaagcaggacgaacagctggccatgaaactgctgacgtatgagctgaagaactggagcaacgccacgtgcctgcagcttgccgtggctgccaaacaccgcgacttcatcgcgcacacgtgcagccagatgctgctcaccgacatgtggatgggccggctccgcatgcgcaagaactcaggcctcaaggtaattctgggaattctacttcctccttcaattctcagcttggagttcaagaacaaagacgacatgccctatatgtctcaggcccaggaaatccacctccaagagaaggaggcagaagaaccagagaagcccacaaaggaaaaagaggaagaggacatggagctcacagcaatgttgggacgaaacaacggggagtcctccaggaagaaggatgaagaggaagttcagagcaagcaccggttaatccccctcggcagaaaaatctatgaattctacaatgcacccatcgtgaagttctggttctacacactggcgtatatcggatacctgatgctcttcaactatatcgtgttagtgaagatggaacgctggccgtccacccaggaatggatcgtaatctcctatattttcaccctgggaatagaaaagatgagagagattctgatgtcagagccagggaagttgctacagaaagtgaaggtatggctgcaggagtactggaatgtcacggacctcatcgccatccttctgttttctgtcggaatgatccttcgtctccaagaccagcccttcaggagtgacgggagggtcatctactgcgtgaacatcatttactggtatatccgtctcctagacatcttcggcgtgaacaagtatttgggcccgtatgtaatgatgattggaaaaatgatgatagacatgatgtactttgtcatcattatgctggtggttctgatgagctttggggtcgccaggcaagccatcctttttcccaatgaggagccatcatggaaactggccaagaacatcttctacatgccctattggatgatttatggggaagtgtttgcggaccagatagaccctccctgtggacagaatgagacccgagaggatggtaaaataatccagctgcctccctgcaagacaggagcttggatcgtgccggccatcatggcctgctacctcttagtggcaaacatcttgctggtcaacctcctcattgctgtctttaacaatacattttttgaagtaaaatcgatatccaaccaagtctggaagtttcagaggtatcagctcatcatgactttccatgaaaggccagttctgcccccaccactgatcatcttcagccacatgaccatgatattccagcacctgtgctgccgatggaggaaacacgagagcgacccggatgaaagggactacggcctgaaactcttcataaccgatgatgagctcaagaaagtacatgactttgaagagcaatgcatagaagaatacttcagagaaaaggatgatcggttcaactcatctaatgatgagaggatacgggtgacttcagaaagggtggagaacatgtctatgcggctggaggaagtcaacgagagagagcactccatgaaggcttcactccagaccgtggacatccggctggcgcagctggaagaccttatcgggcgcatggccacggccctggagcgcctgacaggtctggagcgggccgagtccaacaaaatccgctcgaggacctcgtcagactgcacggacgccgcctacattgtccgtcagagcagcttcaacagccaggaagggaacaccttcaagctccaagagagtatagaccctgcaggtgaggagaccatgtccccaacttctccaaccttaatgccccgtatgcgaagccattctttctattcggtcaatatgaaagacaaaggtggtatagaaaagttggaaagtatttttaaagaaaggtccctgagcctacaccgggctactagttcccactctgtagcaaaagaacccaaagctcctgcagcccctgccaacaccttggccattgttcctgattccagaagaccatcatcgtgtatagacatctatgtctctgctatggatgagctccactgtgatatagaccctctggacaattccgtgaacatccttgggctgggcgagccaagcttttcaactccagtaccttccacagccccttcaagtagtgcctatgcaacacttgcacccacagacagacctccaagccggagcattgattttgaggacatcacctccatggacactagatctttttcttcagactacacccacctcccagaatgccaaaacccctgggactcagagcctccgatgtaccacaccattgagcgttccaaaagtagccgctacctagccaccacaccctttcttctagaagaggctcccattgtgaaatctcatagctttatgttttccccctcaaggagctattatgccaactttggggtgcctgtaaaaacagcagaatacacaagtattacagactgtattgacacaaggtgtgtcaatgcccctcaagcaattgcggacagagctgccttccctggaggtcttggagacaaagtggaggacttaacttgctgccatccagagcgagaagcagaactgagtcaccccagctctgacagtgaggagaatgaggccaaaggccgcagagccaccattgcaatatcctcccaggagggtgataactcagagagaaccctgtccaacaacatcactgttcccaagatagagcgcgccaacagctactcggcagaggagccaagtgcgccatatgcacacaccaggaagagcttctccatcagtgacaaactcgacaggcagcggaacacagcaagcctgcgaaatcccttccagagaagcaagtcctccaagccggagggccgaggggacagcctgtccatgaggagactgtccagaacatcggctttccaaagctttgaaagcaagcacaactaaaccttcttaatatccgccacagaaggctcaagaatccagccctaaaattctctccaactccagtttttcccctttccttgaatcatacctgctttattcttagctgagcaaaacaagcaatgctttgggaggtgttaactcaaaggtgacttctgggccacagatcaagaaagcatttgatctgacccagtgccagacacaggggatttaaggcatgttcacacttgctgggcagggagggggaagagagggagaaggaagggttagagatgaatgtgtatccgcagtcacagcagaaagccatgagagcaggggaaacaaggggcttcgagcacgctccatgccaggaggcatctgttgatttctgaccattatcaagagttgtaggatgcagggctaaattgcaaaataaaataaaatagccagcgtacacaatgagatattctaaacttccattctgttttcttttcacattggctccatcactggtgactgatgaagagcatcctctttattcagtataagccggcagcaagcagttctacctaacgtcccacatccttctcatgccaacacttctgtaattgatcattataaagaaaaaacaaggtaacagtcatagttcacctgtctcttatctattcacttctggtgccacaactgtttatccttttttgaagaaaataagggaacagaaatgcctttttgtattgcaatcgaaatgaaagaagagttgatgttaaaaaaacaaaagtcaagtgatttattatatacagtgggcgttcaagtctagtcgagcaagctcaggagaatgtaattaaataattttatattttttaatttattttgtatctcacctgtcatggatgaattcattcactgaatatgtaatattgaacttaaaaaaaaaaaaaaaaaaacagtggacagaactagcctgaaattgccatgtgggatgttctgttctcaccgttcatgtcgtgtgttgtgctgctgtgtgaccgtcatcatttgcatggctccaccacgtcctcctgaacacctccaagacgtaactgccaatttttcacaccactcatcacatgaccattttgtatatgaatatatggttatatgtggatattttcatacctagagttttgccatctaatctgagctcagcataaatttaattggagtttttcaagggctggtatcttttctatggaaatgttccaaagtactttttaaggaagtttcaaaactataaataaccttagatttgactgggagtttggtatcaacccaaagccatcagttgcaagcataccatgaatatttttcttatagacagagctataaaaaaagatacagtagaccaaaatagaaagcaaataaaccatataaagagttctatagtatatgccacttatacacatgtatatgcatttatgcagagacacatatttatatataaaataaatggacataaagagcttt

SEQ ID NO: 6118 - protein, 1554 aa, Homo sapiens; identical to SEQ ID NO: 825

SEQ ID NO: 6119 - DNA, 6659 bp, Homo sapiens
tagtgaggctaatcccgaagcagcacattccaaggggctaatctgcccaagttcattgcttacttgaaacgtctcttgggggaagagccgaacaagtgactttttttttccagtgggcggtcataagagcattattaacggaatgaccagccctagctgcagcaaaatgaaagcaacaggagctgctccggggactgcttttgccagtacccagaatcagtgctcaggctcagaaatcctggatagaaagagcattttataaaagagaatgtgtccacatcatacccagcaccaaagacccccataggtgttgctgtgggcgtctgataggccagcatgttggcctcacccccagtatctccgtgcttcagaatgagaaaaatgaaagtcgcctctcccgaaatgacatccagtctgaaaagtggtccatcagcaaacacactcaactcagccctacggatgcttttgggaccattgagttccaaggaggtggccattccaacaaagccatgtatgtgcgagtatcttttgatacaaaacctgatctcctcttacacctgatgaccaaggaatggcagttggagcttcccaagcttctcatctctgtccatgggggcctgcagaactttgaactccagccaaaactcaagcaagtctttgggaaagggctcatcaaagcagcaatgacaactggagcgtggatattcactggaggggttaacacaggtgttattcgtcatgttggcgatgccttgaaggatcatgcctctaagtctcgaggaaagatatgcaccataggtattgccccctggggaattgtggaaaaccaggaggacctcattggaagagatgttgtccggccataccagaccatgtccaatcccatgagcaagctcactgttctcaacagcatgcattcccacttcattctggctgacaacgggaccactggaaaatatggagcagaggtgaaacttcgaagacaactggaaaagcatatttcactccagaagataaacacaagaatcggtcaaggtgttcctgtggtggcactcatagtggaaggaggacccaatgtgatctcgattgttttggagtaccttcgagacacccctcccgtgccagtggttgtctgtgatgggagtggacgggcatcggacatcctggcctttgggcataaatactcagaagaaggcggactgataaatgaatctttgagggaccagctgttggtgactatacagaagactttcacatacactcgaacccaagctcagcatctgttcatcatcctcatggagtgcatgaagaagaaggaattgattacggtatttcggatgggatcagaaggacaccaggacattgatttggctatcctgacagctttactcaaaggagccaatgcctcggccccagaccaactgagcttagctttagcctggaacagagtcgacatcgctcgcagccagatctttatttacgggcaacagtggccggtgggatctctggagcaagccatgttggatgccttagttctggacagagtggattttgtgaaattactcatagagaatggagtaagcatgcaccgttttctcaccatctccagactagaggaattgtacaatacgagacatgggccctcaaatacattgtaccacttggtcagggatgtcaaaaagcgagagtatccaggtttcggttggatctattttaaggggaacctgcccccagactacagaatcagcctgattgacatcggcctggtgatcgagtacctgatgggcggggcttatcgctgcaactacacgcgcaagcgcttccggaccctctaccacaacctcttcggccccaagagggatgatattcccttgaggcgaggaagaaagacaaccaagaaacgtgaagaagaggtggacattgacttggatgatcctgagatcaaccacttccccttccctttccatgagctcatggtgtgggctgttctcatgaagcggcagaagatggccctgttcttctggcagcacggtgaggaggccatggccaaggccctggtggcctgcaagctctgcaaagccatggctcatgaggcctctgagaacgacatggttgacgacatttcccaggagctgaatcacaattccagagactttggccagctggctgtggagctcctggaccagtcctacaagcaggacgaacagctggccatgaaactgctgacgtatgagctgaagaactggagcaacgccacgtgcctgcagcttgccgtggctgccaaacaccgcgacttcatcgcgcacacgtgcagccagatgctgctcaccgacatgtggatgggccggctccgcatgcgcaagaactcaggcctcaaggtaattctgggaattctacttcctccttcaattctcagcttggagttcaagaacaaagacgacatgccctatatgtctcaggcccaggaaatccacctccaagagaaggaggcagaagaaccagagaagcccacaaaggaaaaagaggaagaggacatggagctcacagcaatgttgggacgaaacaacggggagtcctccaggaagaaggatgaagaggaagttcagagcaagcaccggttaatccccctcggcagaaaaatctatgaattctacaatgcacccatcgtgaagttctggttctacacactggcgtatatcggatacctgatgctcttcaactatatcgtgttagtgaagatggaacgctggccgtccacccaggaatggatcgtaatctcctatattttcaccctgggaatagaaaagatgagagagattctgatgtcagagccagggaagttgctacagaaagtgaaggtatggctgcaggagtactggaatgtcacggacctcatcgccatccttctgttttctgtcggaatgatccttcgtctccaagaccagcccttcaggagtgacgggagggtcatctactgcgtgaacatcatttactggtatatccgtctcctagacatcttcggcgtgaacaagtatttgggcccgtatgtaatgatgattggaaaaatgatgatagacatgatgtactttgtcatcattatgctggtggttctgatgagctttggggtcgccaggcaagccatcctttttcccaatgaggagccatcatggaaactggccaagaacatcttctacatgccctattggatgatttatggggaagtgtttgcggaccagatagaccctccctgtggacagaatgagacccgagaggatggtaaaataatccagctgcctccctgcaagacaggagcttggatcgtgccggccatcatggcctgctacctcttagtggcaaacatcttgctggtcaacctcctcattgctgtctttaacaatacattttttgaagtaaaatcgatatccaaccaagtctggaagtttcagaggtatcagctcatcatgactttccatgaaaggccagttctgcccccaccactgatcatcttcagccacatgaccatgatattccagcacctgtgctgccgatggaggaaacacgagagcgacccggatgaaagggactacggcctgaaactcttcataaccgatgatgagctcaagaaagtacatgactttgaagagcaatgcatagaagaatacttcagagaaaaggatgatcggttcaactcatctaatgatgagaggatacgggtgacttcagaaagggtggagaacatgtctatgcggctggaggaagtcaacgagagagagcactccatgaaggcttcactccagaccgtggacatccggctggcgcagctggaagaccttatcgggcgcatggccacggccctggagcgcctgacaggtctggagcgggccgagtccaacaaaatccgctcgaggacctcgtcagactgcacggacgccgcctacattgtccgtcagagcagcttcaacagccaggaagggaacaccttcaagctccaagagagtatagaccctgcaggtgaggagaccatgtccccaacttctccaaccttaatgccccgtatgcgaagccattctttctattcggtcaatatgaaagacaaaggtggtatagaaaagttggaaagtatttttaaagaaaggtccctgagcctacaccgggctactagttcccactctgtagcaaaagaacccaaagctcctgcagcccctgccaacaccttggccattgttcctgattccagaagaccatcatcgtgtatagacatctatgtctctgctatggatgagctccactgtgatatagaccctctggacaattccgtgaacatccttgggctgggcgagccaagcttttcaactccagtaccttccacagccccttcaagtagtgcctatgcaacacttgcacccacagacagacctccaagccggagcattgattttgaggacatcacctccatggacactagatctttttcttcagactacacccacctcccagaatgccaaaacccctgggactcagagcctccgatgtaccacaccattgagcgttccaaaagtagccgctacctagccaccacaccctttcttctagaagaggctcccattgtgaaatctcatagctttatgttttccccctcaaggagctattatgccaactttggggtgcctgtaaaaacagcagaatacacaagtattacagactgtattgacacaaggtgtgtcaatgcccctcaagcaattgcggacagagctgccttccctggaggtcttggagacaaagtggaggacttaacttgctgccatccagagcgagaagcagaactgagtcaccccagctctgacagtgaggagaatgaggccaaaggccgcagagccaccattgcaatatcctcccaggagggtgataactcagagagaaccctgtccaacaacatcactgttcccaagatagagcgcgccaacagctactcggcagaggagccaagtgcgccatatgcacacaccaggaagagcttctccatcagtgacaaactcgacaggcagcggaacacagcaagcctgcgaaatcccttccagagaagcaagtcctccaagccggagggccgaggggacagcctgtccatgaggagactgtccagaacatcggctttccaaagctttgaaagcaagcacaactaaaccttcttaatatccgccacagaaggctcaagaatccagccctaaaattctctccaactccagtttttcccctttccttgaatcatacctgctttattcttagctgagcaaaacaagcaatgctttgggaggtgttaactcaaaggtgacttctgggccacagatcaagaaagcatttgatctgacccagtgccagacacaggggatttaaggcatgttcacacttgctgggcagggagggggaagagagggagaaggaagggttagagatgaatgtgtatccgcagtcacagcagaaagccatgagagcaggggaaacaaggggcttcgagcacgctccatgccaggaggcatctgttgatttctgaccattatcaagagttgtaggatgcagggctaaattgcaaaataaaataaaatagccagcgtacacaatgagatattctaaacttccattctgttttcttttcacattggctccatcactggtgactgatgaagagcatcctctttattcagtataagccggcagcaagcagttctacctaacgtcccacatccttctcatgccaacacttctgtaattgatcattataaagaaaaaacaaggtaacagtcatagttcacctgtctcttatctattcacttctggtgccacaactgtttatccttttttgaagaaaataagggaacagaaatgcctttttgtattgcaatcgaaatgaaagaagagttgatgttaaaaaaacaaaagtcaagtgatttattatatacagtgggcgttcaagtctagtcgagcaagctcaggagaatgtaattaaataattttatattttttaatttattttgtatctcacctgtcatggatgaattcattcactgaatatgtaatattgaacttaaaaaaaaaaaaaaaaaaacagtggacagaactagcctgaaattgccatgtgggatgttctgttctcaccgttcatgtcgtgtgttgtgctgctgtgtgaccgtcatcatttgcatggctccaccacgtcctcctgaacacctccaagacgtaactgccaatttttcacaccactcatcacatgaccattttgtatatgaatatatggttatatgtggatattttcatacctagagttttgccatctaatctgagctcagcataaatttaattggagtttttcaagggctggtatcttttctatggaaatgttccaaagtactttttaaggaagtttcaaaactataaataaccttagatttgactgggagtttggtatcaacccaaagccatcagttgcaagcataccatgaatatttttcttatagacagagctataaaaaaagatacagtagaccaaaatagaaagcaaataaaccatataaagagttctatagtatatgccacttatacacatgtatatgcatttatgcagagacacatatttatatataaaataaatggacataaagagcttt

SEQ ID NO: 6120 - protein, 1556 aa, Homo sapiens; identical to SEQ ID NO: 831

SEQ ID NO: 6121 - DNA, 6698 bp, Homo sapiens
tagtgaggctaatcccgaagcagcacattccaaggggctaatctgcccaagttcattgcttacttgaaacgtctcttgggggaagagccgaacaagtgactttttttttccagtgggcggtcataagagcattattaacggaatgaccagccctagctgcagcaaaatgaaagcaacaggagctgctccggggactgcttttgccagtacccagaatcagtgctcaggctcagaaatcctggatagaaagagcattttataaaagagaatgtgtccacatcatacccagcaccaaagacccccataggtgttgctgtgggcgtctgataggccagcatgttggcctcacccccagtatctccgtgcttcagaatgagaaaaatgaaagtcgcctctcccgaaatgacatccagtctgaaaagtggtccatcagcaaacacactcaactcagccctacggatgcttttgggaccattgagttccaaggaggtggccattccaacaaagccatgtatgtgcgagtatcttttgatacaaaacctgatctcctcttacacctgatgaccaaggaatggcagttggagcttcccaagcttctcatctctgtccatgggggcctgcagaactttgaactccagccaaaactcaagcaagtctttgggaaagggctcatcaaagcagcaatgacaactggagcgtggatattcactggaggggttaacacaggtgttattcgtcatgttggcgatgccttgaaggatcatgcctctaagtctcgaggaaagatatgcaccataggtattgccccctggggaattgtggaaaaccaggaggacctcattggaagagatgttgtccggccataccagaccatgtccaatcccatgagcaagctcactgttctcaacagcatgcattcccacttcattctggctgacaacgggaccactggaaaatatggagcagaggtgaaacttcgaagacaactggaaaagcatatttcactccagaagataaacacaagatgcctgccgtttttctctcttgactcccgcttgttttattcattttggggtagttgccagttagactcagttggaatcggtcaaggtgttcctgtggtggcactcatagtggaaggaggacccaatgtgatctcgattgttttggagtaccttcgagacacccctcccgtgccagtggttgtctgtgatgggagtggacgggcatcggacatcctggcctttgggcataaatactcagaagaaggcggactgataaatgaatctttgagggaccagctgttggtgactatacagaagactttcacatacactcgaacccaagctcagcatctgttcatcatcctcatggagtgcatgaagaagaaggaattgattacggtatttcggatgggatcagaaggacaccaggacattgatttggctatcctgacagctttactcaaaggagccaatgcctcggccccagaccaactgagcttagctttagcctggaacagagtcgacatcgctcgcagccagatctttatttacgggcaacagtggccggtgggatctctggagcaagccatgttggatgccttagttctggacagagtggattttgtgaaattactcatagagaatggagtaagcatgcaccgttttctcaccatctccagactagaggaattgtacaatacgagacatgggccctcaaatacattgtaccacttggtcagggatgtcaaaaaggggaacctgcccccagactacagaatcagcctgattgacatcggcctggtgatcgagtacctgatgggcggggcttatcgctgcaactacacgcgcaagcgcttccggaccctctaccacaacctcttcggccccaagagggatgatattcccttgaggcgaggaagaaagacaaccaagaaacgtgaagaagaggtggacattgacttggatgatcctgagatcaaccacttccccttccctttccatgagctcatggtgtgggctgttctcatgaagcggcagaagatggccctgttcttctggcagcacggtgaggaggccatggccaaggccctggtggcctgcaagctctgcaaagccatggctcatgaggcctctgagaacgacatggttgacgacatttcccaggagctgaatcacaattccagagactttggccagctggctgtggagctcctggaccagtcctacaagcaggacgaacagctggccatgaaactgctgacgtatgagctgaagaactggagcaacgccacgtgcctgcagcttgccgtggctgccaaacaccgcgacttcatcgcgcacacgtgcagccagatgctgctcaccgacatgtggatgggccggctccgcatgcgcaagaactcaggcctcaaggtaattctgggaattctacttcctccttcaattctcagcttggagttcaagaacaaagacgacatgccctatatgtctcaggcccaggaaatccacctccaagagaaggaggcagaagaaccagagaagcccacaaaggaaaaagaggaagaggacatggagctcacagcaatgttgggacgaaacaacggggagtcctccaggaagaaggatgaagaggaagttcagagcaagcaccggttaatccccctcggcagaaaaatctatgaattctacaatgcacccatcgtgaagttctggttctacacactggcgtatatcggatacctgatgctcttcaactatatcgtgttagtgaagatggaacgctggccgtccacccaggaatggatcgtaatctcctatattttcaccctgggaatagaaaagatgagagagattctgatgtcagagccagggaagttgctacagaaagtgaaggtatggctgcaggagtactggaatgtcacggacctcatcgccatccttctgttttctgtcggaatgatccttcgtctccaagaccagcccttcaggagtgacgggagggtcatctactgcgtgaacatcatttactggtatatccgtctcctagacatcttcggcgtgaacaagtatttgggcccgtatgtaatgatgattggaaaaatgatgatagacatgatgtactttgtcatcattatgctggtggttctgatgagctttggggtcgccaggcaagccatcctttttcccaatgaggagccatcatggaaactggccaagaacatcttctacatgccctattggatgatttatggggaagtgtttgcggaccagatagaccctccctgtggacagaatgagacccgagaggatggtaaaataatccagctgcctccctgcaagacaggagcttggatcgtgccggccatcatggcctgctacctcttagtggcaaacatcttgctggtcaacctcctcattgctgtctttaacaatacattttttgaagtaaaatcgatatccaaccaagtctggaagtttcagaggtatcagctcatcatgactttccatgaaaggccagttctgcccccaccactgatcatcttcagccacatgaccatgatattccagcacctgtgctgccgatggaggaaacacgagagcgacccggatgaaagggactacggcctgaaactcttcataaccgatgatgagctcaagaaagtacatgactttgaagagcaatgcatagaagaatacttcagagaaaaggatgatcggttcaactcatctaatgatgagaggatacgggtgacttcagaaagggtggagaacatgtctatgcggctggaggaagtcaacgagagagagcactccatgaaggcttcactccagaccgtggacatccggctggcgcagctggaagaccttatcgggcgcatggccacggccctggagcgcctgacaggtctggagcgggccgagtccaacaaaatccgctcgaggacctcgtcagactgcacggacgccgcctacattgtccgtcagagcagcttcaacagccaggaagggaacaccttcaagctccaagagagtatagaccctgcaggtgaggagaccatgtccccaacttctccaaccttaatgccccgtatgcgaagccattctttctattcggtcaatatgaaagacaaaggtggtatagaaaagttggaaagtatttttaaagaaaggtccctgagcctacaccgggctactagttcccactctgtagcaaaagaacccaaagctcctgcagcccctgccaacaccttggccattgttcctgattccagaagaccatcatcgtgtatagacatctatgtctctgctatggatgagctccactgtgatatagaccctctggacaattccgtgaacatccttgggctgggcgagccaagcttttcaactccagtaccttccacagccccttcaagtagtgcctatgcaacacttgcacccacagacagacctccaagccggagcattgattttgaggacatcacctccatggacactagatctttttcttcagactacacccacctcccagaatgccaaaacccctgggactcagagcctccgatgtaccacaccattgagcgttccaaaagtagccgctacctagccaccacaccctttcttctagaagaggctcccattgtgaaatctcatagctttatgttttccccctcaaggagctattatgccaactttggggtgcctgtaaaaacagcagaatacacaagtattacagactgtattgacacaaggtgtgtcaatgcccctcaagcaattgcggacagagctgccttccctggaggtcttggagacaaagtggaggacttaacttgctgccatccagagcgagaagcagaactgagtcaccccagctctgacagtgaggagaatgaggccaaaggccgcagagccaccattgcaatatcctcccaggagggtgataactcagagagaaccctgtccaacaacatcactgttcccaagatagagcgcgccaacagctactcggcagaggagccaagtgcgccatatgcacacaccaggaagagcttctccatcagtgacaaactcgacaggcagcggaacacagcaagcctgcgaaatcccttccagagaagcaagtcctccaagccggagggccgaggggacagcctgtccatgaggagactgtccagaacatcggctttccaaagctttgaaagcaagcacaactaaaccttcttaatatccgccacagaaggctcaagaatccagccctaaaattctctccaactccagtttttcccctttccttgaatcatacctgctttattcttagctgagcaaaacaagcaatgctttgggaggtgttaactcaaaggtgacttctgggccacagatcaagaaagcatttgatctgacccagtgccagacacaggggatttaaggcatgttcacacttgctgggcagggagggggaagagagggagaaggaagggttagagatgaatgtgtatccgcagtcacagcagaaagccatgagagcaggggaaacaaggggcttcgagcacgctccatgccaggaggcatctgttgatttctgaccattatcaagagttgtaggatgcagggctaaattgcaaaataaaataaaatagccagcgtacacaatgagatattctaaacttccattctgttttcttttcacattggctccatcactggtgactgatgaagagcatcctctttattcagtataagccggcagcaagcagttctacctaacgtcccacatccttctcatgccaacacttctgtaattgatcattataaagaaaaaacaaggtaacagtcatagttcacctgtctcttatctattcacttctggtgccacaactgtttatccttttttgaagaaaataagggaacagaaatgcctttttgtattgcaatcgaaatgaaagaagagttgatgttaaaaaaacaaaagtcaagtgatttattatatacagtgggcgttcaagtctagtcgagcaagctcaggagaatgtaattaaataattttatattttttaatttattttgtatctcacctgtcatggatgaattcattcactgaatatgtaatattgaacttaaaaaaaaaaaaaaaaaaacagtggacagaactagcctgaaattgccatgtgggatgttctgttctcaccgttcatgtcgtgtgttgtgctgctgtgtgaccgtcatcatttgcatggctccaccacgtcctcctgaacacctccaagacgtaactgccaatttttcacaccactcatcacatgaccattttgtatatgaatatatggttatatgtggatattttcatacctagagttttgccatctaatctgagctcagcataaatttaattggagtttttcaagggctggtatcttttctatggaaatgttccaaagtactttttaaggaagtttcaaaactataaataaccttagatttgactgggagtttggtatcaacccaaagccatcagttgcaagcataccatgaatatttttcttatagacagagctataaaaaaagatacagtagaccaaaatagaaagcaaataaaccatataaagagttctatagtatatgccacttatacacatgtatatgcatttatgcagagacacatatttatatataaaataaatggacataaagagcttt

SEQ ID NO: 6122 - protein, 1569 aa, Homo sapiens; identical to SEQ ID NO: 835

SEQ ID NO: 6123 - DNA, 6623 bp, Homo sapiens
tagtgaggctaatcccgaagcagcacattccaaggggctaatctgcccaagttcattgcttacttgaaacgtctcttgggggaagagccgaacaagtgactttttttttccagtgggcggtcataagagcattattaacggaatgaccagccctagctgcagcaaaatgaaagcaacaggagctgctccggggactgcttttgccagtacccagaatcagtgctcaggctcagaaatcctggatagaaagagcattttataaaagagaatgtgtccacatcatacccagcaccaaagacccccataggtgttgctgtgggcgtctgataggccagcatgttggcctcacccccagtatctccgtgcttcagaatgagaaaaatgaaagtcgcctctcccgaaatgacatccagtctgaaaagtggtccatcagcaaacacactcaactcagccctacggatgcttttgggaccattgagttccaaggaggtggccattccaacaaagccatgtatgtgcgagtatcttttgatacaaaacctgatctcctcttacacctgatgaccaaggaatggcagttggagcttcccaagcttctcatctctgtccatgggggcctgcagaactttgaactccagccaaaactcaagcaagtctttgggaaagggctcatcaaagcagcaatgacaactggagcgtggatattcactggaggggttaacacaggtgttattcgtcatgttggcgatgccttgaaggatcatgcctctaagtctcgaggaaagatatgcaccataggtattgccccctggggaattgtggaaaaccaggaggacctcattggaagagatgttgtccggccataccagaccatgtccaatcccatgagcaagctcactgttctcaacagcatgcattcccacttcattctggctgacaacgggaccactggaaaatatggagcagaggtgaaacttcgaagacaactggaaaagcatatttcactccagaagataaacacaagaatcggtcaaggtgttcctgtggtggcactcatagtggaaggaggacccaatgtgatctcgattgttttggagtaccttcgagacacccctcccgtgccagtggttgtctgtgatgggagtggacgggcatcggacatcctggcctttgggcataaatactcagaagaaggcggactgataaatgaatctttgagggaccagctgttggtgactatacagaagactttcacatacactcgaacccaagctcagcatctgttcatcatcctcatggagtgcatgaagaagaaggaattgattacggtatttcggatgggatcagaaggacaccaggacattgatttggctatcctgacagctttactcaaaggagccaatgcctcggccccagaccaactgagcttagctttagcctggaacagagtcgacatcgctcgcagccagatctttatttacgggcaacagtggccggtgggatctctggagcaagccatgttggatgccttagttctggacagagtggattttgtgaaattactcatagagaatggagtaagcatgcaccgttttctcaccatctccagactagaggaattgtacaatacgagacatgggccctcaaatacattgtaccacttggtcagggatgtcaaaaaggggaacctgcccccagactacagaatcagcctgattgacatcggcctggtgatcgagtacctgatgggcggggcttatcgctgcaactacacgcgcaagcgcttccggaccctctaccacaacctcttcggccccaagagggatgatattcccttgaggcgaggaagaaagacaaccaagaaacgtgaagaagaggtggacattgacttggatgatcctgagatcaaccacttccccttccctttccatgagctcatggtgtgggctgttctcatgaagcggcagaagatggccctgttcttctggcagcacggtgaggaggccatggccaaggccctggtggcctgcaagctctgcaaagccatggctcatgaggcctctgagaacgacatggttgacgacatttcccaggagctgaatcacaattccagagactttggccagctggctgtggagctcctggaccagtcctacaagcaggacgaacagctggccatgaaactgctgacgtatgagctgaagaactggagcaacgccacgtgcctgcagcttgccgtggctgccaaacaccgcgacttcatcgcgcacacgtgcagccagatgctgctcaccgacatgtggatgggccggctccgcatgcgcaagaactcaggcctcaaggtaattctgggaattctacttcctccttcaattctcagcttggagttcaagaacaaagacgacatgccctatatgtctcaggcccaggaaatccacctccaagagaaggaggcagaagaaccagagaagcccacaaaggaaaaagaggaagaggacatggagctcacagcaatgttgggacgaaacaacggggagtcctccaggaagaaggatgaagaggaagttcagagcaagcaccggttaatccccctcggcagaaaaatctatgaattctacaatgcacccatcgtgaagttctggttctacacactggcgtatatcggatacctgatgctcttcaactatatcgtgttagtgaagatggaacgctggccgtccacccaggaatggatcgtaatctcctatattttcaccctgggaatagaaaagatgagagagattctgatgtcagagccagggaagttgctacagaaagtgaaggtatggctgcaggagtactggaatgtcacggacctcatcgccatccttctgttttctgtcggaatgatccttcgtctccaagaccagcccttcaggagtgacgggagggtcatctactgcgtgaacatcatttactggtatatccgtctcctagacatcttcggcgtgaacaagtatttgggcccgtatgtaatgatgattggaaaaatgatgatagacatgatgtactttgtcatcattatgctggtggttctgatgagctttggggtcgccaggcaagccatcctttttcccaatgaggagccatcatggaaactggccaagaacatcttctacatgccctattggatgatttatggggaagtgtttgcggaccagatagaccctccctgtggacagaatgagacccgagaggatggtaaaataatccagctgcctccctgcaagacaggagcttggatcgtgccggccatcatggcctgctacctcttagtggcaaacatcttgctggtcaacctcctcattgctgtctttaacaatacattttttgaagtaaaatcgatatccaaccaagtctggaagtttcagaggtatcagctcatcatgactttccatgaaaggccagttctgcccccaccactgatcatcttcagccacatgaccatgatattccagcacctgtgctgccgatggaggaaacacgagagcgacccggatgaaagggactacggcctgaaactcttcataaccgatgatgagctcaagaaagtacatgactttgaagagcaatgcatagaagaatacttcagagaaaaggatgatcggttcaactcatctaatgatgagaggatacgggtgacttcagaaagggtggagaacatgtctatgcggctggaggaagtcaacgagagagagcactccatgaaggcttcactccagaccgtggacatccggctggcgcagctggaagaccttatcgggcgcatggccacggccctggagcgcctgacaggtctggagcgggccgagtccaacaaaatccgctcgaggacctcgtcagactgcacggacgccgcctacattgtccgtcagagcagcttcaacagccaggaagggaacaccttcaagctccaagagagtatagaccctgcaggtgaggagaccatgtccccaacttctccaaccttaatgccccgtatgcgaagccattctttctattcggtcaatatgaaagacaaaggtggtatagaaaagttggaaagtatttttaaagaaaggtccctgagcctacaccgggctactagttcccactctgtagcaaaagaacccaaagctcctgcagcccctgccaacaccttggccattgttcctgattccagaagaccatcatcgtgtatagacatctatgtctctgctatggatgagctccactgtgatatagaccctctggacaattccgtgaacatccttgggctgggcgagccaagcttttcaactccagtaccttccacagccccttcaagtagtgcctatgcaacacttgcacccacagacagacctccaagccggagcattgattttgaggacatcacctccatggacactagatctttttcttcagactacacccacctcccagaatgccaaaacccctgggactcagagcctccgatgtaccacaccattgagcgttccaaaagtagccgctacctagccaccacaccctttcttctagaagaggctcccattgtgaaatctcatagctttatgttttccccctcaaggagctattatgccaactttggggtgcctgtaaaaacagcagaatacacaagtattacagactgtattgacacaaggtgtgtcaatgcccctcaagcaattgcggacagagctgccttccctggaggtcttggagacaaagtggaggacttaacttgctgccatccagagcgagaagcagaactgagtcaccccagctctgacagtgaggagaatgaggccaaaggccgcagagccaccattgcaatatcctcccaggagggtgataactcagagagaaccctgtccaacaacatcactgttcccaagatagagcgcgccaacagctactcggcagaggagccaagtgcgccatatgcacacaccaggaagagcttctccatcagtgacaaactcgacaggcagcggaacacagcaagcctgcgaaatcccttccagagaagcaagtcctccaagccggagggccgaggggacagcctgtccatgaggagactgtccagaacatcggctttccaaagctttgaaagcaagcacaactaaaccttcttaatatccgccacagaaggctcaagaatccagccctaaaattctctccaactccagtttttcccctttccttgaatcatacctgctttattcttagctgagcaaaacaagcaatgctttgggaggtgttaactcaaaggtgacttctgggccacagatcaagaaagcatttgatctgacccagtgccagacacaggggatttaaggcatgttcacacttgctgggcagggagggggaagagagggagaaggaagggttagagatgaatgtgtatccgcagtcacagcagaaagccatgagagcaggggaaacaaggggcttcgagcacgctccatgccaggaggcatctgttgatttctgaccattatcaagagttgtaggatgcagggctaaattgcaaaataaaataaaatagccagcgtacacaatgagatattctaaacttccattctgttttcttttcacattggctccatcactggtgactgatgaagagcatcctctttattcagtataagccggcagcaagcagttctacctaacgtcccacatccttctcatgccaacacttctgtaattgatcattataaagaaaaaacaaggtaacagtcatagttcacctgtctcttatctattcacttctggtgccacaactgtttatccttttttgaagaaaataagggaacagaaatgcctttttgtattgcaatcgaaatgaaagaagagttgatgttaaaaaaacaaaagtcaagtgatttattatatacagtgggcgttcaagtctagtcgagcaagctcaggagaatgtaattaaataattttatattttttaatttattttgtatctcacctgtcatggatgaattcattcactgaatatgtaatattgaacttaaaaaaaaaaaaaaaaaaacagtggacagaactagcctgaaattgccatgtgggatgttctgttctcaccgttcatgtcgtgtgttgtgctgctgtgtgaccgtcatcatttgcatggctccaccacgtcctcctgaacacctccaagacgtaactgccaatttttcacaccactcatcacatgaccattttgtatatgaatatatggttatatgtggatattttcatacctagagttttgccatctaatctgagctcagcataaatttaattggagtttttcaagggctggtatcttttctatggaaatgttccaaagtactttttaaggaagtttcaaaactataaataaccttagatttgactgggagtttggtatcaacccaaagccatcagttgcaagcataccatgaatatttttcttatagacagagctataaaaaaagatacagtagaccaaaatagaaagcaaataaaccatataaagagttctatagtatatgccacttatacacatgtatatgcatttatgcagagacacatatttatatataaaataaatggacataaagagcttt

SEQ ID NO: 6124 - protein, 1544 aa, Homo sapiens; identical to SEQ ID NO: 829

SEQ ID NO: 6125 - DNA, 6689 bp, Homo sapiens
tagtgaggctaatcccgaagcagcacattccaaggggctaatctgcccaagttcattgcttacttgaaacgtctcttgggggaagagccgaacaagtgactttttttttccagtgggcggtcataagagcattattaacggaatgaccagccctagctgcagcaaaatgaaagcaacaggagctgctccggggactgcttttgccagtacccagaatcagtgctcaggctcagaaatcctggatagaaagagcattttataaaagagaatgtgtccacatcatacccagcaccaaagacccccataggtgttgctgtgggcgtctgataggccagcatgttggcctcacccccagtatctccgtgcttcagaatgagaaaaatgaaagtcgcctctcccgaaatgacatccagtctgaaaagtggtccatcagcaaacacactcaactcagccctacggatgcttttgggaccattgagttccaaggaggtggccattccaacaaagccatgtatgtgcgagtatcttttgatacaaaacctgatctcctcttacacctgatgaccaaggaatggcagttggagcttcccaagcttctcatctctgtccatgggggcctgcagaactttgaactccagccaaaactcaagcaagtctttgggaaagggctcatcaaagcagcaatgacaactggagcgtggatattcactggaggggttaacacaggtgttattcgtcatgttggcgatgccttgaaggatcatgcctctaagtctcgaggaaagatatgcaccataggtattgccccctggggaattgtggaaaaccaggaggacctcattggaagagatgttgtccggccataccagaccatgtccaatcccatgagcaagctcactgttctcaacagcatgcattcccacttcattctggctgacaacgggaccactggaaaatatggagcagaggtgaaacttcgaagacaactggaaaagcatatttcactccagaagataaacacaagaatcggtcaaggtgttcctgtggtggcactcatagtggaaggaggacccaatgtgatctcgattgttttggagtaccttcgagacacccctcccgtgccagtggttgtctgtgatgggagtggacgggcatcggacatcctggcctttgggcataaatactcagaagaaggcggactgataaatgaatctttgagggaccagctgttggtgactatacagaagactttcacatacactcgaacccaagctcagcatctgttcatcatcctcatggagtgcatgaagaagaaggaattgattacggtatttcggatgggatcagaaggacaccaggacattgatttggctatcctgacagctttactcaaaggagccaatgcctcggccccagaccaactgagcttagctttagcctggaacagagtcgacatcgctcgcagccagatctttatttacgggcaacagtggccggtgggatctctggagcaagccatgttggatgccttagttctggacagagtggattttgtgaaattactcatagagaatggagtaagcatgcaccgttttctcaccatctccagactagaggaattgtacaatacgagacatgggccctcaaatacattgtaccacttggtcagggatgtcaaaaagcgagagtatccaggtttcggttggatctattttaaggggaacctgcccccagactacagaatcagcctgattgacatcggcctggtgatcgagtacctgatgggcggggcttatcgctgcaactacacgcgcaagcgcttccggaccctctaccacaacctcttcggccccaagaggcccaaagccttgaaactgctgggaatggaggatgatattcccttgaggcgaggaagaaagacaaccaagaaacgtgaagaagaggtggacattgacttggatgatcctgagatcaaccacttccccttccctttccatgagctcatggtgtgggctgttctcatgaagcggcagaagatggccctgttcttctggcagcacggtgaggaggccatggccaaggccctggtggcctgcaagctctgcaaagccatggctcatgaggcctctgagaacgacatggttgacgacatttcccaggagctgaatcacaattccagagactttggccagctggctgtggagctcctggaccagtcctacaagcaggacgaacagctggccatgaaactgctgacgtatgagctgaagaactggagcaacgccacgtgcctgcagcttgccgtggctgccaaacaccgcgacttcatcgcgcacacgtgcagccagatgctgctcaccgacatgtggatgggccggctccgcatgcgcaagaactcaggcctcaaggtaattctgggaattctacttcctccttcaattctcagcttggagttcaagaacaaagacgacatgccctatatgtctcaggcccaggaaatccacctccaagagaaggaggcagaagaaccagagaagcccacaaaggaaaaagaggaagaggacatggagctcacagcaatgttgggacgaaacaacggggagtcctccaggaagaaggatgaagaggaagttcagagcaagcaccggttaatccccctcggcagaaaaatctatgaattctacaatgcacccatcgtgaagttctggttctacacactggcgtatatcggatacctgatgctcttcaactatatcgtgttagtgaagatggaacgctggccgtccacccaggaatggatcgtaatctcctatattttcaccctgggaatagaaaagatgagagagattctgatgtcagagccagggaagttgctacagaaagtgaaggtatggctgcaggagtactggaatgtcacggacctcatcgccatccttctgttttctgtcggaatgatccttcgtctccaagaccagcccttcaggagtgacgggagggtcatctactgcgtgaacatcatttactggtatatccgtctcctagacatcttcggcgtgaacaagtatttgggcccgtatgtaatgatgattggaaaaatgatgatagacatgatgtactttgtcatcattatgctggtggttctgatgagctttggggtcgccaggcaagccatcctttttcccaatgaggagccatcatggaaactggccaagaacatcttctacatgccctattggatgatttatggggaagtgtttgcggaccagatagaccctccctgtggacagaatgagacccgagaggatggtaaaataatccagctgcctccctgcaagacaggagcttggatcgtgccggccatcatggcctgctacctcttagtggcaaacatcttgctggtcaacctcctcattgctgtctttaacaatacattttttgaagtaaaatcgatatccaaccaagtctggaagtttcagaggtatcagctcatcatgactttccatgaaaggccagttctgcccccaccactgatcatcttcagccacatgaccatgatattccagcacctgtgctgccgatggaggaaacacgagagcgacccggatgaaagggactacggcctgaaactcttcataaccgatgatgagctcaagaaagtacatgactttgaagagcaatgcatagaagaatacttcagagaaaaggatgatcggttcaactcatctaatgatgagaggatacgggtgacttcagaaagggtggagaacatgtctatgcggctggaggaagtcaacgagagagagcactccatgaaggcttcactccagaccgtggacatccggctggcgcagctggaagaccttatcgggcgcatggccacggccctggagcgcctgacaggtctggagcgggccgagtccaacaaaatccgctcgaggacctcgtcagactgcacggacgccgcctacattgtccgtcagagcagcttcaacagccaggaagggaacaccttcaagctccaagagagtatagaccctgcaggtgaggagaccatgtccccaacttctccaaccttaatgccccgtatgcgaagccattctttctattcggtcaatatgaaagacaaaggtggtatagaaaagttggaaagtatttttaaagaaaggtccctgagcctacaccgggctactagttcccactctgtagcaaaagaacccaaagctcctgcagcccctgccaacaccttggccattgttcctgattccagaagaccatcatcgtgtatagacatctatgtctctgctatggatgagctccactgtgatatagaccctctggacaattccgtgaacatccttgggctgggcgagccaagcttttcaactccagtaccttccacagccccttcaagtagtgcctatgcaacacttgcacccacagacagacctccaagccggagcattgattttgaggacatcacctccatggacactagatctttttcttcagactacacccacctcccagaatgccaaaacccctgggactcagagcctccgatgtaccacaccattgagcgttccaaaagtagccgctacctagccaccacaccctttcttctagaagaggctcccattgtgaaatctcatagctttatgttttccccctcaaggagctattatgccaactttggggtgcctgtaaaaacagcagaatacacaagtattacagactgtattgacacaaggtgtgtcaatgcccctcaagcaattgcggacagagctgccttccctggaggtcttggagacaaagtggaggacttaacttgctgccatccagagcgagaagcagaactgagtcaccccagctctgacagtgaggagaatgaggccaaaggccgcagagccaccattgcaatatcctcccaggagggtgataactcagagagaaccctgtccaacaacatcactgttcccaagatagagcgcgccaacagctactcggcagaggagccaagtgcgccatatgcacacaccaggaagagcttctccatcagtgacaaactcgacaggcagcggaacacagcaagcctgcgaaatcccttccagagaagcaagtcctccaagccggagggccgaggggacagcctgtccatgaggagactgtccagaacatcggctttccaaagctttgaaagcaagcacaactaaaccttcttaatatccgccacagaaggctcaagaatccagccctaaaattctctccaactccagtttttcccctttccttgaatcatacctgctttattcttagctgagcaaaacaagcaatgctttgggaggtgttaactcaaaggtgacttctgggccacagatcaagaaagcatttgatctgacccagtgccagacacaggggatttaaggcatgttcacacttgctgggcagggagggggaagagagggagaaggaagggttagagatgaatgtgtatccgcagtcacagcagaaagccatgagagcaggggaaacaaggggcttcgagcacgctccatgccaggaggcatctgttgatttctgaccattatcaagagttgtaggatgcagggctaaattgcaaaataaaataaaatagccagcgtacacaatgagatattctaaacttccattctgttttcttttcacattggctccatcactggtgactgatgaagagcatcctctttattcagtataagccggcagcaagcagttctacctaacgtcccacatccttctcatgccaacacttctgtaattgatcattataaagaaaaaacaaggtaacagtcatagttcacctgtctcttatctattcacttctggtgccacaactgtttatccttttttgaagaaaataagggaacagaaatgcctttttgtattgcaatcgaaatgaaagaagagttgatgttaaaaaaacaaaagtcaagtgatttattatatacagtgggcgttcaagtctagtcgagcaagctcaggagaatgtaattaaataattttatattttttaatttattttgtatctcacctgtcatggatgaattcattcactgaatatgtaatattgaacttaaaaaaaaaaaaaaaaaaacagtggacagaactagcctgaaattgccatgtgggatgttctgttctcaccgttcatgtcgtgtgttgtgctgctgtgtgaccgtcatcatttgcatggctccaccacgtcctcctgaacacctccaagacgtaactgccaatttttcacaccactcatcacatgaccattttgtatatgaatatatggttatatgtggatattttcatacctagagttttgccatctaatctgagctcagcataaatttaattggagtttttcaagggctggtatcttttctatggaaatgttccaaagtactttttaaggaagtttcaaaactataaataaccttagatttgactgggagtttggtatcaacccaaagccatcagttgcaagcataccatgaatatttttcttatagacagagctataaaaaaagatacagtagaccaaaatagaaagcaaataaaccatataaagagttctatagtatatgccacttatacacatgtatatgcatttatgcagagacacatatttatatataaaataaatggacataaagagcttt

SEQ ID NO: 6126 - protein, 1566 aa, Homo sapiens; identical to SEQ ID NO: 827

SEQ ID NO: 6127 - DNA, 5177 bp, Homo sapiens
tccgaccacaggctgttttgtgcaggctgtccctcttcttcaaaatcgtgcatcccctccccgaagcagcaggcagtgtgcctccattcagccacatttggtatgcatgagcacggctgcagagagaggggaggtggctgttttaagaaggttcaggggctcaggcaaggctacttgactagtcttccaagttccaggaagcctctgccctaatggaatttgcaggtgtggagatgaccatgggatgccagagccgtgggggaccgtttattttctaggcattgctcaggttttcagtttcttgttttcctggtggaatttggaaggggtcatgaatcaggctgatgctcctcgacccctaaactggaccatccggaagctgtgccacgcagcctttcttccatctgtcagacttctgaaggctcagaaatcctggatagaaagagcattttataaaagagaatgtgtccacatcatacccagcaccaaagacccccataggtgttgctgtgggcgtctgataggccagcatgttggcctcacccccagtatctccgtgcttcagaatgagaaaaatgaaagtcgcctctcccgaaatgacatccagtctgaaaagtggtccatcagcaaacacactcaactcagccctacggatgcttttgggaccattgagttccaaggaggtggccattccaacaaagccatgtatgtgcgagtatcttttgatacaaaacctgatctcctcttacacctgatgaccaaggaatggcagttggagcttcccaagcttctcatctctgtccatgggggcctgcagaactttgaactccagccaaaactcaagcaagtctttgggaaagggctcatcaaagcagcaatgacaactggagcgtggatattcactggaggggttaacacaggtgttattcgtcatgttggcgatgccttgaaggatcatgcctctaagtctcgaggaaagatatgcaccataggtattgccccctggggaattgtggaaaaccaggaggacctcattggaagagatgttgtccggccataccagaccatgtccaatcccatgagcaagctcactgttctcaacagcatgcattcccacttcattctggctgacaacgggaccactggaaaatatggagcagaggtgaaacttcgaagacaactggaaaagcatatttcactccagaagataaacacaagaatcggtcaaggtgttcctgtggtggcactcatagtggaaggaggacccaatgtgatctcgattgttttggagtaccttcgagacacccctcccgtgccagtggttgtctgtgatgggagtggacgggcatcggacatcctggcctttgggcataaatactcagaagaaggcggactgataaatgaatctttgagggaccagctgttggtgactatacagaagactttcacatacactcgaacccaagctcagcatctgttcatcatcctcatggagtgcatgaagaagaaggaattgattacggtatttcggatgggatcagaaggacaccaggacattgatttggctatcctgacagctttactcaaaggagccaatgcctcggccccagaccaactgagcttagctttagcctggaacagagtcgacatcgctcgcagccagatctttatttacgggcaacagtggccggtgggatctctggagcaagccatgttggatgccttagttctggacagagtggattttgtgaaattactcatagagaatggagtaagcatgcaccgttttctcaccatctccagactagaggaattgtacaatacgagacatgggccctcaaatacattgtaccacttggtcagggatgtcaaaaaggggaacctgcccccagactacagaatcagcctgattgacatcggcctggtgatcgagtacctgatgggcggggcttatcgctgcaactacacgcgcaagcgcttccggaccctctaccacaacctcttcggccccaagaggcccaaagccttgaaactgctgggaatggaggatgatattcccttgaggcgaggaagaaagacaaccaagaaacgtgaagaagaggtggacattgacttggatgatcctgagatcaaccacttccccttccctttccatgagctcatggtgtgggctgttctcatgaagcggcagaagatggccctgttcttctggcagcacggtgaggaggccatggccaaggccctggtggcctgcaagctctgcaaagccatggctcatgaggcctctgagaacgacatggttgacgacatttcccaggagctgaatcacaattccagagactttggccagctggctgtggagctcctggaccagtcctacaagcaggacgaacagctggccatgaaactgctgacgtatgagctgaagaactggagcaacgccacgtgcctgcagcttgccgtggctgccaaacaccgcgacttcatcgcgcacacgtgcagccagatgctgctcaccgacatgtggatgggccggctccgcatgcgcaagaactcaggcctcaaggtaattctgggaattctacttcctccttcaattctcagcttggagttcaagaacaaagacgacatgccctatatgtctcaggcccaggaaatccacctccaagagaaggaggcagaagaaccagagaagcccacaaaggaaaaagaggaagaggacatggagctcacagcaatgttgggacgaaacaacggggagtcctccaggaagaaggatgaagaggaagttcagagcaagcaccggttaatccccctcggcagaaaaatctatgaattctacaatgcacccatcgtgaagttctggttctacacactggcgtatatcggatacctgatgctcttcaactatatcgtgttagtgaagatggaacgctggccgtccacccaggaatggatcgtaatctcctatattttcaccctgggaatagaaaagatgagagagattctgatgtcagagccagggaagttgctacagaaagtgaaggtatggctgcaggagtactggaatgtcacggacctcatcgccatccttctgttttctgtcggaatgatccttcgtctccaagaccagcccttcaggagtgacgggagggtcatctactgcgtgaacatcatttactggtatatccgtctcctagacatcttcggcgtgaacaagtatttgggcccgtatgtaatgatgattggaaaaatgatgatagacatgatgtactttgtcatcattatgctggtggttctgatgagctttggggtcgccaggcaagccatcctttttcccaatgaggagccatcatggaaactggccaagaacatcttctacatgccctattggatgatttatggggaagtgtttgcggaccagatagaccctccctgtggacagaatgagacccgagaggatggtaaaataatccagctgcctccctgcaagacaggagcttggatcgtgccggccatcatggcctgctacctcttagtggcaaacatcttgctggtcaacctcctcattgctgtctttaacaatacattttttgaagtaaaatcgatatccaaccaagtctggaagtttcagaggtatcagctcatcatgactttccatgaaaggccagttctgcccccaccactgatcatcttcagccacatgaccatgatattccagcacctgtgctgccgatggaggaaacacgagagcgacccggatgaaagggactacggcctgaaactcttcataaccgatgatgagctcaagaaagtacatgactttgaagagcaatgcatagaagaatacttcagagaaaaggatgatcggttcaactcatctaatgatgagaggatacgggtgacttcagaaagggtggagaacatgtctatgcggctggaggaagtcaacgagagagagcactccatgaaggcttcactccagaccgtggacatccggctggcgcagctggaagaccttatcgggcgcatggccacggccctggagcgcctgacaggtctggagcgggccgagtccaacaaaatccgctcgaggacctcgtcagactgcacggacgccgcctacattgtccgtcagagcagcttcaacagccaggaagggaacaccttcaagctccaagagagtatagaccctgcagagcatcctctttattcagtataagccggcagcaagcagttctacctaacgtcccacatccttctcatgccaacacttctgtaattgatcattataaagaaaaaacaaggtaacagtcatagttcacctgtctcttatctattcacttctggtgccacaactgtttatccttttttgaagaaaataagggaacagaaatgcctttttgtattgcaatcgaaatgaaagaagagttgatgttaaaaaaacaaaagtcaagtgatttattatatacagtgggcgttcaagtctagtcgagcaagctcaggagaatgtaattaaataattttatattttttaatttattttgtatctcacctgtcatggatgaattcattcactgaatatgtaatattgaacttaaaaaaaaaaaaaaaaaaacagtggacagaactagcctgaaattgccatgtgggatgttctgttctcaccgttcatgtcgtgtgttgtgctgctgtgtgaccgtcatcatttgcatggctccaccacgtcctcctgaacacctccaagacgtaactgccaatttttcacaccactcatcacatgaccattttgtatatgaatatatggttatatgtggatattttcatacctagagttttgccatctaatctgagctcagcataaatttaattggagtttttcaagggctggtatcttttctatggaaatgttccaaagtactttttaaggaagtttcaaaactataaataaccttagatttgactgggagtttggtatcaacccaaagccatcagttgcaagcataccatgaatatttttcttatagacagagctataaaaaaagatacagtagaccaaaatagaaagcaaataaaccatataaagagttctatagtatatgccacttatacacatgtatatgcatttatgcagagacacatatttatatataaaataaatggacataaagagcttt

SEQ ID NO: 6128 - protein, 1325 aa, Homo sapiens
MPEPWGTVYFLGIAQVFSFLFSWWNLEGVMNQADAPRPLNWTIRKLCHAAFLPSVRLLKAQKSWIERAFYKRECVHIIPSTKDPHRCCCGRLIGQHVGLTPSISVLQNEKNESRLSRNDIQSEKWSISKHTQLSPTDAFGTIEFQGGGHSNKAMYVRVSFDTKPDLLLHLMTKEWQLELPKLLISVHGGLQNFELQPKLKQVFGKGLIKAAMTTGAWIFTGGVNTGVIRHVGDALKDHASKSRGKICTIGIAPWGIVENQEDLIGRDVVRPYQTMSNPMSKLTVLNSMHSHFILADNGTTGKYGAEVKLRRQLEKHISLQKINTRIGQGVPVVALIVEGGPNVISIVLEYLRDTPPVPVVVCDGSGRASDILAFGHKYSEEGGLINESLRDQLLVTIQKTFTYTRTQAQHLFIILMECMKKKELITVFRMGSEGHQDIDLAILTALLKGANASAPDQLSLALAWNRVDIARSQIFIYGQQWPVGSLEQAMLDALVLDRVDFVKLLIENGVSMHRFLTISRLEELYNTRHGPSNTLYHLVRDVKKGNLPPDYRISLIDIGLVIEYLMGGAYRCNYTRKRFRTLYHNLFGPKRPKALKLLGMEDDIPLRRGRKTTKKREEEVDIDLDDPEINHFPFPFHELMVWAVLMKRQKMALFFWQHGEEAMAKALVACKLCKAMAHEASENDMVDDISQELNHNSRDFGQLAVELLDQSYKQDEQLAMKLLTYELKNWSNATCLQLAVAAKHRDFIAHTCSQMLLTDMWMGRLRMRKNSGLKVILGILLPPSILSLEFKNKDDMPYMSQAQEIHLQEKEAEEPEKPTKEKEEEDMELTAMLGRNNGESSRKKDEEEVQSKHRLIPLGRKIYEFYNAPIVKFWFYTLAYIGYLMLFNYIVLVKMERWPSTQEWIVISYIFTLGIEKMREILMSEPGKLLQKVKVWLQEYWNVTDLIAILLFSVGMILRLQDQPFRSDGRVIYCVNIIYWYIRLLDIFGVNKYLGPYVMMIGKMMIDMMYFVIIMLVVLMSFGVARQAILFPNEEPSWKLAKNIFYMPYWMIYGEVFADQIDPPCGQNETREDGKIIQLPPCKTGAWIVPAIMACYLLVANILLVNLLIAVFNNTFFEVKSISNQVWKFQRYQLIMTFHERPVLPPPLIIFSHMTMIFQHLCCRWRKHESDPDERDYGLKLFITDDELKKVHDFEEQCIEEYFREKDDRFNSSNDERIRVTSERVENMSMRLEEVNEREHSMKASLQTVDIRLAQLEDLIGRMATALERLTGLERAESNKIRSRTSSDCTDAAYIVRQSSFNSQEGNTFKLQESIDPAEHPLYSV

SEQ ID NO: 6129 - DNA, 6847 bp, Homo sapiens
tccgaccacaggctgttttgtgcaggctgtccctcttcttcaaaatcgtgcatcccctccccgaagcagcaggcagtgtgcctccattcagccacatttggtatgcatgagcacggctgcagagagaggggaggtggctgttttaagaaggttcaggggctcaggcaaggctacttgactagtcttccaagttccaggaagcctctgccctaatggaatttgcaggtgtggagatgaccatgggatgccagagccgtgggggaccgtttattttctaggcattgctcaggttttcagtttcttgttttcctggtggaatttggaaggggtcatgaatcaggctgatgctcctcgacccctaaactggaccatccggaagctgtgccacgcagcctttcttccatctgtcagacttctgaaggctcagaaatcctggatagaaagagcattttataaaagagaatgtgtccacatcatacccagcaccaaagacccccataggtgttgctgtgggcgtctgataggccagcatgttggcctcacccccagtatctccgtgcttcagaatgagaaaaatgaaagtcgcctctcccgaaatgacatccagtctgaaaagtggtccatcagcaaacacactcaactcagccctacggatgcttttgggaccattgagttccaaggaggtggccattccaacaaagccatgtatgtgcgagtatcttttgatacaaaacctgatctcctcttacacctgatgaccaaggaatggcagttggagcttcccaagcttctcatctctgtccatgggggcctgcagaactttgaactccagccaaaactcaagcaagtctttgggaaagggctcatcaaagcagcaatgacaactggagcgtggatattcactggaggggttaacacaggtgttattcgtcatgttggcgatgccttgaaggatcatgcctctaagtctcgaggaaagatatgcaccataggtattgccccctggggaattgtggaaaaccaggaggacctcattggaagagatgttgtccggccataccagaccatgtccaatcccatgagcaagctcactgttctcaacagcatgcattcccacttcattctggctgacaacgggaccactggaaaatatggagcagaggtgaaacttcgaagacaactggaaaagcatatttcactccagaagataaacacaagaatcggtcaaggtgttcctgtggtggcactcatagtggaaggaggacccaatgtgatctcgattgttttggagtaccttcgagacacccctcccgtgccagtggttgtctgtgatgggagtggacgggcatcggacatcctggcctttgggcataaatactcagaagaaggcggactgataaatgaatctttgagggaccagctgttggtgactatacagaagactttcacatacactcgaacccaagctcagcatctgttcatcatcctcatggagtgcatgaagaagaaggaattgattacggtatttcggatgggatcagaaggacaccaggacattgatttggctatcctgacagctttactcaaaggagccaatgcctcggccccagaccaactgagcttagctttagcctggaacagagtcgacatcgctcgcagccagatctttatttacgggcaacagtggccggtgggatctctggagcaagccatgttggatgccttagttctggacagagtggattttgtgaaattactcatagagaatggagtaagcatgcaccgttttctcaccatctccagactagaggaattgtacaatacgagacatgggccctcaaatacattgtaccacttggtcagggatgtcaaaaaggggaacctgcccccagactacagaatcagcctgattgacatcggcctggtgatcgagtacctgatgggcggggcttatcgctgcaactacacgcgcaagcgcttccggaccctctaccacaacctcttcggccccaagaggcccaaagccttgaaactgctgggaatggaggatgatattcccttgaggcgaggaagaaagacaaccaagaaacgtgaagaagaggtggacattgacttggatgatcctgagatcaaccacttccccttccctttccatgagctcatggtgtgggctgttctcatgaagcggcagaagatggccctgttcttctggcagcacggtgaggaggccatggccaaggccctggtggcctgcaagctctgcaaagccatggctcatgaggcctctgagaacgacatggttgacgacatttcccaggagctgaatcacaattccagagactttggccagctggctgtggagctcctggaccagtcctacaagcaggacgaacagctggccatgaaactgctgacgtatgagctgaagaactggagcaacgccacgtgcctgcagcttgccgtggctgccaaacaccgcgacttcatcgcgcacacgtgcagccagatgctgctcaccgacatgtggatgggccggctccgcatgcgcaagaactcaggcctcaaggtaattctgggaattctacttcctccttcaattctcagcttggagttcaagaacaaagacgacatgccctatatgtctcaggcccaggaaatccacctccaagagaaggaggcagaagaaccagagaagcccacaaaggaaaaagaggaagaggacatggagctcacagcaatgttgggacgaaacaacggggagtcctccaggaagaaggatgaagaggaagttcagagcaagcaccggttaatccccctcggcagaaaaatctatgaattctacaatgcacccatcgtgaagttctggttctacacactggcgtatatcggatacctgatgctcttcaactatatcgtgttagtgaagatggaacgctggccgtccacccaggaatggatcgtaatctcctatattttcaccctgggaatagaaaagatgagagagattctgatgtcagagccagggaagttgctacagaaagtgaaggtatggctgcaggagtactggaatgtcacggacctcatcgccatccttctgttttctgtcggaatgatccttcgtctccaagaccagcccttcaggagtgacgggagggtcatctactgcgtgaacatcatttactggtatatccgtctcctagacatcttcggcgtgaacaagtatttgggcccgtatgtaatgatgattggaaaaatgatgatagacatgatgtactttgtcatcattatgctggtggttctgatgagctttggggtcgccaggcaagccatcctttttcccaatgaggagccatcatggaaactggccaagaacatcttctacatgccctattggatgatttatggggaagtgtttgcggaccagatagaccctccctgtggacagaatgagacccgagaggatggtaaaataatccagctgcctccctgcaagacaggagcttggatcgtgccggccatcatggcctgctacctcttagtggcaaacatcttgctggtcaacctcctcattgctgtctttaacaatacattttttgaagtaaaatcgatatccaaccaagtctggaagtttcagaggtatcagctcatcatgactttccatgaaaggccagttctgcccccaccactgatcatcttcagccacatgaccatgatattccagcacctgtgctgccgatggaggaaacacgagagcgacccggatgaaagggactacggcctgaaactcttcataaccgatgatgagctcaagaaagtacatgactttgaagagcaatgcatagaagaatacttcagagaaaaggatgatcggttcaactcatctaatgatgagaggatacgggtgacttcagaaagggtggagaacatgtctatgcggctggaggaagtcaacgagagagagcactccatgaaggcttcactccagaccgtggacatccggctggcgcagctggaagaccttatcgggcgcatggccacggccctggagcgcctgacaggtctggagcgggccgagtccaacaaaatccgctcgaggacctcgtcagactgcacggacgccgcctacattgtccgtcagagcagcttcaacagccaggaagggaacaccttcaagctccaagagagtatagaccctgcaggtgaggagaccatgtccccaacttctccaaccttaatgccccgtatgcgaagccattctttctattcggtcaatatgaaagacaaaggtggtatagaaaagttggaaagtatttttaaagaaaggtccctgagcctacaccgggctactagttcccactctgtagcaaaagaacccaaagctcctgcagcccctgccaacaccttggccattgttcctgattccagaagaccatcatcgtgtatagacatctatgtctctgctatggatgagctccactgtgatatagaccctctggacaattccgtgaacatccttgggctgggcgagccaagcttttcaactccagtaccttccacagccccttcaagtagtgcctatgcaacacttgcacccacagacagacctccaagccggagcattgattttgaggacatcacctccatggacactagatctttttcttcagactacacccacctcccagaatgccaaaacccctgggactcagagcctccgatgtaccacaccattgagcgttccaaaagtagccgctacctagccaccacaccctttcttctagaagaggctcccattgtgaaatctcatagctttatgttttccccctcaaggagctattatgccaactttggggtgcctgtaaaaacagcagaatacacaagtattacagactgtattgacacaaggtgtgtcaatgcccctcaagcaattgcggacagagctgccttccctggaggtcttggagacaaagtggaggacttaacttgctgccatccagagcgagaagcagaactgagtcaccccagctctgacagtgaggagaatgaggccaaaggccgcagagccaccattgcaatatcctcccaggagggtgataactcagagagaaccctgtccaacaacatcactgttcccaagatagagcgcgccaacagctactcggcagaggagccaagtgcgccatatgcacacaccaggaagagcttctccatcagtgacaaactcgacaggcagcggaacacagcaagcctgcgaaatcccttccagagaagcaagtcctccaagccggagggccgaggggacagcctgtccatgaggagactgtccagaacatcggctttccaaagctttgaaagcaagcacaactaaaccttcttaatatccgccacagaaggctcaagaatccagccctaaaattctctccaactccagtttttcccctttccttgaatcatacctgctttattcttagctgagcaaaacaagcaatgctttgggaggtgttaactcaaaggtgacttctgggccacagatcaagaaagcatttgatctgacccagtgccagacacaggggatttaaggcatgttcacacttgctgggcagggagggggaagagagggagaaggaagggttagagatgaatgtgtatccgcagtcacagcagaaagccatgagagcaggggaaacaaggggcttcgagcacgctccatgccaggaggcatctgttgatttctgaccattatcaagagttgtaggatgcagggctaaattgcaaaataaaataaaatagccagcgtacacaatgagatattctaaacttccattctgttttcttttcacattggctccatcactggtgactgatgaagagcatcctctttattcagtataagccggcagcaagcagttctacctaacgtcccacatccttctcatgccaacacttctgtaattgatcattataaagaaaaaacaaggtaacagtcatagttcacctgtctcttatctattcacttctggtgccacaactgtttatccttttttgaagaaaataagggaacagaaatgcctttttgtattgcaatcgaaatgaaagaagagttgatgttaaaaaaacaaaagtcaagtgatttattatatacagtgggcgttcaagtctagtcgagcaagctcaggagaatgtaattaaataattttatattttttaatttattttgtatctcacctgtcatggatgaattcattcactgaatatgtaatattgaacttaaaaaaaaaaaaaaaaaaacagtggacagaactagcctgaaattgccatgtgggatgttctgttctcaccgttcatgtcgtgtgttgtgctgctgtgtgaccgtcatcatttgcatggctccaccacgtcctcctgaacacctccaagacgtaactgccaatttttcacaccactcatcacatgaccattttgtatatgaatatatggttatatgtggatattttcatacctagagttttgccatctaatctgagctcagcataaatttaattggagtttttcaagggctggtatcttttctatggaaatgttccaaagtactttttaaggaagtttcaaaactataaataaccttagatttgactgggagtttggtatcaacccaaagccatcagttgcaagcataccatgaatatttttcttatagacagagctataaaaaaagatacagtagaccaaaatagaaagcaaataaaccatataaagagttctatagtatatgccacttatacacatgtatatgcatttatgcagagacacatatttatatataaaataaatggacataaagagcttt

SEQ ID NO: 6130 - protein, 1707 aa, Homo sapiens; identical to SEQ ID NO: 823

SEQ ID NO: 6131 - DNA, 6109 bp, Homo sapiens
tccgaccacaggctgttttgtgcaggctgtccctcttcttcaaaatcgtgcatcccctccccgaagcagcaggcagtgtgcctccattcagccacatttggtatgcatgagcacggctgcagagagaggggaggtggctgttttaagaaggttcaggggctcaggcaaggctacttgactagtcttccaagttccaggaagcctctgccctaatggaatttgcaggtgtggagatgaccatgggatgccagagccgtgggggaccgtttattttctaggcattgctcaggttttcagtttcttgttttcctggtggaatttggaaggggtcatgaatcaggctgatgctcctcgacccctaaactggaccatccggaagctgtgccacgcagcctttcttccatctgtcagacttctgaaggctcagaaatcctggatagaaagagcattttataaaagagaatgtgtccacatcatacccagcaccaaagacccccataggtgttgctgtgggcgtctgataggccagcatgttggcctcacccccagtatctccgtgcttcagaatgagaaaaatgaaagtcgcctctcccgaaatgacatccagtctgaaaagtggtccatcagcaaacacactcaactcagccctacggatgcttttgggaccattgagttccaaggaggtggccattccaacaaagccatgtatgtgcgagtatcttttgatacaaaacctgatctcctcttacacctgatgaccaaggaatggcagttggagcttcccaagcttctcatctctgtccatgggggcctgcagaactttgaactccagccaaaactcaagcaagtctttgggaaagggctcatcaaagcagcaatgacaactggagcgtggatattcactggaggggttaacacaggtgttattcgtcatgttggcgatgccttgaaggatcatgcctctaagtctcgaggaaagatatgcaccataggtattgccccctggggaattgtggaaaaccaggaggacctcattggaagagatgttgtccggccataccagaccatgtccaatcccatgagcaagctcactgttctcaacagcatgcattcccacttcattctggctgacaacgggaccactggaaaatatggagcagaggtgaaacttcgaagacaactggaaaagcatatttcactccagaagataaacacaagaatcggtcaaggtgttcctgtggtggcactcatagtggaaggaggacccaatgtgatctcgattgttttggagtaccttcgagacacccctcccgtgccagtggttgtctgtgatgggagtggacgggcatcggacatcctggcctttgggcataaatactcagaagaaggcggactgataaatgaatctttgagggaccagctgttggtgactatacagaagactttcacatacactcgaacccaagctcagcatctgttcatcatcctcatggagtgcatgaagaagaaggaattgattacggtatttcggatgggatcagaaggacaccaggacattgatttggctatcctgacagctttactcaaaggagccaatgcctcggccccagaccaactgagcttagctttagcctggaacagagtcgacatcgctcgcagccagatctttatttacgggcaacagtggccggtgggatctctggagcaagccatgttggatgccttagttctggacagagtggattttgtgaaattactcatagagaatggagtaagcatgcaccgttttctcaccatctccagactagaggaattgtacaatacgagacatgggccctcaaatacattgtaccacttggtcagggatgtcaaaaaggggaacctgcccccagactacagaatcagcctgattgacatcggcctggtgatcgagtacctgatgggcggggcttatcgctgcaactacacgcgcaagcgcttccggaccctctaccacaacctcttcggccccaagaggcccaaagccttgaaactgctgggaatggaggatgatattcccttgaggcgaggaagaaagacaaccaagaaacgtgaagaagaggtggacattgacttggatgatcctgagatcaaccacttccccttccctttccatgagctcatggtgtgggctgttctcatgaagcggcagaagatggccctgttcttctggcagcacggtgaggaggccatggccaaggccctggtggcctgcaagctctgcaaagccatggctcatgaggcctctgagaacgacatggttgacgacatttcccaggagctgaatcacaattccagagactttggccagctggctgtggagctcctggaccagtcctacaagcaggacgaacagctggccatgaaactgctgacgtatgagctgaagaactggagcaacgccacgtgcctgcagcttgccgtggctgccaaacaccgcgacttcatcgcgcacacgtgcagccagatgctgctcaccgacatgtggatgggccggctccgcatgcgcaagaactcaggcctcaaggtaattctgggaattctacttcctccttcaattctcagcttggagttcaagaacaaagacgacatgccctatatgtctcaggcccaggaaatccacctccaagagaaggaggcagaagaaccagagaagcccacaaaggaaaaagaggaagaggacatggagctcacagcaatgttgggacgaaacaacggggagtcctccaggaagaaggatgaagaggaagttcagagcaagcaccggttaatccccctcggcagaaaaatctatgaattctacaatgcacccatcgtgaagttctggttctacacactggcgtatatcggatacctgatgctcttcaactatatcgtgttagtgaagatggaacgctggccgtccacccaggaatggatcgtaatctcctatattttcaccctgggaatagaaaagatgagagagattctgatgtcagagccagggaagttgctacagaaagtgaaggtatggctgcaggagtactggaatgtcacggacctcatcgccatccttctgttttctgtcggaatgatccttcgtctccaagaccagcccttcaggagtgacgggagggtcatctactgcgtgaacatcatttactggtatatccgtctcctagacatcttcggcgtgaacaagtatttgggcccgtatgtaatgatgattggaaaaatgatgatagacatgatgtactttgtcatcattatgctggtggttctgatgagctttggggtcgccaggcaagccatcctttttcccaatgaggagccatcatggaaactggccaagaacatcttctacatgccctattggatgatttatggggaagtgtttgcggaccagatagaccctccctgtggacagaatgagacccgagaggatggtaaaataatccagctgcctccctgcaagacaggagcttggatcgtgccggccatcatggcctgctacctcttagtggcaaacatcttgctggtcaacctcctcattgctgtctttaacaatacattttttgaagtaaaatcgatatccaaccaagtctggaagtttcagaggtatcagctcatcatgactttccatgaaaggccagttctgcccccaccactgatcatcttcagccacatgaccatgatattccagcacctgtgctgccgatggaggaaacacgagagcgacccggatgaaagggactacggcctgaaactcttcataaccgatgatgagctcaagaaagtacatgactttgaagagcaatgcatagaagaatacttcagagaaaaggatgatcggttcaactcatctaatgatgagaggatacgggtgacttcagaaagggtggagaacatgtctatgcggctggaggaagtcaacgagagagagcactccatgaaggcttcactccagaccgtggacatccggctggcgcagctggaagaccttatcgggcgcatggccacggccctggagcgcctgacaggtctggagcgggccgagtccaacaaaatccgctcgaggacctcgtcagactgcacggacgccgcctacattgtccgtcagagcagcttcaacagccaggaagggaacaccttcaagctccaagagagtatagaccctgcaggtgaggagaccatgtccccaacttctccaaccttaatgccccgtatgcgaagccattctttctattcggtcaatatgaaagacaaaggtggtatagaaaagttggaaagtatttttaaagaaaggtccctgagcctacaccgggctactagttcccactctgtagcaaaagaacccaaagctcctgcagcccctgccaacaccttggccattgttcctgattccagaagaccatcatcgtgtatagacatctatgtctctgctatggatgagctccactgtgatatagaccctctggacaattccgtgaacatccttgggctgggcgagccaagcttttcaactccagtaccttccacagccccttcaagtagtgcctatgcaacacttgcacccacagacagacctccaagccggagcattgattttgaggacatcacctccatggacactagatctttttcttcagactacacccacctcccagaatgccaaaacccctgggactcagagcctccgatgtaccacaccattgagcgttccaaaagtagccgctacctagccaccacaccctttcttctagaagaggctcccattgtgaaatctcatagctttatgttttccccctcaaggagctattatgccaactttggggtgcctgtaaaaacagcagaatacacaagtattacagactgtattgacacaaggtgtgtcaatgcccctcaagcaattgcggacagagctgccttccctggaggtcttggagacaaagtggaggacttaacttgctgccatccagagcgagaagcagaactgagtcaccccagctctgacagtgaggagaatgaggccaaaggccgcagagccaccattgcaatatcctcccaggagggtgataactcagagagaaccctgtccaacaacatcactgttcccaagatagagcgcgccaacagctactcggcagaggagccaagtgcgccatatgcacacaccaggaagagcttctccatcagtgacaaactcgacaggcagcggaacacagcaagcctgcgaaatcccttccagagaagcaagtcctccaagccggagggccgaggggacagcctgtccatgaggagactgtccagaacatcggctttccaaagctttgaaagcaagcacaactaaaccttcttaatatccgccacagaaggctcaagaatccagccctaaaattctctccaactccagtttttcccctttccttgaatcatacctgctttattcttagctgagcaaaacaagcaatgctttgggaggtgttaactcaaaggtgacttctgggccacagatcaagaaagcatttgatctgacccagtgccagacacaggggatttaaggcatgttcacacttgctgggcagggagggggaagagagggagaaggaagggttagagatgaatgtgtatccgcagtcacagcagaaagccatgagagcaggggaaacaaggggcttcgagcacgctccatgccaggaggcatctgttgatttctgaccattatcaagagttgtaggatgcagggctaaattgcaaaataaaataaaatagccagcgtacacaatgagatattctaaacttccattctgttttcttttcacattggctccatcactggtgactgatgaagagcatcctctttattcagtataagccggcagcaagcagttctacctaacgtcccacatccttctcatgccaacacttctgtaattgatcattataaagaaaaaacaaggtaacagtcatagttcacctgtctcttatctattcacttctggtgccacaactgtttatccttttttgaagaaaataagggaacagaaatgcctttttgtattgcaatcgaaatgaaagaagagttgatgtt

SEQ ID NO: 6132 - protein, 1707 aa, Homo sapiens; identical to SEQ ID NO: 823

SEQ ID NO: 6133 - DNA, 2231 bp, Homo sapiens
tagtgaggctaatcccgaagcagcacattccaaggggctaatctgcccaagttcattgcttacttgaaacgtctcttgggggaagagccgaacaagtgactttttttttccagtgggcggtcataagagcattattaacggaatgaccagccctagctgcagcaaaatgaaagcaacaggagctgctccggggactgcttttgccagtacccagaatcagtgctcaggctcagaaatcctggatagaaagagcattttataaaagagaatgtgtccacatcatacccagcaccaaagacccccataggtgttgctgtgggcgtctgataggccagcatgttggcctcacccccagtatctccgtgcttcagaatgagaaaaatgaaagtcgcctctcccgaaatgacatccagtctgaaaagtggtccatcagcaaacacactcaactcagccctacggatgcttttgggaccattgagttccaaggaggtggccattccaacaaagccatgtatgtgcgagtatcttttgatacaaaacctgatctcctcttacacctgatgaccaaggaatggcagttggagcttcccaagcttctcatctctgtccatgggggcctgcagaactttgaactccagccaaaactcaagcaagtctttgggaaagggctcatcaaagcagcaatgacaactggagcgtggatattcactggaggggttaacacaggtgttattcgtcatgttggcgatgccttgaaggatcatgcctctaagtctcgaggaaagatatgcaccataggtattgccccctggggaattgtggaaaaccaggaggacctcattggaagagatgttgtccggccataccagaccatgtccaatcccatgagcaagctcactgttctcaacagcatgcattcccacttcattctggctgacaacgggaccactggaaaatatggagcagaggtgaaacttcgaagacaactggaaaagcatatttcactccagaagataaacacaagaatcggtcaaggtgttcctgtggtggcactcatagtggaaggaggacccaatgtgatctcgattgttttggagtaccttcgagacacccctcccgtgccagtggttgtctgtgatgggagtggacgggcatcggacatcctggcctttgggcataaatactcagaagaaggcggactgataaatgaatctttgagggaccagctgttggtgactatacagaagactttcacatacactcgaacccaagctcagcatctgttcatcatcctcatggagtgcatgaagaagaaggaattggtaggtaattccgcatgggtggccagctgtctccacattttcagtcattttcttgaatcacacaacattttctcaaatcatgcaacattctctctttctggccgagcttacagctctcctcaggctccattggctccagtagcttcctctcctaagtaactaagacactgcttttactgccttcgagttaataaggtgtgtgcagcagagttttagcatcatttccttttggagctcatccaaacgctctgactgcctcaacaaaatgagttgaagtgataaaattggtcccctcctggagaacgcttcagcttgatcttcttaggtttcggatttcattttgcttggaagtcatgaaccactgaggtgctttctgtcaaatagctttaatgacaaagggtccaggctgttacactaatctgtacaggtagaaaacggagaaacataagaaatcctggaggaatctaaaatcagagcaaaatgtgtttctaaaatcagagcaaaatgtcttacaaatgtggtatgatcagagaccctgctagggtgaacaaaatcatgtgattttgttctctgcttactcaaacatttaacaagaacttgctatctgccaagcagggagcaagatctttatgcatataaactcatatgacctttgcaactgtcctgatgagagaggtacaattattaccctcatcttacagatgaggaaacccggctcatttgattagtaaatgaggagctaagactcaaaaccagtgatgtttaacctctgtatggagtatttttattcagaaagtgtctcactgaagccaatgcagtggatcacccactctgggtagatgcccccaggcctcagccagagagactattctcaaaggtcagttaaacccaactgctgagagagatagc

SEQ ID NO: 6134 - protein, 323 aa, Homo sapiens
MYVRVSFDTKPDLLLHLMTKEWQLELPKLLISVHGGLQNFELQPKLKQVFGKGLIKAAMTTGAWIFTGGVNTGVIRHVGDALKDHASKSRGKICTIGIAPWGIVENQEDLIGRDVVRPYQTMSNPMSKLTVLNSMHSHFILADNGTTGKYGAEVKLRRQLEKHISLQKINTRIGQGVPVVALIVEGGPNVISIVLEYLRDTPPVPVVVCDGSGRASDILAFGHKYSEEGGLINESLRDQLLVTIQKTFTYTRTQAQHLFIILMECMKKKELVGNSAWVASCLHIFSHFLESHNIFSNHATFSLSGRAYSSPQAPLAPVASSPK

SEQ ID NO: 6135 - DNA, 1442 bp, Homo sapiens
tagtgaggctaatcccgaagcagcacattccaaggggctaatctgcccaagttcattgcttacttgaaacgtctcttgggggaagagccgaacaagtgactttttttttccagtgggcggtcataagagcattattaacggaatgaccagccctagctgcagcaaaatgaaagcaacaggagctgctccggggactgcttttgccagtacccagaatcagtgctcaggctcagaaatcctggatagaaagagcattttataaaagagaatgtgtccacatcatacccagcaccaaagacccccataggtgttgctgtgggcgtctgataggccagcatgttggcctcacccccagtatctccgtgcttcagaatgagaaaaatgaaagtcgcctctcccgaaatgacatccagtctgaaaagtggtccatcagcaaacacactcaactcagccctacggatgcttttgggaccattgagttccaaggaggtggccattccaacaaagccatgtatgtgcgagtatcttttgatacaaaacctgatctcctcttacacctgatgaccaaggaatggcagttggagcttcccaagcttctcatctctgtccatgggggcctgcagaactttgaactccagccaaaactcaagcaagtctttgggaaagggctcatcaaagcagcaatgacaactggagcgtggatattcactggaggggttaacacaggtgttattcgtcatgttggcgatgccttgaaggatcatgcctctaagtctcgaggaaagatatgcaccataggtattgccccctggggaattgtggaaaaccaggaggacctcattggaagagatgttgtccggccataccagaccatgtccaatcccatgagcaagctcactgttctcaacagcatgcattcccacttcattctggctgacaacgggaccactggaaaatatggagcagaggtgaaacttcgaagacaactggaaaagcatatttcactccagaagataaacacaagaatcggtcaaggtgttcctgtggtggcactcatagtggaaggaggacccaatgtgatctcgattgttttggagtaccttcgagacacccctcccgtgccagtggttgtctgtgatgggagtggacgggcatcggacatcctggcctttgggcataaatactcagaagaaggcgggtaggtaactttccaggccccatggaagaaccctaaagcctgtttggaaacgagggtatgagtggattatgttttcagtagctcaaccaagacctcaaatcaaaacaagctatgaacaaattgtctaaaaaatgtctgtcatgggagggctgtggtgaagaacagagaaacatattctaaatgtcctgtgaagtgggaaattctatgaaagctacacggataataaaaagggtgaggaaaagag

SEQ ID NO: 6136 - protein, 230 aa, Homo sapiens; identical to SEQ ID NO: 837

SEQ ID NO: 6137 - DNA, 1510 bp, Homo sapiens
tagtgaggctaatcccgaagcagcacattccaaggggctaatctgcccaagttcattgcttacttgaaacgtctcttgggggaagagccgaacaagtgactttttttttccagtgggcggtcataagagcattattaacggaatgaccagccctagctgcagcaaaatgaaagcaacaggagctgctccggggactgcttttgccagtacccagaatcagtgctcaggctcagaaatcctggatagaaagagcattttataaaagagaatgtgtccacatcatacccagcaccaaagacccccataggtgttgctgtgggcgtctgataggccagcatgttggcctcacccccagtatctccgtgcttcagaatgagaaaaatgaaagtcgcctctcccgaaatgacatccagtctgaaaagtggtccatcagcaaacacactcaactcagccctacggatgcttttgggaccattgagttccaaggaggtggccattccaacaaagccatgtatgtgcgagtatcttttgatacaaaacctgatctcctcttacacctgatgaccaaggaatggcagttggagcttcccaagcttctcatctctgtccatgggggcctgcagaactttgaactccagccaaaactcaagcaagtctttgggaaagggctcatcaaagcagcaatgacaactggagcgtggatattcactggaggggttaacacaggtgttattcgtcatgttggcgatgccttgaaggatcatgcctctaagtctcgaggaaagatatgcaccataggtattgccccctggggaattgtggaaaaccaggaggacctcattggaagagatgttgtccggccataccagaccatgtccaatcccatgagcaagctcactgttctcaacagcatgcattcccacttcattctggctgacaacgggaccactggaaaatatggagcagaggtgaaacttcgaagacaactggaaaagcatatttcactccagaagataaacacaagatgcctgccgtttttctctcttgactcccgcttgttttattcattttggggtagttgccagttagactcagttggaatcggtcaaggtgttcctgtggtggcactcatagtggaaggaggacccaatgtgatctcgattgttttggagtaccttcgagacacccctcccgtgccagtggttgtctgtgatgggagtggacgggcatcggacatcctggcctttgggcataaatactcagaagaaggcgggtaggtaactttccaggccccatggaagaaccctaaagcctgtttggaaacgagggtatgagtggattatgttttcagtagctcaaccaagacctcaaatcaaaacaagctatgaacaaattgtctaaaaaatgtctgtcatgggagggctgtggtgaagaacagagaaacatattctaaatgtcctgtgaagtgggaaattctatgaaagctacacggataataaaaagggtgagg

SEQ ID NO: 6138 - protein, 255 aa, Homo sapiens; identical to SEQ ID NO: 821

SEQ ID NO: 6139 - DNA, 1931 bp, Homo sapiens
tagtgaggctaatcccgaagcagcacattccaaggggctaatctgcccaagttcattgcttacttgaaacgtctcttgggggaagagccgaacaagtgactttttttttccagtgggcggtcataagagcattattaacggaatgaccagccctagctgcagcaaaatgaaagcaacaggagctgctccggggactgcttttgccagtacccagaatcagtgctcaggctcagaaatcctggatagaaagagcattttataaaagagaatgtgtccacatcatacccagcaccaaagacccccataggtgttgctgtgggcgtctgataggccagcatgttggcctcacccccagtatctccgtgcttcagaatgagaaaaatgaaagtcgcctctcccgaaatgacatccagtctgaaaagtggtccatcagcaaacacactcaactcagccctacggatgcttttgggaccattgagttccaaggaggtggccattccaacaaagccatgtatgtgcgagtatcttttgatacaaaacctgatctcctcttacacctgatgaccaaggaatggcagttggagcttcccaagcttctcatctctgtccatgggggcctgcagaactttgaactccagccaaaactcaagcaagtctttgggaaagggctcatcaaagcagcaatgacaactggagcgtggatattcactggaggggttaacacaggtgttattcgtcatgttggcgatgccttgaaggatcatgcctctaagtctcgaggaaagatatgcaccataggtattgccccctggggaattgtggaaaaccaggaggacctcattggaagagatgttgtccggccataccagaccatgtccaatcccatgagcaagctcactgttctcaacagcatgcattcccacttcattctggctgacaacgggaccactggaaaatatggagcagaggtgaaacttcgaagacaactggaaaagcatatttcactccagaagataaacacaagttttcatagttacaaaacagctcatgtggaccttcaggataaaagacaggtgaagactgccttagagcaagcagagtggcagccgggaagaggaatgtttgatcatgataatctcatgcaaagtacataaaggggggggccatgtgatctctcccctccatggtaccctctgctcctttgttttctacctgcatatggcttttttgttcattggcttaccttcctcacatggttggtctggaggaccaccactaacagaggcttcattccccaagtatgcatgccctggaagcccatctcccagttactggccttgggctcaggatctccacttcaatcccaggaaagcaaatctggctcactgcaggtctgacatccatgtaagtccagccagctttgaaaaaagtcaagcagggctgcgccttctatgcagtggatgggtctgttctctgacaggggagaggggatagggcggacaccatgagagttttcagtacacatgccacagtgacctctttggccagcttaaaggatttcccattcaatctactcatccactgcccagcttctgtcctttgtcctccgattactagatagaaaagcaaagcaagaaggcaatgccccaaaagaaggccagtcgatgggcattaatacaggattgctgtgaaaatgcctcgagcactgagaatgcacaaaatagatttgtttagctgtattgaaaacaaacagaaaaaaatacagtttgccatattaatttaatatattctgcattctcagtccctaggaaaagatacactatgcaccatcagttttcaattttttatcactgtgtgagggaggcattctaattaatccaaactctatattttcagtgtcttgacatccccatatctccagccaaatttgc

SEQ ID NO: 6140 - protein, 214 aa, Homo sapiens
MYVRVSFDTKPDLLLHLMTKEWQLELPKLLISVHGGLQNFELQPKLKQVFGKGLIKAAMTTGAWIFTGGVNTGVIRHVGDALKDHASKSRGKICTIGIAPWGIVENQEDLIGRDVVRPYQTMSNPMSKLTVLNSMHSHFILADNGTTGKYGAEVKLRRQLEKHISLQKINTSFHSYKTAHVDLQDKRQVKTALEQAEWQPGRGMFDHDNLMQST

SEQ ID NO: 6141 - DNA, 3858 bp, Homo sapiens
tattgctgctaataataacagacattatgatatgttcattatgtacaattgaaaatgctttagacttattcattagcaagctgtgaaagcggtatgaccgttccattttacagatacagaaatggaaacttagagaaggtgggtgacttggccaagtccccactgctaataagtgacggaattgctgactatatttcaaaggaaagatactttactactgtaaactggatgggcaggcagcgtgagttgccagtggctttatttgcaaagcttctagaatgaacactgctcagctgccgcaaattccacaagtaaagcacagtaacctttgcaacatgcaagcttatggctcagggagcagagataagcaaaatccacagatacgtgccaaatcaccctttgcaaactaatagtttctcttttatcgcaactgaaattcttcctctatttactggcttttggttttcttcctcttgggtggatgcggtaggaagttgtgctgtgttcactaagaagcagaagagagacgtgattcgagtgagttttaggcttactcctcagatacttgggaacccatttgaccttctgaaaaacaagcttttctttagttataaacatccatctcagtaagtattgacttgaagctgaaagaaaagccttagttggccatgctggaagaagaggatgcttttctggttcatggttctgttgaaacatatctacctgaaagagacagggctgatgttacctttttccactttgcactacctggtgccattctaaatttctaaggggaaaaatagaaagtttgtttactcttaagatattttatgaaattgtgtgtactttcctattttgccaattatgtgcctcaaagattttagttgagccttagcaagaaagtaggaccttccatttcaatacttcattaacacggtgtagtgatactttgtcccttagactggtgtttaccagtaagatacctttaatccactgttaagtatgagtggatttgtttccatagattagctggatttccttttggtgattgcattaggtttaaagtacacaggtctcaactctccccaggaaagtttcccctgtttgactccacctttaaaatcctaagcctgactaggacagccacaaaccacacaaggtgtaaaaccatcatcagctaagtgcccgttttgttcttgtttaccagaatctcctttaacttctcaaagggaagccgggctttctaatccacgtcaactttattttagttgtcaaattgggcattatattttatgtaaattggtcttttaacatcattttcctgatgaatgttggtgaccaccacattgtgaaatttaagaatccgtgttgcatgtttggtagctctctgagtttcaggccataaactcagctccagaggttaccttttaagtgccaagaactcaagtgcaaggtggcctactcaaaaatcatttggtagcattcagttattcatgaattcctctctcgcatgcattataaaaagtgatctgctttaaaacaccgtaatctgatcataggcttaaaattaaatatgagtattactttcatgtacaaaatatttcctttatagtcttcatatgccctttaaaatgccaacaagatttcaagtctgtaggcctctagtgaggtggggtggcaaaccacagctaagtctcgctcaccactgcaagctaagaatggtttttacattttgggttggaaaaattttttttgaatatttcatgacacatgaaaattattcaaatgttagtgccgataaataaagtggtactgaaacacagccacacaaacttgtttttgtactgtctacagctactttcacactacagccgcagagctgagcagttcagcagaccgtatgtcccacaatgcctaaaacattgactatgtttacagaaaaagtttgctgacccctgctctagcaaacgcatcctttcctactccaccccaatttgtatttagatagtttctctaacagaacggacaaatgaggctgcaaactaatttatttttgtcaaaaatcaatgttttgacatccacagacagtgaaataaaagaaatggcttgctgaaaaacatgaggagtcctagccacaaaatcactgcttaggttgcaattgccaaaatgaagccttcttagaagcacttctttagtatatacaggtgttggctgaagtccgtgcctcactctgggaaccattcttagtctccagtgtctcctattacaaagaagctggcagaaataaaaatgaaggggtgagagcggttccaccctagtctcatggtggaaaattcattggggagagctgtccaggatatttggagtcctgggtagaaggagcttgtaactactttaaagtcgacatctttgcacaggtgattgagtttctctgacctcattgcttcacctctgtctcctcccgtccttccgcacgtgcccacacacacgcagttcagccctctttcctccataagcctccatcgttttctcttttctcctcttgatcctttcaagcgagtatcttgttgaattgtatgttctgttggatctcctccttcataacatctggcttgttggacagaaaaaccctacagcccaccccctcccacagcccacctccacttttgaaagcccaaattacacctctcccagaacacagtgttgacgtaaatacagttacccaatattcctgtttgttcacctatttgctactttcactcagtagcatcccattttgtaaaatgaattccatggtcaccctgtcacaggaagtaatgaaaaatccagtgttcagtgtagtggtgcaaacctgagggcatagagctgttcatagagggctcttgttatagccaaacagacacagcaacaatctcaccatttatatatatatttttaacttgtccagctcatctatggaaaactactcaggtggtatgctgtttgaagcctcatcttcctacatgaaaattatgggcatttgtcccaatgattttgtttcagctgttctgtaggctgcataaccactctgatatttaggtatctgctattttattatcttaaaagacaaattaatttaattgcatgtgctagggaaaagctaccatgtacattcaccccaagtaaatagaatcctagatgaatcctagaaaaataatccctaagcagataggtagacagaggtaaacattcacatgatttagctctctagctcttgcactctgaacattcttgctttggttctgacttctgggaactgctttgcatttctcctatagatctgtagttaagggaaccaaggggtcattggggcaaaagcattgtttctcaaagctccttgattaagagaaagaacagaaatttgcacagaagatagtgtcaaggagtgagaaagtttgtttgagggcagtagctcagtgtggaagaaaatcctgaagtttctgttgaagccatacaatgttctatggggttactctctaagacattctctgaggtgtgtgaggaagtcactactcctagcctttgttaagatgtaattttaaatattcagttatggtactatgtttgcaactctcgtcttatcacaatgcctcagtagtttgttcccttagaaacatttagatgtgcacaaattaatcttttatatatctaaaggtttttctatcatgcattggattgctcagaataaagtgtctgttagacttcgttttggtaaataaattctccataatgtagattaataatataaaagtctttaatgacacaatatatctatatagcctcactgtataattcagaaataaaaattgattctgcatg

SEQ ID NO: 6142 - protein, 94 aa, Homo sapiens [sequence omitted]

SEQ ID NO: 6143 - DNA, 3557 bp, Homo sapiens
ccagactgacgtggatgttttcagctttattcagccagcatgtttctgatccctttgcaacttatgtctacattttatgaaggaatttgcaaagtaaatgtacataaacactgaatgggaggcaatgacaacatatttaatggaaggagtacgtctcagggctccagaagacagtttcgaaaagcacatatgcaccactttcatttggccctgctttgctgagtgactgtctcatgctgtgcttgcttctcttttgtttcttttccacaccaataatttttgctcctgcagactggatgaagaactgagggaagcatcagaggcagctaatattgacttgaagctgaaagaaaagccttagttggccatgctggaagaagaggatgcttttctggttcatggttctgttgaaacatatctacctgaaagagacagggctgatgttacctttttccactttgcactacctggtgccattctaaatttctaaggggaaaaatagaaagtttgtttactcttaagatattttatgaaattgtgtgtactttcctattttgccaattatgtgcctcaaagattttagttgagccttagcaagaaagtaggaccttccatttcaatacttcattaacacggtgtagtgatactttgtcccttagactggtgtttaccagtaagatacctttaatccactgttaagtatgagtggatttgtttccatagattagctggatttccttttggtgattgcattaggtttaaagtacacaggtctcaactctccccaggaaagtttcccctgtttgactccacctttaaaatcctaagcctgactaggacagccacaaaccacacaaggtgtaaaaccatcatcagctaagtgcccgttttgttcttgtttaccagaatctcctttaacttctcaaagggaagccgggctttctaatccacgtcaactttattttagttgtcaaattgggcattatattttatgtaaattggtcttttaacatcattttcctgatgaatgttggtgaccaccacattgtgaaatttaagaatccgtgttgcatgtttggtagctctctgagtttcaggccataaactcagctccagaggttaccttttaagtgccaagaactcaagtgcaaggtggcctactcaaaaatcatttggtagcattcagttattcatgaattcctctctcgcatgcattataaaaagtgatctgctttaaaacaccgtaatctgatcataggcttaaaattaaatatgagtattactttcatgtacaaaatatttcctttatagtcttcatatgccctttaaaatgccaacaagatttcaagtctgtaggcctctagtgaggtggggtggcaaaccacagctaagtctcgctcaccactgcaagctaagaatggtttttacattttgggttggaaaaattttttttgaatatttcatgacacatgaaaattattcaaatgttagtgccgataaataaagtggtactgaaacacagccacacaaacttgtttttgtactgtctacagctactttcacactacagccgcagagctgagcagttcagcagaccgtatgtcccacaatgcctaaaacattgactatgtttacagaaaaagtttgctgacccctgctctagcaaacgcatcctttcctactccaccccaatttgtatttagatagtttctctaacagaacggacaaatgaggctgcaaactaatttatttttgtcaaaaatcaatgttttgacatccacagacagtgaaataaaagaaatggcttgctgaaaaacatgaggagtcctagccacaaaatcactgcttaggttgcaattgccaaaatgaagccttcttagaagcacttctttagtatatacaggtgttggctgaagtccgtgcctcactctgggaaccattcttagtctccagtgtctcctattacaaagaagctggcagaaataaaaatgaaggggtgagagcggttccaccctagtctcatggtggaaaattcattggggagagctgtccaggatatttggagtcctgggtagaaggagcttgtaactactttaaagtcgacatctttgcacaggtgattgagtttctctgacctcattgcttcacctctgtctcctcccgtccttccgcacgtgcccacacacacgcagttcagccctctttcctccataagcctccatcgttttctcttttctcctcttgatcctttcaagcgagtatcttgttgaattgtatgttctgttggatctcctccttcataacatctggcttgttggacagaaaaaccctacagcccaccccctcccacagcccacctccacttttgaaagcccaaattacacctctcccagaacacagtgttgacgtaaatacagttacccaatattcctgtttgttcacctatttgctactttcactcagtagcatcccattttgtaaaatgaattccatggtcaccctgtcacaggaagtaatgaaaaatccagtgttcagtgtagtggtgcaaacctgagggcatagagctgttcatagagggctcttgttatagccaaacagacacagcaacaatctcaccatttatatatatatttttaacttgtccagctcatctatggaaaactactcaggtggtatgctgtttgaagcctcatcttcctacatgaaaattatgggcatttgtcccaatgattttgtttcagctgttctgtaggctgcataaccactctgatatttaggtatctgctattttattatcttaaaagacaaattaatttaattgcatgtgctagggaaaagctaccatgtacattcaccccaagtaaatagaatcctagatgaatcctagaaaaataatccctaagcagataggtagacagaggtaaacattcacatgatttagctctctagctcttgcactctgaacattcttgctttggttctgacttctgggaactgctttgcatttctcctatagatctgtagttaagggaaccaaggggtcattggggcaaaagcattgtttctcaaagctccttgattaagagaaagaacagaaatttgcacagaagatagtgtcaaggagtgagaaagtttgtttgagggcagtagctcagtgtggaagaaaatcctgaagtttctgttgaagccatacaatgttctatggggttactctctaagacattctctgaggtgtgtgaggaagtcactactcctagcctttgttaagatgtaattttaaatattcagttatggtactatgtttgcaactctcgtcttatcacaatgcctcagtagtttgttcccttagaaacatttagatgtgcacaaattaatcttttatatatctaaaggtttttctatcatgcattggattgctcagaataaagtgtctgttagacttcgttttggtaaataaattctccataatgtagattaataatataaaagtctttaatgacacaatatatctatatagcctcactgtataattcagaaataaaaattgattctgcatg

SEQ ID NO: 6144 - protein, 92 aa, Homo sapiens
MFCWISSFITSGLLDRKTLQPTPSHSPPPLLKAQITPLPEHSVDVNTVTQYSCLFTYLLLSLSSIPFCKMNSMVTLSQEVMKNPVFSVVVQT

SEQ ID NO: 6145 - DNA, 2612 bp, Homo sapiens
gtgccagagatcatgtgaccagaaaatggaggcgaatctgtatttccagttaactgctcagaagagagatgctgaagagctgtagtcgtgcatccttctcaccctccgttagaaagcctcctctcatcctcagaagactactgtcagaggatgtaggaatggacatcccctttgaagagggcgtgctgagtcccagtgctgcagacatgaggcctgaacctcctaattctctggatcttaatgacactcatcctcggagaatcaagctcacagccccaaatatcaatctttctctggaccaaagtgaaggatctattctctctgatgataacttggacagtccagatgaaattgacatcaatgtggatgaacttgatacccccgatgaagcagattcttttgagtacactggccatgaagatcccacagccaacaaagattctggccaagagtcagagtctattccagaatatacggccgaagaggaacgggaggacaaccggctttggaggacagtggtcattggagaacaagagcagcgcattgacatgaaggtcatcgagccctacaggagagtcatttctcacggaggatactatggggacggtctaaatgccatcattgtgtttgccgcctgttttctgccagacagcagtcgggcggattaccactatgtcatggaaaatcttttcctatatgtaataagtactttctctagcaaacgcatcctttcctactccaccccaatttgtatttagatagtttctctaacagaacggacaaatgaggctgcaaactaatttatttttgtcaaaaatcaatgttttgacatccacagacagtgaaataaaagaaatggcttgctgaaaaacatgaggagtcctagccacaaaatcactgcttaggttgcaattgccaaaatgaagccttcttagaagcacttctttagtatatacaggtgttggctgaagtccgtgcctcactctgggaaccattcttagtctccagtgtctcctattacaaagaagctggcagaaataaaaatgaaggggtgagagcggttccaccctagtctcatggtggaaaattcattggggagagctgtccaggatatttggagtcctgggtagaaggagcttgtaactactttaaagtcgacatctttgcacaggtgattgagtttctctgacctcattgcttcacctctgtctcctcccgtccttccgcacgtgcccacacacacgcagttcagccctctttcctccataagcctccatcgttttctcttttctcctcttgatcctttcaagcgagtatcttgttgaattgtatgttctgttggatctcctccttcataacatctggcttgttggacagaaaaaccctacagcccaccccctcccacagcccacctccacttttgaaagcccaaattacacctctcccagaacacagtgttgacgtaaatacagttacccaatattcctgtttgttcacctatttgctactttcactcagtagcatcccattttgtaaaatgaattccatggtcaccctgtcacaggaagtaatgaaaaatccagtgttcagtgtagtggtgcaaacctgagggcatagagctgttcatagagggctcttgttatagccaaacagacacagcaacaatctcaccatttatatatatatttttaacttgtccagctcatctatggaaaactactcaggtggtatgctgtttgaagcctcatcttcctacatgaaaattatgggcatttgtcccaatgattttgtttcagctgttctgtaggctgcataaccactctgatatttaggtatctgctattttattatcttaaaagacaaattaatttaattgcatgtgctagggaaaagctaccatgtacattcaccccaagtaaatagaatcctagatgaatcctagaaaaataatccctaagcagataggtagacagaggtaaacattcacatgatttagctctctagctcttgcactctgaacattcttgctttggttctgacttctgggaactgctttgcatttctcctatagatctgtagttaagggaaccaaggggtcattggggcaaaagcattgtttctcaaagctccttgattaagagaaagaacagaaatttgcacagaagatagtgtcaaggagtgagaaagtttgtttgagggcagtagctcagtgtggaagaaaatcctgaagtttctgttgaagccatacaatgttctatggggttactctctaagacattctctgaggtgtgtgaggaagtcactactcctagcctttgttaagatgtaattttaaatattcagttatggtactatgtttgcaactctcgtcttatcacaatgcctcagtagtttgttcccttagaaacatttagatgtgcacaaattaatcttttatatatctaaaggtttttctatcatgcattggattgctcagaataaagtgtctgttagacttcgttttggtaaataaattctccataatgtagattaataatataaaagtctttaatgacacaatatatctatatagcctcactgtataattcagaaataaaaattgattctgcatg

SEQ ID NO: 6146 - protein, 229 aa, Homo sapiens
MLKSCSRASFSPSVRKPPLILRRLLSEDVGMDIPFEEGVLSPSAADMRPEPPNSLDLNDTHPRRIKLTAPNINLSLDQSEGSILSDDNLDSPDEIDINVDELDTPDEADSFEYTGHEDPTANKDSGQESESIPEYTAEEEREDNRLWRTVVIGEQEQRIDMKVIEPYRRVISHGGYYGDGLNAIIVFAACFLPDSSRADYHYVMENLFLYVISTFSSKRILSYSTPICI

SEQ ID NO: 6147 - DNA, 2084 bp, Homo sapiens
aaggaaatatcagaattggaagaagaaaaaacaattcctaccaaagagcctgagcagataaaatcagaatacaaggaagaaagatgtacagagaagaatgaagatcgtcatgcactacacatggattacatacttgtaaaccgtgaagaaaattcacactcaaagccagagacctgtgaagaaagagaaagcatagctgaattagaattgtatgtaggttccaaagaaacagggctgcagggaactcagttagcaagcttcccagacacatgtcagccagcctccttaaatgaaagaaaaggtctctctgcagagaaaatgtcttctaaaagcgatacgagatcatcttttgaaagccctgcacaagaccagagttggatgttcttgggccatagtgaggttggtgatccatcactggatgccagggactcagggcctgggtggtctggcaagactgtggagccgttctctgaactcggcttgggtgagggtccccagctgcagattctggaagaaatgaagcctctagaatctttggcactagaggaagcctctggtccagtcagccaatcacagaagagtaagagccgaggcagggctggcccggatgcagttacgttgcaggctgtcacccatgacaatgaatgggaaatgctttcaccacagcctgttcagaaaaacatgatcccgtccttccgcacgtgcccacacacacgcagttcagccctctttcctccataagcctccatcgttttctcttttctcctcttgatcctttcaagcgagtatcttgttgaattgtatgttctgttggatctcctccttcataacatctggcttgttggacagaaaaaccctacagcccaccccctcccacagcccacctccacttttgaaagcccaaattacacctctcccagaacacagtgttgacgtaaatacagttacccaatattcctgtttgttcacctatttgctactttcactcagtagcatcccattttgtaaaatgaattccatggtcaccctgtcacaggaagtaatgaaaaatccagtgttcagtgtagtggtgcaaacctgagggcatagagctgttcatagagggctcttgttatagccaaacagacacagcaacaatctcaccatttatatatatatttttaacttgtccagctcatctatggaaaactactcaggtggtatgctgtttgaagcctcatcttcctacatgaaaattatgggcatttgtcccaatgattttgtttcagctgttctgtaggctgcataaccactctgatatttaggtatctgctattttattatcttaaaagacaaattaatttaattgcatgtgctagggaaaagctaccatgtacattcaccccaagtaaatagaatcctagatgaatcctagaaaaataatccctaagcagataggtagacagaggtaaacattcacatgatttagctctctagctcttgcactctgaacattcttgctttggttctgacttctgggaactgctttgcatttctcctatagatctgtagttaagggaaccaaggggtcattggggcaaaagcattgtttctcaaagctccttgattaagagaaagaacagaaatttgcacagaagatagtgtcaaggagtgagaaagtttgtttgagggcagtagctcagtgtggaagaaaatcctgaagtttctgttgaagccatacaatgttctatggggttactctctaagacattctctgaggtgtgtgaggaagtcactactcctagcctttgttaagatgtaattttaaatattcagttatggtactatgtttgcaactctcgtcttatcacaatgcctcagtagtttgttcccttagaaacatttagatgtgcacaaattaatcttttatatatctaaaggtttttctatcatgcattggattgctcagaataaagtgtctgttagacttcgttttggtaaataaattctccataatgtagattaataatataaaagtctttaatgacacaatatatctatatagcctcactgtataattcagaaataaaaattgattctgcatg

SEQ ID NO: 6148 - protein, 206 aa, Homo sapiens
MDYILVNREENSHSKPETCEERESIAELELYVGSKETGLQGTQLASFPDTCQPASLNERKGLSAEKMSSKSDTRSSFESPAQDQSWMFLGHSEVGDPSLDARDSGPGWSGKTVEPFSELGLGEGPQLQILEEMKPLESLALEEASGPVSQSQKSKSRGRAGPDAVTLQAVTHDNEWEMLSPQPVQKNMIPSFRTCPHTRSSALFPP

SEQ ID NO: 6149 - DNA, 5587 bp, Homo sapiens
gctttgtttgatggtgatccacatttatccacagagaatcctgccttggttcctgatgctttgctagcctcagacacttgtctggatataagcgaagctgcctttgaccacagtttcagcgatgcctcaggtctcaacacatccacgggaacaatagatgacatgagtaaactgacattatccgaaggccatccggaaacgccagttgatggggacctagggaagcaagatatctgctcatctgaagcctcgtggggtgattttgaatatgatgtaatgggccagaatatcgatgaagatttactgagagagcctgaacacttcctgtatggtggtgaccctcctttggaggaagattctctgaagcagtcgctggcaccgtacacacctccctttgatttgtcttatctcacagaacctgcccagagtgctgaaacaatagaggaagctgggtctccagaggatgaatctctgggatgcagagcagcagagatagtgctttctgcacttcctgatcgaagaagtgagggaaaccaggctgagaccaaaaacagactgcctggatcccagctggctgtgctgcatattcgtgaagaccctgagtccgtttatttgccggtaggagcaggctccaacattttgtctccatcaaacgttgactgggaagtagaaacagataattctgatttaccagcaggtggagacataggaccaccaaatggtgccagcaaggaaatatcagaattggaagaagaaaaaacaattcctaccaaagagcctgagcagataaaatcagaatacaaggaagaaagatgtacagagaagaatgaagatcgtcatgcactacacatggattacatacttgtaaaccgtgaagaaaattcacactcaaagccagagacctgtgaagaaagagaaagcatagctgaattagaattgtatgtaggttccaaagaaacagggctgcagggaactcagttagcaagcttcccagacacatgtcagccagcctccttaaatgaaagaaaaggtctctctgcagagaaaatgtcttctaaaagcgatacgagatcatcttttgaaagccctgcacaagaccagagttggatgttcttgggccatagtgaggttggtgatccatcactggatgccagggactcagggcctgggtggtctggcaagactgtggagccgttctctgaactcggcttgggtgagggtccccagctgcagattctggaagaaatgaagcctctagaatctttggcactagaggaagcctctggtccagtcagccaatcacagaagagtaagagccgaggcagggctggcccggatgcagttacgttgcaggctgtcacccatgacaatgaatgggaaatgctttcaccacagcctgttcagaaaaacatgatccctgacacggaaatggaggaggagacagagttccttgagctcggaaccaggatatcaagaccaaatggactactgtcagaggatgtaggaatggacatcccctttgaagagggcgtgctgagtcccagtgctgcagacatgaggcctgaacctcctaattctctggatcttaatgacactcatcctcggagaatcaagctcacagccccaaatatcaatctttctctggaccaaagtgaaggatctattctctctgatgataacttggacagtccagatgaaattgacatcaatgtggatgaacttgatacccccgatgaagcagattcttttgagtacactggccatgaagatcccacagccaacaaagattctggccaagagtcagagtctattccagaatatacggccgaagaggaacgggaggacaaccggctttggaggacagtggtcattggagaacaagagcagcgcattgacatgaaggtcatcgagccctacaggagagtcatttctcacggaggatactatggggacggtctaaatgccatcattgtgtttgccgcctgttttctgccagacagcagtcgggcggattaccactatgtcatggaaaatcttttcctatatgtaataagtactttagagttgatggtagctgaagactatatgattgtgtacttgaatggtgcaaccccaagaaggaggatgccagggctaggctggatgaagaaatgctaccagatgattgacagacggttgaggaagaatttgaaatcattcatcattgttcatccatcttggttcatcagaacaatccttgctgtgacacgaccttttataagttcaaaattcagcagtaaaattaaatatgtcaatagcttatcagaactcagtgggctgatcccaatggattgcatccacattccagagagcatcatcaatattgacttgaagctgaaagaaaagccttagttggccatgctggaagaagaggatgcttttctggttcatggttctgttgaaacatatctacctgaaagagacagggctgatgttacctttttccactttgcactacctggtgccattctaaatttctaaggggaaaaatagaaagtttgtttactcttaagatattttatgaaattgtgtgtactttcctattttgccaattatgtgcctcaaagattttagttgagccttagcaagaaagtaggaccttccatttcaatacttcattaacacggtgtagtgatactttgtcccttagactggtgtttaccagtaagatacctttaatccactgttaagtatgagtggatttgtttccatagattagctggatttccttttggtgattgcattaggtttaaagtacacaggtctcaactctccccaggaaagtttcccctgtttgactccacctttaaaatcctaagcctgactaggacagccacaaaccacacaaggtgtaaaaccatcatcagctaagtgcccgttttgttcttgtttaccagaatctcctttaacttctcaaagggaagccgggctttctaatccacgtcaactttattttagttgtcaaattgggcattatattttatgtaaattggtcttttaacatcattttcctgatgaatgttggtgaccaccacattgtgaaatttaagaatccgtgttgcatgtttggtagctctctgagtttcaggccataaactcagctccagaggttaccttttaagtgccaagaactcaagtgcaaggtggcctactcaaaaatcatttggtagcattcagttattcatgaattcctctctcgcatgcattataaaaagtgatctgctttaaaacaccgtaatctgatcataggcttaaaattaaatatgagtattactttcatgtacaaaatatttcctttatagtcttcatatgccctttaaaatgccaacaagatttcaagtctgtaggcctctagtgaggtggggtggcaaaccacagctaagtctcgctcaccactgcaagctaagaatggtttttacattttgggttggaaaaattttttttgaatatttcatgacacatgaaaattattcaaatgttagtgccgataaataaagtggtactgaaacacagccacacaaacttgtttttgtactgtctacagctactttcacactacagccgcagagctgagcagttcagcagaccgtatgtcccacaatgcctaaaacattgactatgtttacagaaaaagtttgctgacccctgctctagcaaacgcatcctttcctactccaccccaatttgtatttagatagtttctctaacagaacggacaaatgaggctgcaaactaatttatttttgtcaaaaatcaatgttttgacatccacagacagtgaaataaaagaaatggcttgctgaaaaacatgaggagtcctagccacaaaatcactgcttaggttgcaattgccaaaatgaagccttcttagaagcacttctttagtatatacaggtgttggctgaagtccgtgcctcactctgggaaccattcttagtctccagtgtctcctattacaaagaagctggcagaaataaaaatgaaggggtgagagcggttccaccctagtctcatggtggaaaattcattggggagagctgtccaggatatttggagtcctgggtagaaggagcttgtaactactttaaagtcgacatctttgcacaggtgattgagtttctctgacctcattgcttcacctctgtctcctcccgtccttccgcacgtgcccacacacacgcagttcagccctctttcctccataagcctccatcgttttctcttttctcctcttgatcctttcaagcgagtatcttgttgaattgtatgttctgttggatctcctccttcataacatctggcttgttggacagaaaaaccctacagcccaccccctcccacagcccacctccacttttgaaagcccaaattacacctctcccagaacacagtgttgacgtaaatacagttacccaatattcctgtttgttcacctatttgctactttcactcagtagcatcccattttgtaaaatgaattccatggtcaccctgtcacaggaagtaatgaaaaatccagtgttcagtgtagtggtgcaaacctgagggcatagagctgttcatagagggctcttgttatagccaaacagacacagcaacaatctcaccatttatatatatatttttaacttgtccagctcatctatggaaaactactcaggtggtatgctgtttgaagcctcatcttcctacatgaaaattatgggcatttgtcccaatgattttgtttcagctgttctgtaggctgcataaccactctgatatttaggtatctgctattttattatcttaaaagacaaattaatttaattgcatgtgctagggaaaagctaccatgtacattcaccccaagtaaatagaatcctagatgaatcctagaaaaataatccctaagcagataggtagacagaggtaaacattcacatgatttagctctctagctcttgcactctgaacattcttgctttggttctgacttctgggaactgctttgcatttctcctatagatctgtagttaagggaaccaaggggtcattggggcaaaagcattgtttctcaaagctccttgattaagagaaagaacagaaatttgcacagaagatagtgtcaaggagtgagaaagtttgtttgagggcagtagctcagtgtggaagaaaatcctgaagtttctgttgaagccatacaatgttctatggggttactctctaagacattctctgaggtgtgtgaggaagtcactactcctagcctttgttaagatgtaattttaaatattcagttatggtactatgtttgcaactctcgtcttatcacaatgcctcagtagtttgttcccttagaaacatttagatgtgcacaaattaatcttttatatatctaaaggtttttctatcatgcattggattgctcagaataaagtgtctgttagacttcgttttggtaaataaattctccataatgtagattaataatataaaagtctttaatgacacaatatatctatatagcctcactgtataattcagaaataaaaattgattctgcatg

SEQ ID NO: 6150 - protein, 742 aa, Homo sapiens
MSKLTLSEGHPETPVDGDLGKQDICSSEASWGDFEYDVMGQNIDEDLLREPEHFLYGGDPPLEEDSLKQSLAPYTPPFDLSYLTEPAQSAETIEEAGSPEDESLGCRAAEIVLSALPDRRSEGNQAETKNRLPGSQLAVLHIREDPESVYLPVGAGSNILSPSNVDWEVETDNSDLPAGGDIGPPNGASKEISELEEEKTIPTKEPEQIKSEYKEERCTEKNEDRHALHMDYILVNREENSHSKPETCEERESIAELELYVGSKETGLQGTQLASFPDTCQPASLNERKGLSAEKMSSKSDTRSSFESPAQDQSWMFLGHSEVGDPSLDARDSGPGWSGKTVEPFSELGLGEGPQLQILEEMKPLESLALEEASGPVSQSQKSKSRGRAGPDAVTLQAVTHDNEWEMLSPQPVQKNMIPDTEMEEETEFLELGTRISRPNGLLSEDVGMDIPFEEGVLSPSAADMRPEPPNSLDLNDTHPRRIKLTAPNINLSLDQSEGSILSDDNLDSPDEIDINVDELDTPDEADSFEYTGHEDPTANKDSGQESESIPEYTAEEEREDNRLWRTVVIGEQEQRIDMKVIEPYRRVISHGGYYGDGLNAIIVFAACFLPDSSRADYHYVMENLFLYVISTLELMVAEDYMIVYLNGATPRRRMPGLGWMKKCYQMIDRRLRKNLKSFIIVHPSWFIRTILAVTRPFISSKFSSKIKYVNSLSELSGLIPMDCIHIPESIINIDLKLKEKP

SEQ ID NO: 6151 - DNA, 11711 bp, Homo sapiens
gaattgtctatttcacagcaatattaccagtgacttgaaagcatttacagacaagtttggttttgatgtcctcatcctgttctccagctatctgtcagaggagcagcagccgagacgacagattgctgtgtactcagaaaacatggagctgtgcagtcagatttgctgtgagctggaagagtgtcagaacccttgcctagaactggagccctttgactgtggctgtgatgagatcctggtgtaccaacaagaggacccttcagtgacttgtgatcaggtggttctcgttgtcaaggaagtcatcaacaggaggtgtccagagatggtctccaatagccggacatcctcaacagaagccgtggcaggcagtgcccccctctcccaggggtcttctgggattatggaattgtatggttctgacatagagccacaacccagctctgtgaatttcatagagaaccctccagatctcaatgattctaaccaggctcaggtggatgccaatgtagaccttgttagcccagacagcggactggctaccattaggagcagccgctcatccaaggagagctctgttttcctcagtgacgacagccccgtgggagaaggtgctgggcctcaccacacccttctcccagggcttgactcctacagccccatccctgaaggggcggtggcggaggaacatgcatggtctggagaacacggtgagcacttcgacctcttcaattttgacccagcacccatggcttctgggcagtcccagcaatcttctcattctgcagactactccccagcagatgacttcttccccaacagtgacctgtcagaaggacagctccccgctgggcctgaaggacttgatggcatgggaaccaacatgtctaattattcatccagttcacttttgtcaggggctggcaaagatagccttgtggaacatgatgaggagtttgtccagagacaagacagtcccagagataactctgaaagaaatttgagcctgacagattttgtgggagatgaatccccttccccagaaaggctaaaaaatactggaaagaggatcccaccaacacccatgaatagtttagtagaaagctcgccatccactgaagaaccagcctcactctatacagaagatatgacccaaaaagcaactgacacaggtcacatggggccacctcagacccatgcacggtgcagcagctggtggggtggtttggaaattgactccaaaaatattgcagatgcgtggagttccagtgaacaggaatctgttttccagagccctgaatcatggaaagagcataagccaagctccattgataggagagcctcagattctgtatttcaaccaaagagcctcgaatttacaaagtcaggtccctgggagtctgaatttggtcagcctgaactgggtagcaatgatattcaagacaaaaatgaggaaagcttgccgttccagaacctgcccatggagaagtcacctttgccaaatacatctccccaaggaacaaaccacctgatagaagactttgcttctttgtggcattctggtcgctctcccacagccatgcccgagccctggggaaatcctacagatgatggtgaaccagcagctgtggcgccattcccagcctggagtgcatttggtaaagaagatcatgatgaagctttaaaaaatacctggaatttgcacccaacaagcagcaagacaccttctgttagggacccgaatgagtgggccatggcaaaaagtgggtttgccttttcttcttcagaactactggacaattcacccagtgagataaacaatgaagcagctccagaaatctggggcaagaaaaacaatgactccagggatcacatctttgcacctggaaatcccagttctgatctggatcacacatggactaattctaagccaccaaaagaagatcagaatggtttagtggatcctaaaactaggggcaaggtatatgaaaaggtagattcctggaacctttttgaggagaatatgaagaaaggagggtcagatgtcctagttccttgggaagattccttcttatcttacaaatgttctgattacagtgcatccaacctaggagaagattcggtgccttcccccttagataccaattattccacctcagactcttacacatcaccaacatttgctggagacgaaaaggaaactgaacacaagccatttgctaaagaggaaggttttgagtcaaaagatggtaactccacggcagaggagactgacattcctcctcagtcactgcaacagtcatctcgaaatcgaatcagttcaggtcctgggaacctagacatgtgggcttcacctcatacagataacagttctgaaataaataccactcacaacctggatgaaaatgaactcaagacagagcacacagatggtaagaatatctccatggaggatgacgtcggggaaagcagccagtccagttacgacgaccccagcatgatgcaactgtacaatgaaacaaaccgacaactcacacttttgcacagcagcaccaactcccggcagacggcccctgacagtctcgacttgtggaacagagtgattttggaggatactcagtccactgcaacgatctcagatatggacaatgatttggactgggatgactgcagtgggggtgcggcaatccccagtgatggtcaaacagaaggatacatggctgaaggttccgagccggaaacccgatttacagtgagacagctggaaccctggggcttggagtatcaggaagcaaatcaggtagattgggagctccctgcctctgatgagcataccaaggacagtgctcccagtgaacatcacacattgaatgagaaaagtgggcagctaattgcaaacagtatttgggattctgtcatgagagataaagacatgtcatcattcatgttaccaggctcctcacatatcacagattcagagcaaagggaattgcctcctgaaatccccagccattcagcaaatgttaaagacactcattccccagatgcgccagcagcctctggaaccagtgaatcagaggcacttatatctcatcttgacaagcaggacacagagagggaaaccctgcaaagtgatgcagcatccttggcgactaggcttgagaatccagggtattttccacacccagatccatggaaaggtcatggcgatggacaaagtgaaagtgagaaggaagcccagggagccactgacagggggcaccttgatgaagaggaggtgatcgcctctggtgtggagaatgcctcagggatttctgaaaaagggcagagtgaccaggaactgtcttctctggttgcatctgaacatcaggaaatctgcattaaatcaggcaaaatcagctctcttgctgtcactttcagtcctcaaaccgaggaaccagaggaagttttagagtatgaggaggggtcttacaatctagactcccgtgatgtgcaaacagggatgtccgcagataacctgcagccaaaagatacccatgaaaaacacctcatgagtcaaagaaattcaggtgaaactactgagacttcagatgggatgaatttcacaaaatatgtatctgtacctgaaaaggatcttgagaaaactgaagaatgtaactttctagagccagagaacgtgggtggagggccacctcacagagttccccgaagtcttgattttggggacgtccctatagacagtgatgtgcatgtcagcagcacatgttctgagataaccaaaaatcttgacgttaaggggtctgaaaatagccttccaggagccggttcgtctggaaattttgacagagatactatttctagtgagtatactcattcaagtgcatcaagtcctgagttaaatgactcttcagttgcactgtcctcctggggccagcaacccagttctgggtatcaagaagaaaaccaaggcaactggagtgaacagaatcaccaagaatctgaactaattaccactgatggccaagtagaaatagttaccaaagtgaaggatttagagaaaaacagaataaatgagtttgaaaagagctttgatcgcaaaactcctacatttttagagatctggaatgactcagttgatggtgattccttttcctctttatccagtcctgaaacaggcaaatattctgaacattcagggacacatcaggaaagcaatctaattgctagctaccaggagaaaaatgaacatgacatttctgcaactgtgcagccagaggatgccagggtcatttcaacaagctcaggttctgatgatgacagtgtcggtggtgaagagtcaatagaggaagagatccaggtggccaactgccacgttgctgaggatgaatccagagcttgggattcattgaatgaatctaataagttcttggtcacagctgatcctaagtctgaaaatatttatgactacctagacagctcagagccagcagagaatgagaataagtcaaacccattctgtgacaatcaacaaagcagccctgatccctggactttctcaccattaacggagactgaaatgcagattacagcagtggagaaggagaagagatcttctccagaaacagggacaacaggagatgttgcatggcaaatatctcccaaagcttcgttcccaaagaacgaagataattctcaactggaaatgctgggcttctcagctgatagcactgagtggtggaaggcctcaccccaggaagggagactaattgaaagtccatttgaaagggagctgtctgactccagtggtgtgttggagataaattcttcagtacaccaaaatgccagtccctggggagtaccagttcagggtgatattgagcccgtggaaacacactatactaatccttttagtgacaaccatcagtcaccctttctggaaggtaatgggaagaactcccatgagcaactctggaacattcaaccaaggcagccagacccagatgctgacaagttcagccagcttgtaaaattagaccaaattaaagaaaaggactcaagagagcaaacctttgtgtctgctgctggtgatgagctgactcctgaaacacctacccaagagcagtgtcaggacaccatgctgccagtctgtgatcatccggacacagcctttactcacgcagaggaaaatagttgtgttacatctaatgtttcaactaatgaaggtcaagaaacaaatcagtgggaacaagaaaaatcatacctaggtgagatgacaaattcaagcattgccacagaaaattttcctgctgtcagttctcccacccaactgataatgaagccaggctctgaatgggatggctctaccccaagtgaggactcccgaggtacctttgtgccagatattttacatggcaactttcaagagggtgggcagctggcctctgccgcgcctgacttgtggatagatgctaagaagcccttcagtttgaaagcagatggtgagaatcctgatatcctgacgcactgcgaacatgacagcaattctcaggcttccgacagccctgatatatgtcacgattctgaagcaaagcaagagactgagaagcacctcagtgcttgcatgggacctgaagtggaatccagtgagctttgtctcactgagccagagatagatgaagaacccatttatgagcctggacgggagtttgtcccatccaatgcagaactcgattctgaaaacgcaactgtgctgcctccaattggctatcaagcagacataaagggctcctctcagcccgcctctcataaaggttcacctgaaccttctgaaataaacggtgacaacagtacaggtttacaagtatcagaaaaaggagccagcccagatatggcaccaattttggaaccagttgacagaagaatcccaaggattgaaaatgtggcaactagcatttttgtaactcaccaagagccaactccagaaggtgacggttcttggatatcagacagcttttctcctgaaagtcagcctggtgcaagagctttgtttgatggtgatccacatttatccacagagaatcctgccttggttcctgatgctttgctagcctcagacacttgtctggatataagcgaagctgcctttgaccacagtttcagcgatgcctcaggtctcaacacatccacgggaacaatagatgacatgagtaaactgacattatccgaaggccatccggaaacgccagttgatggggacctagggaagcaagatatctgctcatctgaagcctcgtggggtgattttgaatatgatgtaatgggccagaatatcgatgaagatttactgagagagcctgaacacttcctgtatggtggtgaccctcctttggaggaagattctctgaagcagtcgctggcaccgtacacacctccctttgatttgtcttatctcacagaacctgcccagagtgctgaaacaatagaggaagctgggtctccagaggatgaatctctgggatgcagagcagcagagatagtgctttctgcacttcctgatcgaagaagtgagggaaaccaggctgagaccaaaaacagactgcctggatcccagctggctgtgctgcatattcgtgaagaccctgagtccgtttatttgccggtaggagcaggctccaacattttgtctccatcaaacgttgactgggaagtagaaacagataattctgatttaccagcaggtggagacataggaccaccaaatggtgccagcaaggaaatatcagaattggaagaagaaaaaacaattcctaccaaagagcctgagcagataaaatcagaatacaaggaagaaagatgtacagagaagaatgaagatcgtcatgcactacacatggattacatacttgtaaaccgtgaagaaaattcacactcaaagccagagacctgtgaagaaagagaaagcatagctgaattagaattgtatgtaggttccaaagaaacagggctgcagggaactcagttagcaagcttcccagacacatgtcagccagcctccttaaatgaaagaaaaggtctctctgcagagaaaatgtcttctaaaagcgatacgagatcatcttttgaaagccctgcacaagaccagagttggatgttcttgggccatagtgaggttggtgatccatcactggatgccagggactcagggcctgggtggtctggcaagactgtggagccgttctctgaactcggcttgggtgagggtccccagctgcagattctggaagaaatgaagcctctagaatctttggcactagaggaagcctctggtccagtcagccaatcacagaagagtaagagccgaggcagggctggcccggatgcagttacgttgcaggctgtcacccatgacaatgaatgggaaatgctttcaccacagcctgttcagaaaaacatgatccctgacacggaaatggaggaggagacagagttccttgagctcggaaccaggatatcaagaccaaatggactactgtcagaggatgtaggaatggacatcccctttgaagagggcgtgctgagtcccagtgctgcagacatgaggcctgaacctcctaattctctggatcttaatgacactcatcctcggagaatcaagctcacagccccaaatatcaatctttctctggaccaaagtgaaggatctattctctctgatgataacttggacagtccagatgaaattgacatcaatgtggatgaacttgatacccccgatgaagcagattcttttgagtacactggccatgaagatcccacagccaacaaagattctggccaagagtcagagtctattccagaatatacggccgaagaggaacgggaggacaaccggctttggaggacagtggtcattggagaacaagagcagcgcattgacatgaaggtcatcgagccctacaggagagtcatttctcacggaggatactatggggacggtctaaatgccatcattgtgtttgccgcctgttttctgccagacagcagtcgggcggattaccactatgtcatggaaaatcttttcctatatgtaataagtactttagagttgatggtagctgaagactatatgattgtgtacttgaatggtgcaaccccaagaaggaggatgccagggctaggctggatgaagaaatgctaccagatgattgacagacggttgaggaagaatttgaaatcattcatcattgttcatccatcttggttcatcagaacaatccttgctgtgacacgaccttttataagttcaaaattcagcagtaaaattaaatatgtcaatagcttatcagaactcagtgggctgatcccaatggattgcatccacattccagagagcatcatcaaactggatgaagaactgagggaagcatcagaggcagctaaaactagctgcctttacaatgatccagaaatgtcttctatggagaaggatattgacttgaagctgaaagaaaagccttagttggccatgctggaagaagaggatgcttttctggttcatggttctgttgaaacatatctacctgaaagagacagggctgatgttacctttttccactttgcactacctggtgccattctaaatttctaaggggaaaaatagaaagtttgtttactcttaagatattttatgaaattgtgtgtactttcctattttgccaattatgtgcctcaaagattttagttgagccttagcaagaaagtaggaccttccatttcaatacttcattaacacggtgtagtgatactttgtcccttagactggtgtttaccagtaagatacctttaatccactgttaagtatgagtggatttgtttccatagattagctggatttccttttggtgattgcattaggtttaaagtacacaggtctcaactctccccaggaaagtttcccctgtttgactccacctttaaaatcctaagcctgactaggacagccacaaaccacacaaggtgtaaaaccatcatcagctaagtgcccgttttgttcttgtttaccagaatctcctttaacttctcaaagggaagccgggctttctaatccacgtcaactttattttagttgtcaaattgggcattatattttatgtaaattggtcttttaacatcattttcctgatgaatgttggtgaccaccacattgtgaaatttaagaatccgtgttgcatgtttggtagctctctgagtttcaggccataaactcagctccagaggttaccttttaagtgccaagaactcaagtgcaaggtggcctactcaaaaatcatttggtagcattcagttattcatgaattcctctctcgcatgcattataaaaagtgatctgctttaaaacaccgtaatctgatcataggcttaaaattaaatatgagtattactttcatgtacaaaatatttcctttatagtcttcatatgccctttaaaatgccaacaagatttcaagtctgtaggcctctagtgaggtggggtggcaaaccacagctaagtctcgctcaccactgcaagctaagaatggtttttacattttgggttggaaaaattttttttgaatatttcatgacacatgaaaattattcaaatgttagtgccgataaataaagtggtactgaaacacagccacacaaacttgtttttgtactgtctacagctactttcacactacagccgcagagctgagcagttcagcagaccgtatgtcccacaatgcctaaaacattgactatgtttacagaaaaagtttgctgacccctgctctagcaaacgcatcctttcctactccaccccaatttgtatttagatagtttctctaacagaacggacaaatgaggctgcaaactaatttatttttgtcaaaaatcaatgttttgacatccacagacagtgaaataaaagaaatggcttgctgaaaaacatgaggagtcctagccacaaaatcactgcttaggttgcaattgccaaaatgaagccttcttagaagcacttctttagtatatacaggtgttggctgaagtccgtgcctcactctgggaaccattcttagtctccagtgtctcctattacaaagaagctggcagaaataaaaatgaaggggtgagagcggttccaccctagtctcatggtggaaaattcattggggagagctgtccaggatatttggagtcctgggtagaaggagcttgtaactactttaaagtcgacatctttgcacaggtgattgagtttctctgacctcattgcttcacctctgtctcctcccgtccttccgcacgtgcccacacacacgcagttcagccctctttcctccataagcctccatcgttttctcttttctcctcttgatcctttcaagcgagtatcttgttgaattgtatgttctgttggatctcctccttcataacatctggcttgttggacagaaaaaccctacagcccaccccctcccacagcccacctccacttttgaaagcccaaattacacctctcccagaacacagtgttgacgtaaatacagttacccaatattcctgtttgttcacctatttgctactttcactcagtagcatcccattttgtaaaatgaattccatggtcaccctgtcacaggaagtaatgaaaaatccagtgttcagtgtagtggtgcaaacctgagggcatagagctgttcatagagggctcttgttatagccaaacagacacagcaacaatctcaccatttatatatatatttttaacttgtccagctcatctatggaaaactactcaggtggtatgctgtttgaagcctcatcttcctacatgaaaattatgggcatttgtcccaatgattttgtttcagctgttctgtaggctgcataaccactctgatatttaggtatctgctattttattatcttaaaagacaaattaatttaattgcatgtgctagggaaaagctaccatgtacattcaccccaagtaaatagaatcctagatgaatcctagaaaaataatccctaagcagataggtagacagaggtaaacattcacatgatttagctctctagctcttgcactctgaacattcttgctttggttctgacttctgggaactgctttgcatttctcctatagatctgtagttaagggaaccaaggggtcattggggcaaaagcattgtttctcaaagctccttgattaagagaaagaacagaaatttgcacagaagatagtgtcaaggagtgagaaagtttgtttgagggcagtagctcagtgtggaagaaaatcctgaagtttctgttgaagccatacaatgttctatggggttactctctaagacattctctgaggtgtgtgaggaagtcactactcctagcctttgttaagatgtaattttaaatattcagttatggtactatgtttgcaactctcgtcttatcacaatgcctcagtagtttgttcccttagaaacatttagatgtgcacaaattaatcttttatatatctaaaggtttttctatcatgcattggattgctcagaataaagtgtctgttagacttcgttttggtaaataaattctccataatgtagattaataatataaaagtctttaatgacacaatatatctatatagcctcactgtataattcagaaataaaaattgattctgcatg

SEQ ID NO: 6152 - protein, 2790 aa, Homo sapiens
MELCSQICCELEECQNPCLELEPFDCGCDEILVYQQEDPSVTCDQVVLVVKEVINRRCPEMVSNSRTSSTEAVAGSAPLSQGSSGIMELYGSDIEPQPSSVNFIENPPDLNDSNQAQVDANVDLVSPDSGLATIRSSRSSKESSVFLSDDSPVGEGAGPHHTLLPGLDSYSPIPEGAVAEEHAWSGEHGEHFDLFNFDPAPMASGQSQQSSHSADYSPADDFFPNSDLSEGQLPAGPEGLDGMGTNMSNYSSSSLLSGAGKDSLVEHDEEFVQRQDSPRDNSERNLSLTDFVGDESPSPERLKNTGKRIPPTPMNSLVESSPSTEEPASLYTEDMTQKATDTGHMGPPQTHARCSSWWGGLEIDSKNIADAWSSSEQESVFQSPESWKEHKPSSIDRRASDSVFQPKSLEFTKSGPWESEFGQPELGSNDIQDKNEESLPFQNLPMEKSPLPNTSPQGTNHLIEDFASLWHSGRSPTAMPEPWGNPTDDGEPAAVAPFPAWSAFGKEDHDEALKNTWNLHPTSSKTPSVRDPNEWAMAKSGFAFSSSELLDNSPSEINNEAAPEIWGKKNNDSRDHIFAPGNPSSDLDHTWTNSKPPKEDQNGLVDPKTRGKVYEKVDSWNLFEENMKKGGSDVLVPWEDSFLSYKCSDYSASNLGEDSVPSPLDTNYSTSDSYTSPTFAGDEKETEHKPFAKEEGFESKDGNSTAEETDIPPQSLQQSSRNRISSGPGNLDMWASPHTDNSSEINTTHNLDENELKTEHTDGKNISMEDDVGESSQSSYDDPSMMQLYNETNRQLTLLHSSTNSRQTAPDSLDLWNRVILEDTQSTATISDMDNDLDWDDCSGGAAIPSDGQTEGYMAEGSEPETRFTVRQLEPWGLEYQEANQVDWELPASDEHTKDSAPSEHHTLNEKSGQLIANSIWDSVMRDKDMSSFMLPGSSHITDSEQRELPPEIPSHSANVKDTHSPDAPAASGTSESEALISHLDKQDTERETLQSDAASLATRLENPGYFPHPDPWKGHGDGQSESEKEAQGATDRGHLDEEEVIASGVENASGISEKGQSDQELSSLVASEHQEICIKSGKISSLAVTFSPQTEEPEEVLEYEEGSYNLDSRDVQTGMSADNLQPKDTHEKHLMSQRNSGETTETSDGMNFTKYVSVPEKDLEKTEECNFLEPENVGGGPPHRVPRSLDFGDVPIDSDVHVSSTCSEITKNLDVKGSENSLPGAGSSGNFDRDTISSEYTHSSASSPELNDSSVALSSWGQQPSSGYQEENQGNWSEQNHQESELITTDGQVEIVTKVKDLEKNRINEFEKSFDRKTPTFLEIWNDSVDGDSFSSLSSPETGKYSEHSGTHQESNLIASYQEKNEHDISATVQPEDARVISTSSGSDDDSVGGEESIEEEIQVANCHVAEDESRAWDSLNESNKFLVTADPKSENIYDYLDSSEPAENENKSNPFCDNQQSSPDPWTFSPLTETEMQITAVEKEKRSSPETGTTGDVAWQISPKASFPKNEDNSQLEMLGFSADSTEWWKASPQEGRLIESPFERELSDSSGVLEINSSVHQNASPWGVPVQGDIEPVETHYTNPFSDNHQSPFLEGNGKNSHEQLWNIQPRQPDPDADKFSQLVKLDQIKEKDSREQTFVSAAGDELTPETPTQEQCQDTMLPVCDHPDTAFTHAEENSCVTSNVSTNEGQETNQWEQEKSYLGEMTNSSIATENFPAVSSPTQLIMKPGSEWDGSTPSEDSRGTFVPDILHGNFQEGGQLASAAPDLWIDAKKPFSLKADGENPDILTHCEHDSNSQASDSPDICHDSEAKQETEKHLSACMGPEVESSELCLTEPEIDEEPIYEPGREFVPSNAELDSENATVLPPIGYQADIKGSSQPASHKGSPEPSEINGDNSTGLQVSEKGASPDMAPILEPVDRRIPRIENVATSIFVTHQEPTPEGDGSWISDSFSPESQPGARALFDGDPHLSTENPALVPDALLASDTCLDISEAAFDHSFSDASGLNTSTGTIDDMSKLTLSEGHPETPVDGDLGKQDICSSEASWGDFEYDVMGQNIDEDLLREPEHFLYGGDPPLEEDSLKQSLAPYTPPFDLSYLTEPAQSAETIEEAGSPEDESLGCRAAEIVLSALPDRRSEGNQAETKNRLPGSQLAVLHIREDPESVYLPVGAGSNILSPSNVDWEVETDNSDLPAGGDIGPPNGASKEISELEEEKTIPTKEPEQIKSEYKEERCTEKNEDRHALHMDYILVNREENSHSKPETCEERESIAELELYVGSKETGLQGTQLASFPDTCQPASLNERKGLSAEKMSSKSDTRSSFESPAQDQSWMFLGHSEVGDPSLDARDSGPGWSGKTVEPFSELGLGEGPQLQILEEMKPLESLALEEASGPVSQSQKSKSRGRAGPDAVTLQAVTHDNEWEMLSPQPVQKNMIPDTEMEEETEFLELGTRISRPNGLLSEDVGMDIPFEEGVLSPSAADMRPEPPNSLDLNDTHPRRIKLTAPNINLSLDQSEGSILSDDNLDSPDEIDINVDELDTPDEADSFEYTGHEDPTANKDSGQESESIPEYTAEEEREDNRLWRTVVIGEQEQRIDMKVIEPYRRVISHGGYYGDGLNAIIVFAACFLPDSSRADYHYVMENLFLYVISTLELMVAEDYMIVYLNGATPRRRMPGLGWMKKCYQMIDRRLRKNLKSFIIVHPSWFIRTILAVTRPFISSKFSSKIKYVNSLSELSGLIPMDCIHIPESIIKLDEELREASEAAKTSCLYNDPEMSSMEKDIDLKLKEKP

SEQ ID NO: 6153 - DNA, 7645 bp, Homo sapiens
gtttgtccagagacaagacagtcccagagataactctgaaagaaatttgagcctgacagattttgtgggagatgaatccccttccccagaaaggctaaaaaatactggaaagaggatcccaccaacacccatgaatagtttagtagaaagctcgccatccactgaagaaccagcctcactctatacagaagatatgacccaaaaagcaactgacacaggtcacatggggccacctcagacccatgcacggtgcagcagctggtggggtggtttggaaattgactccaaaaatattgcagatgcgtggagttccagtgaacaggaatctgttttccagagccctgaatcatggaaagagcataagccaagctccattgataggagagcctcagattctgtatttcaaccaaagagcctcgaatttacaaagtcaggtccctgggagtctgaatttggtcagcctgaactgggtagcaatgatattcaagacaaaaatgaggaaagcttgccgttccagaacctgcccatggagaagtcacctttgccaaatacatctccccaaggaacaaaccacctgatagaagactttgcttctttgtggcattctggtcgctctcccacagccatgcccgagccctggggaaatcctacagatgatggtgaaccagcagctgtggcgccattcccagcctggagtgcatttggtaaagaagatcatgatgaagctttaaaaaatacctggaatttgcacccaacaagcagcaagacaccttctgttagggacccgaatgagtgggccatggcaaaaagtgggtttgccttttcttcttcagaactactggacaattcacccagtgagataaacaatgaagcagctccagaaatctggggcaagaaaaacaatgactccagggatcacatctttgcacctggaaatcccagttctgatctggatcacacatggactaattctaagccaccaaaagaagatcagaatggtttagtggatcctaaaactaggggcaaggtatatgaaaaggtagattcctggaacctttttgaggagaatatgaagaaaggagggtcagatgtcctagttccttgggaagattccttcttatcttacaaatgttctgattacagtgcatccaacctaggagaagattcggtgccttcccccttagataccaattattccacctcagactcttacacatcaccaacatttgctggagacgaaaaggaaactgaacacaagccatttgctaaagaggaaggttttgagtcaaaagatggtaactccacggcagaggagactgacattcctcctcagtcactgcaacagtcatctcgaaatcgaatcagttcaggtcctgggaacctagacatgtgggcttcacctcatacagataacagttctgaaataaataccactcacaacctggatgaaaatgaactcaagacagagcacacagatggtaagaatatctccatggaggatgacgtcggggaaagcagccagtccagttacgacgaccccagcatgatgcaactgtacaatgaaacaaaccgacaactcacacttttgcacagcagcaccaactcccggcagacggcccctgacagtctcgacttgtggaacagagtgattttggaggatactcagtccactgcaacgatctcagatatggacaatgatttggactgggatgactgcagtgggggtgcggcaatccccagtgatggtcaaacagaaggatacatggctgaaggttccgagccggaaacccgatttacagtgagacagctggaaccctggggcttggagtatcaggaagcaaatcaggtagattgggagctccctgcctctgatgagcataccaaggacagtgctcccagtgaacatcacacattgaatgagaaaagtgggcagctaattgcaaacagtatttgggattctgtcatgagagataaagacatgtcatcattcatgttaccaggctcctcacatatcacagattcagagcaaagggaattgcctcctgaaatccccagccattcagcaaatgttaaagacactcattccccagatgcgccagcagcctctggaaccagtgaatcagaggcacttatatctcatcttgacaagcaggacacagagagggaaaccctgcaaagtgatgcagcatccttggcgactaggcttgagaatccagggtattttccacacccagatccatggaaaggtcatggcgatggacaaagtgaaagtgagaaggaagcccagggagccactgacagggggcaccttgatgaagaggaggtgatcgcctctggtgtggagaatgcctcagggatttctgaaaaagggcagagtgaccaggaactgtcttctctggttgcatctgaacatcaggaaatctgcattaaatcaggcaaaatcagctctcttgctgtcactttcagtcctcaaaccgaggaaccagaggaagttttagagtatgaggaggggtcttacaatctagactcccgtgatgtgcaaacagggatgtccgcagataacctgcagccaaaagatacccatgaaaaacacctcatgagtcaaagaaattcaggtgaaactactgagacttcagatgggatgaatttcacaaaatatgtatctgtacctgaaaaggatcttgagaaaactgaagaatgtaactttctagagccagagaacgtgggtggagggccacctcacagagttccccgaagtcttgattttggggacgtccctatagacagtgatgtgcatgtcagcagcacatgttctgagataaccaaaaatcttgacgttaaggggtctgaaaatagccttccaggagccggttcgtctggaaattttgacagagatactatttctagtgagtatactcattcaagtgcatcaagtcctgagttaaatgactcttcagttgcactgtcctcctggggccagcaacccagttctgggtatcaagaagaaaaccaaggcaactggagtgaacagaatcaccaagaatctgaactaattaccactgatggccaagtagaaatagttaccaaagtgaaggatttagagaaaaacagaataaatgagtttgaaaagagctttgatcgcaaaactcctacatttttagagatctggaatgactcagttgatggtgattccttttcctctttatccagtcctgaaacaggcaaatattctgaacattcagggacacatcaggaaagcaatctaattgctagctaccaggagaaaaatgaacatgacatttctgcaactgtgcagccagaggatgccagggtcatttcaacaagctcaggttctgatgatgacagtgtcggtggtgaagagtcaatagaggaagagatccaggtggccaactgccacgttgctgaggatgaatccagagcttgggattcattgaatgaatctaataagttcttggtcacagctgatcctaagtctgaaaatatttatgactacctagacagctcagagccagcagagaatgagaataagtcaaacccattctgtgacaatcaacaaagcagccctgatccctggactttctcaccattaacggagactgaaatgcagattacagcagtggagaaggagaagagatcttctccagaaacagggacaacaggagatgttgcatggcaaatatctcccaaagcttcgttcccaaagaacgaagataattctcaactggaaatgctgggcttctcagctgatagcactgagtggtggaaggcctcaccccaggaagggagactaattgaaagtccatttgaaagggagctgtctgactccagtggtgtgttggagataaattcttcagtacaccaaaatgccagtccctggggagtaccagttcagggtgatattgagcccgtggaaacacactatactaatccttttagtgacaaccatcagtcaccctttctggaaggtaatgggaagaactcccatgagcaactctggaacattcaaccaaggcagccagacccagatgctgacaagttcagccagcttgtaaaattagaccaaattaaagaaaaggactcaagagagcaaacctttgtgtctgctgctggtgatgagctgactcctgaaacacctacccaagagcagtgtcaggacaccatgctgccagtctgtgatcatccggacacagcctttactcacgcagaggaaaatagttgtgttacatctaatgtttcaactaatgaaggtcaagaaacaaatcagtgggaacaagaaaaatcatacctaggtgagatgacaaattcaagcattgccacagaaaattttcctgctgtcagttctcccacccaactgataatgaagccaggctctgaatgggatggctctaccccaagtgaggactcccgaggtacctttgtgccagatattttacatggcaactttcaagagggtgggcagctggcctctgccgcgcctgacttgtggatagatgctaagaagcccttcagtttgaaagcagatggtgagaatcctgatatcctgacgcactgcgaacatgacagcaattctcaggcttccgacagccctgatatatgtcacgattctgaagcaaagcaagagactgagaagcacctcagtgcttgcatgggacctgaagtggaatccagtgagctttgtctcactgagccagagatagatgaagaacccatttatgagcctggacgggagtttgtcccatccaatgcagaactcgattctgaaaacgcaactgtgctgcctccaattggctatcaagcagacataaagggctcctctcagcccgcctctcataaaggttcacctgaaccttctgaaataaacggtgacaacagtacaggtttacaagtatcagaaaaaggagccagcccagatatggcaccaattttggaaccagttgacagaagaatcccaaggattgaaaatgtggcaactagcatttttgtaactcaccaagagccaactccagaaggtgacggttcttggatatcagacagcttttctcctgaaagtcagcctggtgcaagagctttgtttgatggtgatccacatttatccacagagaatcctgccttggttcctgatgctttgctagcctcagacacttgtctggatataagcgaagctgcctttgaccacagtttcagcgatgcctcaggtctcaacacatccacgggaacaatagatgacatgagtaaactgacattatccgaaggccatccggaaacgccagttgatggggacctagggaagcaagatatctgctcatctgaagcctcgtggggtgattttgaatatgatgtaatgggccagaatatcgatgaagatttactgagagagcctgaacacttcctgtatggtggtgaccctcctttggaggaagattctctgaagcagtcgctggcaccgtacacacctccctttgatttgtcttatctcacagaacctgcccagagtgctgaaacaatagaggaagctgggtctccagaggatgaatctctgggatgcagagcagcagagatagtgctttctgcacttcctgatcgaagaagtgagggaaaccaggctgagaccaaaaacagactgcctggatcccagctggctgtgctgcatattcgtgaagaccctgagtccgtttatttgccggtaggagcaggctccaacattttgtctccatcaaacgttgactgggaagtagaaacagataattctgatttaccagcaggtggagacataggaccaccaaatggtgccagcaaggaaatatcagaattggaagaagaaaaaacaattcctaccaaagagcctgagcagataaaatcagaatacaaggaagaaagatgtacagagaagaatgaagatcgtcatgcactacacatggattacatacttgtaaaccgtgaagaaaattcacactcaaagccagagacctgtgaagaaagagaaagcatagctgaattagaattgtatgtaggttccaaagaaacagggctgcagggaactcagttagcaagcttcccagacacatgtcagccagcctccttaaatgaaagaaaaggtctctctgcagagaaaatgtcttctaaaagcgatacgagatcatcttttgaaagccctgcacaagaccagagttggatgttcttgggccatagtgaggttggtgatccatcactggatgccagggactcagggcctgggtggtctggcaagactgtggagccgttctctgaactcggcttgggtgagggtccccagctgcagattctggaagaaatgaagcctctagaatctttggcactagaggaagcctctggtccagtcagccaatcacagaagagtaagagccgaggcagggctggcccggatgcagttacgttgcaggctgtcacccatgacaatgaatgggaaatgctttcaccacagcctgttcagaaaaacatgatccctgacacggaaatggaggaggagacagagttccttgagctcggaaccaggatatcaagaccaaatggactactgtcagaggatgtaggaatggacatcccctttgaagagggcgtgctgagtcccagtgctgcagacatgaggcctgaacctcctaattctctggatcttaatgacactcatcctcggagaatcaagctcacagccccaaatatcaatctttctctggaccaaagtgaaggatctattctctctgatgataacttggacagtccagatgaaattgacatcaatgtggatgaacttgatacccccgatgaagcagattcttttgagtacactggccatgaagatcccacagccaacaaagattctggccaagagtcagagtctattccagaatatacggccgaagaggaacgggaggacaaccggctttggaggacagtggtcattggagaacaagagcagcgcattgacatgaaggtcatcgagccctacaggagagtcatttctcacggaggatactatggggacggtctaaatgccatcattgtgtttgccgcctgttttctgccagacagcagtcgggcggattaccactatgtcatggaaaatcttttcctatatgtaataagtactttagagttgatggtagctgaagactatatgattgtgtacttgaatggtgcaaccccaagaaggaggatgccagggctaggctggatgaagaaatgctaccagatgattgacagacggttgaggaagaatttgaaatcattcatcattgttcatccatcttggttcatcagaacaatccttgctgtgacacgaccttttataagttcaaaattcagcagtaaaattaaatatgtcaatagcttatcagaactcagtgggctgatcccaatggattgcatccacattccagagagcatcatcaatattgacttgaagctgaaagaaaagccttagttggccatgctggaagaagaggatgcttttctggttcatggttctgttgaaacatatctacctgaaagagacagggctgatgttacctttttccactttgcactacctggtgccattctaaatttctaaggggaaaaatagaaagtttgtttactcttaagatatttt

SEQ ID NO: 6154 - protein, 2448 aa, Homo sapiens
MNSLVESSPSTEEPASLYTEDMTQKATDTGHMGPPQTHARCSSWWGGLEIDSKNIADAWSSSEQESVFQSPESWKEHKPSSIDRRASDSVFQPKSLEFTKSGPWESEFGQPELGSNDIQDKNEESLPFQNLPMEKSPLPNTSPQGTNHLIEDFASLWHSGRSPTAMPEPWGNPTDDGEPAAVAPFPAWSAFGKEDHDEALKNTWNLHPTSSKTPSVRDPNEWAMAKSGFAFSSSELLDNSPSEINNEAAPEIWGKKNNDSRDHIFAPGNPSSDLDHTWTNSKPPKEDQNGLVDPKTRGKVYEKVDSWNLFEENMKKGGSDVLVPWEDSFLSYKCSDYSASNLGEDSVPSPLDTNYSTSDSYTSPTFAGDEKETEHKPFAKEEGFESKDGNSTAEETDIPPQSLQQSSRNRISSGPGNLDMWASPHTDNSSEINTTHNLDENELKTEHTDGKNISMEDDVGESSQSSYDDPSMMQLYNETNRQLTLLHSSTNSRQTAPDSLDLWNRVILEDTQSTATISDMDNDLDWDDCSGGAAIPSDGQTEGYMAEGSEPETRFTVRQLEPWGLEYQEANQVDWELPASDEHTKDSAPSEHHTLNEKSGQLIANSIWDSVMRDKDMSSFMLPGSSHITDSEQRELPPEIPSHSANVKDTHSPDAPAASGTSESEALISHLDKQDTERETLQSDAASLATRLENPGYFPHPDPWKGHGDGQSESEKEAQGATDRGHLDEEEVIASGVENASGISEKGQSDQELSSLVASEHQEICIKSGKISSLAVTFSPQTEEPEEVLEYEEGSYNLDSRDVQTGMSADNLQPKDTHEKHLMSQRNSGETTETSDGMNFTKYVSVPEKDLEKTEECNFLEPENVGGGPPHRVPRSLDFGDVPIDSDVHVSSTCSEITKNLDVKGSENSLPGAGSSGNFDRDTISSEYTHSSASSPELNDSSVALSSWGQQPSSGYQEENQGNWSEQNHQESELITTDGQVEIVTKVKDLEKNRINEFEKSFDRKTPTFLEIWNDSVDGDSFSSLSSPETGKYSEHSGTHQESNLIASYQEKNEHDISATVQPEDARVISTSSGSDDDSVGGEESIEEEIQVANCHVAEDESRAWDSLNESNKFLVTADPKSENIYDYLDSSEPAENENKSNPFCDNQQSSPDPWTFSPLTETEMQITAVEKEKRSSPETGTTGDVAWQISPKASFPKNEDNSQLEMLGFSADSTEWWKASPQEGRLIESPFERELSDSSGVLEINSSVHQNASPWGVPVQGDIEPVETHYTNPFSDNHQSPFLEGNGKNSHEQLWNIQPRQPDPDADKFSQLVKLDQIKEKDSREQTFVSAAGDELTPETPTQEQCQDTMLPVCDHPDTAFTHAEENSCVTSNVSTNEGQETNQWEQEKSYLGEMTNSSIATENFPAVSSPTQLIMKPGSEWDGSTPSEDSRGTFVPDILHGNFQEGGQLASAAPDLWIDAKKPFSLKADGENPDILTHCEHDSNSQASDSPDICHDSEAKQETEKHLSACMGPEVESSELCLTEPEIDEEPIYEPGREFVPSNAELDSENATVLPPIGYQADIKGSSQPASHKGSPEPSEINGDNSTGLQVSEKGASPDMAPILEPVDRRIPRIENVATSIFVTHQEPTPEGDGSWISDSFSPESQPGARALFDGDPHLSTENPALVPDALLASDTCLDISEAAFDHSFSDASGLNTSTGTIDDMSKLTLSEGHPETPVDGDLGKQDICSSEASWGDFEYDVMGQNIDEDLLREPEHFLYGGDPPLEEDSLKQSLAPYTPPFDLSYLTEPAQSAETIEEAGSPEDESLGCRAAEIVLSALPDRRSEGNQAETKNRLPGSQLAVLHIREDPESVYLPVGAGSNILSPSNVDWEVETDNSDLPAGGDIGPPNGASKEISELEEEKTIPTKEPEQIKSEYKEERCTEKNEDRHALHMDYILVNREENSHSKPETCEERESIAELELYVGSKETGLQGTQLASFPDTCQPASLNERKGLSAEKMSSKSDTRSSFESPAQDQSWMFLGHSEVGDPSLDARDSGPGWSGKTVEPFSELGLGEGPQLQILEEMKPLESLALEEASGPVSQSQKSKSRGRAGPDAVTLQAVTHDNEWEMLSPQPVQKNMIPDTEMEEETEFLELGTRISRPNGLLSEDVGMDIPFEEGVLSPSAADMRPEPPNSLDLNDTHPRRIKLTAPNINLSLDQSEGSILSDDNLDSPDEIDINVDELDTPDEADSFEYTGHEDPTANKDSGQESESIPEYTAEEEREDNRLWRTVVIGEQEQRIDMKVIEPYRRVISHGGYYGDGLNAIIVFAACFLPDSSRADYHYVMENLFLYVISTLELMVAEDYMIVYLNGATPRRRMPGLGWMKKCYQMIDRRLRKNLKSFIIVHPSWFIRTILAVTRPFISSKFSSKIKYVNSLSELSGLIPMDCIHIPESIINIDLKLKEKP

SEQ ID NO: 6155 - DNA, 381 bp, Homo sapiens
ccatttacagcgagaagtgaaaaaaagttctgagaagaagtgaggaggagctaacaattgagcatgacttccagaagacagtgtggactggtttcaggagctgactgagttggcttggctgtacataggaggaagaccctgatccctggtgctcaacacagaaatgcttcaatgataccctgagattgttttaccttgcaacactctctggaaaattgctgctccaggaatgcgatgaaaagatctgtaagagagcacagcccctgttgattgacttgtcttgatcaaaccagagcttctggctgggatactggtatcttgagtgagtcacagcaggagatacgtgctggagctgaagaggttggagaggcagcagaaaag

SEQ ID NO: 6156 - protein, 36 aa, Homo sapiens
LTCLDQTRASGWDTGILSESQQEIRAGAEEVGEAAE

SEQ ID NO: 6157 - DNA, 776 bp, Homo sapiens
ggtggttagagctataggcagtgagctgaggcaggaatcagatggctttacccatggagatttttgttgctggctaatttgctacatattcttagaactggtttgattaagaaaaaaagctgttggtgtggtgactggaagtctaacaacaatcaccacaatagatatctgcagccctgaaaccaattttcaggcttgaatttcttttacttttcttctttctttcttattgtgtgtctccaagtcctgagtctactggggttatgtagaaaaaaagttttaaacatttttttgggaaataattgcaaagttacagctaaattataagaaaaaaagaagagttctacactttgggaggccgaggcgggtggatcatgaggtcaggagatcgagaccatcctggctaacaagatcttacctatgttcaaactttgaagggtatttttagatctaagagatctgggtctttaaagtcagtcttggccagaatcaggctgcaaatgccaaagcaagagatgtcagcaatgagttgcaggtctttgccaaacagagcatcatctggcagtgaaaggagagcagaagaggggattttgaagtgtggaccgaccatggactgatggaaaaaggaaccacgaggagctccaacaatgggaatgtggttgcctcttcctagtgcaacacctgggttctggagtggtgcatgccaggtatttggcatgaaggtggaacaagcaaggatggtgctggtgtttgtagccacaaccaatgtggtgtga

SEQ ID NO: 6158 - protein, 38 aa, Homo sapiens
MPKQEMSAMSCRSLPNRASSGSERRAEEGILKCGPTMD

SEQ ID NO: 6159 - DNA, 537 bp, Homo sapiens
ccagaatcaggctgcaaatgccaaagcaagagatgtcagcaatgagttgcaggtctttgccaaacagagcatcatctggcagtgaaaggagagcagaagaggggattttgaagtcttcctgcacacttccgacaacttgattgaactggacgcccttggaagttcatggcatcgcctataacagagtctgtgtaggcaaaaccccagcctatgctggaatttaactcttaaaaagcaacctaagtagaacacaagattgtaaactctaaggagattctaacaccaaaagaaagtatgacttgagccaatgaaatgccaaaatccagttctagctgacaacgtcagtagtggaggacagacttccacttgccatttgaggaaaaagcatgtggattcatgagcataacagcagataccccactaccaattaccaaatcctgtgcacattcctgttctccagtcaccttttctccataaatgtttgtggtataaaatgaaaaccttcccaaatattaaccagtcaacctttattctctg

SEQ ID NO: 6160 - protein, 40 aa, Homo sapiens
MPKQEMSAMSCRSLPNRASSGSERRAEEGILKSSCTLPTT

SEQ ID NO: 6161 - DNA, 1616 bp, Homo sapiens
atggtggggaaaacagcaggagtgcgctccgccaatcggccaccctccccggcgggcaaactctgcgggcgagtccagagtagtcacagcggtggggccagcgggggttttggtcgccgcgggacgacggagaaggcccgcatcagccaatcgcgtgcgctgcaaccaacgtggggcgctgacgcgctcctccccggagcgtatggcagcgcagcgccggacggggcgttctccctccccccctcctctcgcttccatctccgccgtctcctcggtctcccttcccatcccggcccctcctccgccagccgcgtcctcccgggcttggtgaggaactgttcctggaggagccgcgggacgccaaaaccagccaatgggaagcggcgattcgcggagattggcactgatgatgggaaggaatattgatctcagcgttactttgaccattaatgaattatgatggcaataagcaaagattcgcacctctagcctccggggagcttaatcttctgctacaacatttgcatttggtgtctctctactgctcaggctggagtgcagtggtgcgatcatagctcactgcagcctcgacttcctgggctcaggtgaccctctcgcctgaaaccatattccccctcaagtagctgagactacagagacaaggtctcactatgttgcctaggctggtcttcaactcctggcctgaagttatcctctcatcttggactgccaaagtgctgggatttggcaccactgagccaaatcccaggcgtgagccactgagcctgggctgttcttccttctttataggcttaaaaaccttcaaaaattatctcaagattatccactccaggaagaacttgagcctcattgattgaattggtgtacttctcctcccttcctatagcattttctttatgtgtctatcctagcacttctcacacagtgttgaattcatctgtccacctggctcatcatacaaattgttccatgagttcaaggatcatgctgcatgctggattcccccggaagctgattctgagatggagtttagtgtactaaatatttatgtgggcctttggatcatcacctgtgaaaaggaagagaaggaagcaggagtggacctagggtgaagtgaagctctgatgcaaacctgacaactgcctcacctgacaccatgaagagctctggagctagaatggccttttgttgttctgaattggtgtgaggtagctaggtctttacacccctgccaccacccattattgggtatgggccaaccaggaaggggcatgaccatgagtgatgcagctctgcagctgaagcaataactgaagaggctgacagctgagggccatctgctgacagtactccctgcagctgggcagcacatcctttctcaaaaggggatcaaggcagttgcatctccgtgtccaccatggactatatattttttctttgcattcctagggcctcccatagtatatggcacatagtaggcaaaactggaggtctgtagggcaaattcagctagtagatgagtattgttttttcacccacaaagagatttttaaaaattagttgtcaacatttaaaaataaaaagatttcacattg

SEQ ID NO: 6162 - protein, 141 aa, Homo sapiens [sequence omitted]

SEQ ID NO: 6163 - DNA, 1262 bp, Homo sapiens
cggcccctcctccgccagccgcgtcctcccgggcttggtgaggaactgttcctggaggagccgcgggacgccaaaaccagccaatgggaagcggcgattcgcggagattggcactgatgatgggaagcaatgataaggaaactaaactggattaagtgctatcatcttggaggtgcaaaggcaaacaaggagaaagaagtgattgaagagcacttcagaaagcttggtacattcaaatcagcagggcttgattactcgcatcccaggacacttaaggaattggcaaatataattgcaagaccaccagcctttattttagaaaatgaaggttggacagaagaaggtcctgacaagtaaaatcagcagatggagtacctgttttttaaaagagggaaaaggacagctgtagtaattatagactattcagtttatcttggatacctgggaagatacaagagcaaatcatcaaacaatcaatttgcaaccacctagaagagtacaagctactgggtcgtaatcaacgtgattttgtgaagtgcaaattatgccacaccaatttaattttatctatgatagagtgatgagcctggcagaagaggggaaagcaatatctacaactggacttcaataaggaatattgatctcagcgttactttgaccattaatgaattatgatggcaataagcaaagattcgcacctctagcctccggggagcttaatcttctgctacaacatttgcatttgcagtgtttaaggaggatccaggaatactttaagtgacgccagcgttagtgttgcctcctcagaagactgctttcaggggaacagtatacatctgccctgtaaattctggatggtaaatatgacaaaaactctctccttgacccagctctagtgagactgctctaagccctcttctcaacatggctcaaccttgggcttcagtgtacattttgttgggcctgcattgctcagttttagcaagagtccagttaagtgaaagagaatctcacagctttgatatcagattcttccatatctaaacaaattcctcatcccctaccttcaatatctgatcactctgccctgtttgcaccaagaatctaccctcacccttgatgtctcctcttaataattttccatccaccaatctctccccactcttcaaacctgctccttggctataagtccctaccccttcttgtcttatttgcaatagagctcagttctacactggggtctctttttcctgattgcaata

SEQ ID NO: 6164 - protein, 38 aa, Homo sapiens
MNYDGNKQRFAPLASGELNLLLQHLHLQCLRRIQEYFK

SEQ ID NO: 6165 - DNA, 866 bp, Homo sapiens
ctcctccgccagccgcgtcctcccgggcttggtgaggaactgttcctggaggagccgcgggacgccaaaaccagccaatgggaagcggcgattcgcggagattggcactgatgatgggaagcaatgataaggaaactaaactggattaagtgctatcatcttggaggtgcaaaggcaaacaaggagaaagaagtgattgaagagcacttcagaaagcttggtacattcaaatcagcagggcttgattactcgcatcccaggacacttaaggaattggcaaatataattgcaagaccaccagcctttattttagaaaatgaaggttggacagaagaaggtcctgacaagtaaaatcagcagatggagtacctgttttttaaaagagggaaaaggacagctgtagtaattatagactattcagtttatcttggatacctgggaagatacaagagcaaatcatcaaacaatcaatttgcaaccacctagaagagtacaagctactgggtcgtaatcaacgtgattttgtgaagtgcaaattatgccacaccaatttaattttatctatgatagagtgatgagcctggcagaagaggggaaagcaatatctacaactggacttcaataaggaatattgatctcagcgttactttgaccattaatgaattatgatggcaataagcaaagattcgcacctctagcctccggggagcttaatcttctgctacaacatttgcatttggtgtctctctactgctcaggctggagtgcagtggtgcgatcatagctcactgcagcctcgacttcctgggctcaggtgaccctctcgcctgaaaccatattccccctcaagtagctgagactacagg

SEQ ID NO: 6166 - protein, 41 aa, Homo sapiens
MNYDGNKQRFAPLASGELNLLLQHLHLVSLYCSGWSAVVRS

SEQ ID NO: 6167 - DNA, 2504 bp, Homo sapiens
tctcccctcctccgccccctccgcgccagccttttgctctttcctttcattaaacaaacaggagatcctgaaacctggaccctgtgcaagctgcagcgccaggaggaggcagcggaggaagcagagcgcgggatgggcgcccagcggcatctgtgatcccgcgcacctccgccccacgggcgcgcgcacaaacacggacacacacatacacacactcgcgcacacactcgcacaaacacacactcgtacacgcccgcgccgctcgctcgccggcttgctctcccacgcaagcggaatgcagcagcgcctggagagcgtgtctcggaccgccgcctgaatgtacctcgctcccgggagccggacggcccagtagggcgcactggaggacgctccgctgcgggagcctggacagtttttgacggtgcagtcttgctatatggtgtgagaaatggctgtaggaaacaacactcaacgaagttattccatcatcccgtgttttatatttgttgagcttgtcatcatggctgggacagtgctgcttgcctactacttcgaatgcactgacacttttcaggtgcatatccaaggattcttctgtcaggacggagacttaatgaagccttacccagggacagaggaagaaagcttcatcacccctctggtgctctattgtgtgctggctgccaccccaactgctattatttttattggtgagatatccatgtatttcataaaatcaacaagagaatccctgattgctcaggagaaaacaattctgaccggagaatgctgttacctgaaccccttacttcgaaggatcataagattcacaggggtgtttgcatttggactttttgctactgacatttttgtaaacgccggacaagtggtcactgggcacttaacgccatacttcctgactgtgtgcaagccaaactacaccagtgcagactgccaagcgcaccaccagtttataaacaatgggaacatttgtactggggacctggaagtgatagaaaaggctcggagatcctttccctccaaacacgctgctctgagcatttactccgccttatatgccacgatgtatattacaagcacaatcaagacgaagagcagtcgactggccaagccggtgctgtgcctcggaactctctgcacagccttcctgacaggcctcaaccgggtctctgagtatcggaaccactgctcggacgtgattgctggtttcatcctgggcactgcagtggccctgtttctgggaatgtgtgtggttcataactttaaaggaacgcaaggatctccttccaaacccaagcctgaggatccccgtggagtacccctaatggctttcccaaggatagaaagccctctggaaaccttaagtgcacagaatcactctgcgtccatgaccgaagttacctgagacgactgatgtgtcacaagctgttttttaaaatcatcttccaattctatacttcaaaacacacagttgctcaatgtcaaactgtgatgacaaatattacgtttatctagttagaagctaatgttttgtacattttttgtatgaggaagtgatgtagcttgccctgattttttttttttttttttggtcagctttaatatatttatgccagaattttaaaaccaacaaaattttcttgttcaagcgtgcattgaagaaccacatttattcaatggttgacgttgttttgtgatatttgtacacaaattttcttttctcagttttataaacacagaatataacaattcactttaaacttttattaccacagttgctgcctcctccagaatttttgaattttaataaaaggcaaacttttgagctgcaggaaggacaatgttggttaataataaatctcaaagtcaattgtagaaaaaaaattgtcttcaaaaagaatgttgcactctgatctcttaacaaattgttacgttcaaagtttaaagtgatatattaacaaagtcacctagttatacaaacaattgtcagagaattctggatttggagggtattggggttatatgattctttcttagataatggcctctactaaataactcaagatctttctggaatgtcttctggcaggcaggtgccactgtcagcttttctccaaaaagcagccaacatcagcctcccctgtcaactcaacagttttgtatctcatattatatggactttatatgaaaatgaatattttacagtttgcacagtattattttacagaaaaggaatcagagaatctacaacatagggccccagaacaacagtttcactttgtggcttttaattattctagaattttaactgcatctcatttttctagcatggtgagaactaatatgtaactcctttgattgaaggagctcttttgtccgtacctatcagaatgttttcttgacacttccatgttggctcttctcagctttttttgtacatattttttttttctaaagagaagaaaaagttatcacaaaatgta

SEQ ID NO: 6168 - protein, 325 aa, Homo sapiens; identical to SEQ ID NO: 839

SEQ ID NO: 6169 - DNA, 2350 bp, Homo sapiens
aaagggagagaccagagcataaacagacaattctctaggttgcaaattgggaggattaggaacaagtaagagagatccatgcaggatggacaagaaaaaaaagttttataccaaaaattgtatttcatggcattagggcagtctactggggtaaggcactatgcagtactaggcaattagaattctattcactagctatgtgcacaagcggctcctgacctggtcattttggctgtaaaactattcatgcctggacagtttttgacggtgcagtcttgctatatggtgtgagaaatggctgtaggaaacaacactcaacgaagttattccatcatcccgtgttttatatttgttgagcttgtcatcatggctgggacagtgctgcttgcctactacttcgaatgcactgacacttttcaggtgcatatccaaggattcttctgtcaggacggagacttaatgaagccttacccagggacagaggaagaaagcttcatcacccctctggtgctctattgtgtgctggctgccaccccaactgctattatttttattggtgagatatccatgtatttcataaaatcaacaagagaatccctgattgctcaggagaaaacaattctgaccggagaatgctgttacctgaaccccttacttcgaaggatcataagattcacaggggtgtttgcatttggactttttgctactgacatttttgtaaacgccggacaagtggtcactgggcacttaacgccatacttcctgactgtgtgcaagccaaactacaccagtgcagactgccaagcgcaccaccagtttataaacaatgggaacatttgtactggggacctggaagtgatagaaaaggctcggagatcctttccctccaaacacgctgctctgagcatttactccgccttatatgccacgatgtatattacaagcacaatcaagacgaagagcagtcgactggccaagccggtgctgtgcctcggaactctctgcacagccttcctgacaggcctcaaccgggtctctgagtatcggaaccactgctcggacgtgattgctggtttcatcctgggcactgcagtggccctgtttctgggaatgtgtgtggttcataactttaaaggaacgcaaggatctccttccaaacccaagcctgaggatccccgtggagtacccctaatggctttcccaaggatagaaagccctctggaaaccttaagtgcacagaatcactctgcgtccatgaccgaagttacctgagacgactgatgtgtcacaagctgttttttaaaatcatcttccaattctatacttcaaaacacacagttgctcaatgtcaaactgtgatgacaaatattacgtttatctagttagaagctaatgttttgtacattttttgtatgaggaagtgatgtagcttgccctgattttttttttttttttttggtcagctttaatatatttatgccagaattttaaaaccaacaaaattttcttgttcaagcgtgcattgaagaaccacatttattcaatggttgacgttgttttgtgatatttgtacacaaattttcttttctcagttttataaacacagaatataacaattcactttaaacttttattaccacagttgctgcctcctccagaatttttgaattttaataaaaggcaaacttttgagctgcaggaaggacaatgttggttaataataaatctcaaagtcaattgtagaaaaaaaattgtcttcaaaaagaatgttgcactctgatctcttaacaaattgttacgttcaaagtttaaagtgatatattaacaaagtcacctagttatacaaacaattgtcagagaattctggatttggagggtattggggttatatgattctttcttagataatggcctctactaaataactcaagatctttctggaatgtcttctggcaggcaggtgccactgtcagcttttctccaaaaagcagccaacatcagcctcccctgtcaactcaacagttttgtatctcatattatatggactttatatgaaaatgaatattttacagtttgcacagtattattttacagaaaaggaatcagagaatctacaacatagggccccagaacaacagtttcactttgtggcttttaattattctagaattttaactgcatctcatttttctagcatggtgagaactaatatgtaactcctttgattgaaggagctcttttgtccgtacctatcagaatgttttcttgacacttccatgttggctcttctcagctttttttgtacatattttttttttctaaagagaagaaaaagttatcacaaaatgta

SEQ ID NO: 6170 - protein, 325 aa, Homo sapiens; identical to SEQ ID NO: 839

SEQ ID NO: 6171 - DNA, 584 bp, Homo sapiens
cacataagacatgcctgcttccccttccgccatgattataaattttctgaggcctctccagccatgcagaactactttttcagataaaattatcctgttgtggtagccatggagatgcaacacttggagtgcccttcaagatagaaattcctgattagctgggaagaatgcagtttgctgactggctccatccttccgggtggacaatagaaatcttgaatgcttatggtatgggtgaccgtaaaagaacaaattcaatgtctaaggaggcttttacaccagaacaactccatcttgaaaaggagctgggtgaaatgaggctgagacctactgtgctgcattcccagacggatcaccaaggattcagaccgataccaatgatgcaataaagacatcatttttcctccaggaaaaaaagagaaatatgggtttagtcaccaaggaagaaggcagtaaatagctttgaacactcacatttacactctaatatatctgtgtaaaggatatgaaggatataaataatttagaaattgtgggggaagtaggtatctctaatattgaataaaaagaaaataaatgaccag

SEQ ID NO: 6172 - protein, 73 aa, Homo sapiens
MQFADWLHPSGWTIEILNAYGMGDRKRTNSMSKEAFTPEQLHLEKELGEMRLRPTVLHSQTDHQGFRPIPMMQ

SEQ ID NO: 6173 - DNA, 10503 bp, Homo sapiens
ggaggagggagagcacaggctttgaccgatagtaacctctgcgctcggtgcagccgaatctataaaaggaactagtcccggcaaaaaccccgtaattgcgagcgagagtgagtggggccgggacccgcagagccgagccgacccttctctcccgggctgcggcagggcagggcggggagctccgcgcaccaacagagccggttctcagggcgctttgctccttgttttttccccggttctgttttctccccttctccggaaggcttgtcaaggggtaggagaaagagacgcaaacacaaaagtggaaaacagttaatgaccagccacggcgtccctgctgtgagctctggccgctgccttccagggctcccgagccacacgctgggggtgctggctgagggaacatggcttgttggcctcagctgaggttgctgctgtggaagaacctcactttcagaagaagacaaacatgtcagctgctgctggaagtggcctggcctctatttatcttcctgatcctgatctctgttcggctgagctacccaccctatgaacaacatgaatgccattttccaaataaagccatgccctctgcaggaacacttccttgggttcaggggattatctgtaatgccaacaacccctgtttccgttacccgactcctggggaggctcccggagttgttggaaactttaacaaatccattgtggctcgcctgttctcagatgctcggaggcttcttttatacagccagaaagacaccagcatgaaggacatgcgcaaagttctgagaacattacagcagatcaagaaatccagctcaaacttgaagcttcaagatttcctggtggacaatgaaaccttctctgggttcctgtatcacaacctctctctcccaaagtctactgtggacaagatgctgagggctgatgtcattctccacaaggtatttttgcaaggctaccagttacatttgacaagtctgtgcaatggatcaaaatcagaagagatgattcaacttggtgaccaagaagtttctgagctttgtggcctaccaagggagaaactggctgcagcagagcgagtacttcgttccaacatggacatcctgaagccaatcctgagaacactaaactctacatctcccttcccgagcaaggagctggctgaagccacaaaaacattgctgcatagtcttgggactctggcccaggagctgttcagcatgagaagctggagtgacatgcgacaggaggtgatgtttctgaccaatgtgaacagctccagctcctccacccaaatctaccaggctgtgtctcgtattgtctgcgggcatcccgagggaggggggctgaagatcaagtctctcaactggtatgaggacaacaactacaaagccctctttggaggcaatggcactgaggaagatgctgaaaccttctatgacaactctacaactccttactgcaatgatttgatgaagaatttggagtctagtcctctttcccgcattatctggaaagctctgaagccgctgctcgttgggaagatcctgtatacacctgacactccagccacaaggcaggtcatggctgaggtgaacaagaccttccaggaactggctgtgttccatgatctggaaggcatgtgggaggaactcagccccaagatctggaccttcatggagaacagccaagaaatggaccttgtccggatgctgttggacagcagggacaatgaccacttttgggaacagcagttggatggcttagattggacagcccaagacatcgtggcgtttttggccaagcacccagaggatgtccagtccagtaatggttctgtgtacacctggagagaagctttcaacgagactaaccaggcaatccggaccatatctcgcttcatggagtgtgtcaacctgaacaagctagaacccatagcaacagaagtctggctcatcaacaagtccatggagctgctggatgagaggaagttctgggctggtattgtgttcactggaattactccaggcagcattgagctgccccatcatgtcaagtacaagatccgaatggacattgacaatgtggagaggacaaataaaatcaaggatgggtactgggaccctggtcctcgagctgacccctttgaggacatgcggtacgtctgggggggcttcgcctacttgcaggatgtggtggagcaggcaatcatcagggtgctgacgggcaccgagaagaaaactggtgtctatatgcaacagatgccctatccctgttacgttgatgacatctttctgcgggtgatgagccggtcaatgcccctcttcatgacgctggcctggatttactcagtggctgtgatcatcaagggcatcgtgtatgagaaggaggcacggctgaaagagaccatgcggatcatgggcctggacaacagcatcctctggtttagctggttcattagtagcctcattcctcttcttgtgagcgctggcctgctagtggtcatcctgaagttaggaaacctgctgccctacagtgatcccagcgtggtgtttgtcttcctgtccgtgtttgctgtggtgacaatcctgcagtgcttcctgattagcacactcttctccagagccaacctggcagcagcctgtgggggcatcatctacttcacgctgtacctgccctacgtcctgtgtgtggcatggcaggactacgtgggcttcacactcaagatcttcgctagcctgctgtctcctgtggcttttgggtttggctgtgagtactttgccctttttgaggagcagggcattggagtgcagtgggacaacctgtttgagagtcctgtggaggaagatggcttcaatctcaccacttcggtctccatgatgctgtttgacaccttcctctatggggtgatgacctggtacattgaggctgtctttccaggccagtacggaattcccaggccctggtattttccttgcaccaagtcctactggtttggcgaggaaagtgatgagaagagccaccctggttccaaccagaagagaatatcagaaatctgcatggaggaggaacccacccacttgaagctgggcgtgtccattcagaacctggtaaaagtctaccgagatgggatgaaggtggctgtcgatggcctggcactgaatttttatgagggccagatcacctccttcctgggccacaatggagcggggaagacgaccaccatgtcaatcctgaccgggttgttccccccgacctcgggcaccgcctacatcctgggaaaagacattcgctctgagatgagcaccatccggcagaacctgggggtctgtccccagcataacgtgctgtttgacatgctgactgtcgaagaacacatctggttctatgcccgcttgaaagggctctctgagaagcacgtgaaggcggagatggagcagatggccctggatgttggtttgccatcaagcaagctgaaaagcaaaacaagccagctgtcaggtggaatgcagagaaagctatctgtggccttggcctttgtcgggggatctaaggttgtcattctggatgaacccacagctggtgtggacccttactcccgcaggggaatatgggagctgctgctgaaataccgacaaggccgcaccattattctctctacacaccacatggatgaagcggacgtcctgggggacaggattgccatcatctcccatgggaagctgtgctgtgtgggctcctccctgtttctgaagaaccagctgggaacaggctactacctgaccttggtcaagaaagatgtggaatcctccctcagttcctgcagaaacagtagtagcactgtgtcatacctgaaaaaggaggacagtgtttctcagagcagttctgatgctggcctgggcagcgaccatgagagtgacacgctgaccatcgatgtctctgctatctccaacctcatcaggaagcatgtgtctgaagcccggctggtggaagacatagggcatgagctgacctatgtgctgccatatgaagctgctaaggagggagcctttgtggaactctttcatgagattgatgaccggctctcagacctgggcatttctagttatggcatctcagagacgaccctggaagaaatattcctcaaggtggccgaagagagtggggtggatgctgagacctcagatggtaccttgccagcaagacgaaacaggcgggccttcggggacaagcagagctgtcttcgcccgttcactgaagatgatgctgctgatccaaatgattctgacatagacccagaatccagagagacagacttgctcagtgggatggatggcaaagggtcctaccaggtgaaaggctggaaacttacacagcaacagtttgtggcccttttgtggaagagactgctaattgccagacggagtcggaaaggattttttgctcagattgtcttgccagctgtgtttgtctgcattgcccttgtgttcagcctgatcgtgccaccctttggcaagtaccccagcctggaacttcagccctggatgtacaacgaacagtacacatttgtcagcaatgatgctcctgaggacacgggaaccctggaactcttaaacgccctcaccaaagaccctggcttcgggacccgctgtatggaaggaaacccaatcccagacacgccctgccaggcaggggaggaagagtggaccactgccccagttccccagaccatcatggacctcttccagaatgggaactggacaatgcagaacccttcacctgcatgccagtgtagcagcgacaaaatcaagaagatgctgcctgtgtgtcccccaggggcaggggggctgcctcctccacaaagaaaacaaaacactgcagatatccttcaggacctgacaggaagaaacatttcggattatctggtgaagacgtatgtgcagatcatagccaaaagcttaaagaacaagatctgggtgaatgagtttaggtatggcggcttttccctgggtgtcagtaatactcaagcacttcctccgagtcaagaagttaatgatgccatcaaacaaatgaagaaacacctaaagctggccaaggacagttctgcagatcgatttctcaacagcttgggaagatttatgacaggactggacaccaaaaataatgtcaaggtgtggttcaataacaagggctggcatgcaatcagctctttcctgaatgtcatcaacaatgccattctccgggccaacctgcaaaagggagagaaccctagccattatggaattactgctttcaatcatcccctgaatctcaccaagcagcagctctcagaggtggctctgatgaccacatcagtggatgtccttgtgtccatctgtgtcatctttgcaatgtccttcgtcccagccagctttgtcgtattcctgatccaggagcgggtcagcaaagcaaaacacctgcagttcatcagtggagtgaagcctgtcatctactggctctctaattttgtctgggatatgtgcaattacgttgtccctgccacactggtcattatcatcttcatctgcttccagcagaagtcctatgtgtcctccaccaatctgcctgtgctagcccttctacttttgctgtatgggtggtcaatcacacctctcatgtacccagcctcctttgtgttcaagatccccagcacagcctatgtggtgctcaccagcgtgaacctcttcattggcattaatggcagcgtggccacctttgtgctggagctgttcaccgacaataagctgaataatatcaatgatatcctgaagtccgtgttcttgatcttcccacatttttgcctgggacgagggctcatcgacatggtgaaaaaccaggcaatggctgatgccctggaaaggtttggggagaatcgctttgtgtcaccattatcttgggacttggtgggacgaaacctcttcgccatggccgtggaaggggtggtgttcttcctcattactgttctgatccagtacagattcttcatcaggcccagacctgtaaatgcaaagctatctcctctgaatgatgaagatgaagatgtgaggcgggaaagacagagaattcttgatggtggaggccagaatgacatcttagaaatcaaggagttgacgaagatatatagaaggaagcggaagcctgctgttgacaggatttgcgtgggcattcctcctggtgagtgctttgggctcctgggagttaatggggctggaaaatcatcaactttcaagatgttaacaggagataccactgttaccagaggagatgctttccttaacaaaaatagtatcttatcaaacatccatgaagtacatcagaacatgggctactgccctcagtttgatgccatcacagagctgttgactgggagagaacacgtggagttctttgcccttttgagaggagtcccagagaaagaagttggcaaggttggtgagtgggcgattcggaaactgggcctcgtgaagtatggagaaaaatatgctggtaactatagtggaggcaacaaacgcaagctctctacagccatggctttgatcggcgggcctcctgtggtgtttctggatgaacccaccacaggcatggatcccaaagcccggcggttcttgtggaattgtgccctaagtgttgtcaaggaggggagatcagtagtgcttacatctcatagtatggaagaatgtgaagctctttgcactaggatggcaatcatggtcaatggaaggttcaggtgccttggcagtgtccagcatctaaaaaataggtttggagatggttatacaatagttgtacgaatagcagggtccaacccggacctgaagcctgtccaggatttctttggacttgcatttcctggaagtgttctaaaagagaaacaccggaacatgctacaataccagcttccatcttcattatcttctctggccaggatattcagcatcctctcccagagcaaaaagcgactccacatagaagactactctgtttctcagacaacacttgaccaagtatttgtgaactttgccaaggaccaaagtgatgatgaccacttaaaagacctctcattacacaaaaaccagacagtagtggacgttgcagttctcacatcttttctacaggatgagaaagtgaaagaaagctatgtatgaagaatcctgttcatacggggtggctgaaagtaaagaggaactagactttcctttgcaccatgtgaagtgttgtggagaaaagagccagaagttgatgtgggaagaagtaaactggatactgtactgatactattcaatgcaatgcaattcaatgcaatgaaaacaaaattccattacaggggcagtgcctttgtagcctatgtcttgtatggctctcaagtgaaagacttgaatttagttttttacctatacctatgtgaaactctattatggaacccaatggacatatgggtttgaactcacacttttttttttttttttgttcctgtgtattctcattggggttgcaacaataattcatcaagtaatcatggccagcgattattgatcaaaatcaaaaggtaatgcacatcctcattcactaagccatgccatgcccaggagactggtttcccggtgacacatccattgctggcaatgagtgtgccagagttattagtgccaagtttttcagaaagtttgaagcaccatggtgtgtcatgctcacttttgtgaaagctgctctgctcagagtctatcaacattgaatatcagttgacagaatggtgccatgcgtggctaacatcctgctttgattccctctgataagctgttctggtggcagtaacatgcaacaaaaatgtgggtgtctccaggcacgggaaacttggttccattgttatattgtcctatgcttcgagccatgggtctacagggtcatccttatgagactcttaaatatacttagatcctggtaagaggcaaagaatcaacagccaaactgctggggctgcaagctgctgaagccagggcatgggattaaagagattgtgcgttcaaacctagggaagcctgtgcccatttgtcctgactgtctgctaacatggtacactgcatctcaagatgtttatctgacacaagtgtattatttctggctttttgaattaatctagaaaatgaaaagatggagttgtattttgacaaaaatgtttgtactttttaatgttatttggaattttaagttctatcagtgacttctgaatccttagaatggcctctttgtagaaccctgtggtatagaggagtatggccactgccccactatttttattttcttatgtaagtttgcatatcagtcatgactagtgcctagaaagcaatgtgatggtcaggatctcatgacattatatttgagtttctttcagatcatttaggatactcttaatctcacttcatcaatcaaatattttttgagtgtatgctgtagctgaaagagtatgtacgtacgtataagactagagagatattaagtctcagtacacttcctgtgccatgttattcagctcactggtttacaaatataggttgtcttgtggttgtaggagcccactgtaacaatactgggcagcctttttttttttttttttaattgcaacaatgcaaaagccaagaaagtataagggtcacaagtctaaacaatgaattcttcaacagggaaaacagctagcttgaaaacttgctgaaaaacacaacttgtgtttatggcatttagtaccttcaaataattggctttgcagatattggataccccattaaatctgacagtctcaaatttttcatctcttcaatcactagtcaagaaaaatataaaaacaacaaatacttccatatggagcatttttcagagttttctaacccagtcttatttttctagtcagtaaacatttgtaaaaatactgtttcactaatacttactgttaactgtcttgagagaaaagaaaaatatgagagaactattgtttggggaagttcaagtgatctttcaatatcattactaacttcttccactttttccagaatttgaatattaacgctaaaggtgtaagacttcagatttcaaattaatctttctatattttttaaatttacagaatattatataacccactgctgaaaaagaaaaaaatgattgttttagaagttaaagtcaatattgattttaaatataagtaatgaaggcatatttccaataactagtgatatggcatcgttgcattttacagtatcttcaaaaatacagaatttatagaataatttctcctcatttaatatttttcaaaatcaaagttatggtttcctcattttactaaaatcgtattctaattcttcattatagtaaatctatgagcaactccttacttcggttcctctgatttcaaggccatattttaaaaaatcaaaaggcactgtgaactattttgaagaaaacacaacattttaatacagattgaaaggacctcttctgaagctagaaacaatctatagttatacatcttcattaatactgtgttaccttttaaaatagtaattttttacattttcctgtgtaaacctaattgtggtagaaatttttaccaactctatactcaatcaagcaaaatttctgtatattccctgtggaatgtacctatgtgagtttcagaaattctcaaaatacgtgttcaaaaatttctgcttttgcatctttgggacacctcagaaaacttattaacaactgtgaatatgagaaatacagaagaaaataataagccctctatacataaatgcccagcacaattcattgttaaaaaacaaccaaacctcacactactgtatttcattatctgtactgaaagcaaatgctttgtgactattaaatgttgcacatcattcattcactgtatagtaatcattgactaaagccatttgtctgtgttttcttcttgtggttgtatatatcaggtaaaatattttccaaagagccatgtgtcatgtaatactgaaccactttgatattgagacattaatttgtacccttgttattatctactagtaataatgtaatactgtagaaatattgctctaattcttttcaaaattgttgcatcccccttagaatgtttctatttccataaggatttaggtatgctattatcccttcttataccctaagatgaagctgtttttgtgctctttgttcatcattggccctcattccaagcactttacgctgtctgtaatgggatctatttttgcactggaatatctgagaattgcaaaactagacaaaagtttcacaacagatttctaagttaaatcattttcattaaaaggaaaaaagaaaaaaaattttgtatgtcaataactttatatgaagtattaaaatgcatatttctatgttgtaatataatgagtcacaaaataaagctgtgacagttctgttggtctacagaaa

SEQ ID NO: 6174 - protein, 2261 aa, Homo sapiens; identical to SEQ ID NO: 843

SEQ ID NO: 6175 - DNA, 2000 bp, Homo sapiens
ggaggagggagagcacaggctttgaccgatagtaacctctgcgctcggtgcagccgaatctataaaaggaactagtcccggcaaaaaccccgtaattgcgagcgagagtgagtggggccgggacccgcagagccgagccgacccttctctcccgggctgcggcagggcagggcggggagctccgcgcaccaacagagccggttctcagggcgctttgctccttgttttttccccggttctgttttctccccttctccggaaggcttgtcaaggggtaggagaaagagacgcaaacacaaaagtggaaaacagttaatgaccagccacggcgtccctgctgtgagctctggccgctgccttccagggctcccgagccacacgctgggggtgctggctgagggaacatggcttgttggcctcagctgaggttgctgctgtggaagaacctcactttcagaagaagacaaacatgtcagctgctgctggaagtggcctggcctctatttatcttcctgatcctgatctctgttcggctgagctacccaccctatgaacaacatgaatgccattttccaaataaagccatgccctctgcaggaacacttccttgggttcaggggattatctgtaatgccaacaacccctgtttccgttacccgactcctggggaggctcccggagttgttggaaactttaacaaatccattgtggctcgcctgttctcagatgctcggaggcttcttttatacagccagaaagacaccagcatgaaggacatgcgcaaagttctgagaacattacagcagatcaagaaatccagctcaaacttgaagcttcaagatttcctggtggacaatgaaaccttctctgggttcctgtatcacaacctctctctcccaaagtctactgtggacaagatgctgagggctgatgtcattctccacaaggtatttttgcaaggctaccagttacatttgacaagtctgtgcaatggatcaaaatcagaagagatgattcaacttggtgaccaagaagtttctgagctttgtggcctaccaagggagaaactggctgcagcagagcgagtacttcgttccaacatggacatcctgaagccaatcctgatggatgtgacatgtgatgacattgcacatgggcagttaactgtgccaagaagtgcagcagtagcagcaaccggagatgcaaagcccaacatgatggggagagaaactcttctttcaatatgtgcttctgtaccaaaagtggaatttcacgagagacatattttgaaacatttctccttttgtgtgtgcgtgagtgtttccctgtttccagccaagggtattgtgagtttctcctgggcctccttcagaatctgggtgctctggaaagcagtgttttggcaacatggggaaagtatggcagtgtgggagggtcagctgggtctgggtttgaatattgcatttgaatattttaccagcattgatgtcggataaattatttagtccctgtaagcctcagttttctcttcttctacatacacataatatatttgactctttgttgtgattattggttacacatatgaagagcctggtgtggggcctggcacacaataggtgctcaataaatagaagttgataatttaattgacatgagtagtagaaattatgtccttgaaaacaattgcgtcaagatagaagttttcagccaggcacagtggctcacatctgttgtaatcccagcatattgtgggggccgaggcggatgaatcacttgaggccaggagttcaagaccagcctggccaacgtggtgaaatcccctctctactaaaaatacacatatttgccaggcaggcgtggtggcgcacacctgtaatcccagctactgaagaggctgaggcacaagaatcgcttgaacccaggaggtggaagttgcagtgagctgagatcactccactgcattccagccagcgtgacagagtgagactctgtctcag

SEQ ID NO: 6176 - protein, 363 aa, Homo sapiens
MACWPQLRLLLWKNLTFRRRQTCQLLLEVAWPLFIFLILISVRLSYPPYEQHECHFPNKAMPSAGTLPWVQGIICNANNPCFRYPTPGEAPGVVGNFNKSIVARLFSDARRLLLYSQKDTSMKDMRKVLRTLQQIKKSSSNLKLQDFLVDNETFSGFLYHNLSLPKSTVDKMLRADVILHKVFLQGYQLHLTSLCNGSKSEEMIQLGDQEVSELCGLPREKLAAAERVLRSNMDILKPILMDVTCDDIAHGQLTVPRSAAVAATGDAKPNMMGRETLLSICASVPKVEFHERHILKHFSFCVCVSVSLFPAKGIVSFSWASFRIWVLWKAVFWQHGESMAVWEGQLGLGLNIAFEYFTSIDVG

SEQ ID NO: 6177 - DNA, 936 bp, Homo sapiens
aattgcgagcgagagtgagtggggccgggacccgcagagccgagccgacccttctctcccgggctgcggcagggcagggcggggagctccgcgcaccaacagagccggttctcagggcgctttgctccttgttttttccccggttctgttttctccccttctccggaaggcttgtcaaggggtaggagaaagagacgcaaacacaaaagtggaaaacagtgtcagctgctgctggaagtggcctggcctctatttatcttcctgatcctgatctctgttcggctgagctacccaccctatgaacaacatgaatgccattttccaaataaagccatgccctctgcaggaacacttccttgggttcaggggattatctgtaatgccaacaacccctgtttccgttacccgactcctggggaggctcccggagttgttggaaactttaacaaatccattgtggctcgcctgttctcagatgctcggaggcttcttttatacagccagaaagacaccagcatgaaggacatgcgcaaagttctgagaacattacagcagatcaagaaatccagctcaaacttgaagcttcaagatttcctggtggacaatgaaaccttctctgggttcctgtatcacaacctctctctcccaaagtctactgtggacaagatgctgagggctgatgtcattctccacaaggtaagctgatgcctccagcttcctcagtagggctgatggcaattacgttgtgcagctactggaaagaaatgaataaacccttgtccttgtaatggtggtgaaggggagggaggtagtttgaatacaacttcacttaattttacttccctattcaggcaggaattgccaaaccatccaggagtggaatatgcaacctggcgtcatgggccagctggttaaaataaaattgatttctggctt

SEQ ID NO: 6178 - protein, 123 aa, Homo sapiens
MPSAGTLPWVQGIICNANNPCFRYPTPGEAPGVVGNFNKSIVARLFSDARRLLLYSQKDTSMKDMRKVLRTLQQIKKSSSNLKLQDFLVDNETFSGFLYHNLSLPKSTVDKMLRADVILHKVS

SEQ ID NO: 6179 - DNA, 469 bp, Homo sapiens
agctcagggccctccgaacaaagcagcgctcggtgccggacctgcagctctccccacccggcagcagcgccctcagcacgcccgggaacccccgacccctctgagcccggggtactgcgcccgggtctccacgcccagagatgctccccggtctccaccgtcgggcaagccccaagcgcagcagcgcagagtcctggggtcaccagagctcgtactaggacatcgtctccccatttaacaccgcctccggtcccatctgagttgcaagtggtggggatgtggggctccggatcaaagtccccgaaaccgagcacttcccgaagcctccttggcctcgaaacaaaacaataacgcccaagcgacctactgccttggagattcccagcctgagctccccaggtccctcagaggacccgagaggaacatcttactgcttctcttcataaattgagaggaaggaggccacaaa

SEQ ID NO: 6180 - protein, 70 aa, Homo sapiens
HRLRSHLSCKWWGCGAPDQSPRNRALPEASLASKQNNNAQATYCLGDSQPELPRSLRGPERNILLLLFIN

SEQ ID NO: 6181 - DNA, 2498 bp, Homo sapiens
aattctggggcggagtcctcggccgcgccggcgcaaagcgtcgccgcaccccacgcctgcgcgcttcgcccgcccggccccatccccccaggtttttcgcgtgggggagggggcacgtctcggcgagtcacgatgatggcggccaccatcctgtggtgagctagcggattccctgcttgtctcgccgaccccctcgcgccttctgcagactccgtggctggcgctcggcgcgtgaggaagcacggcggcccgagttcgcggggaaggccgcagtcgcggaggcagcggcgcggtccggggcacgggctgggggagaggccgctccgctgggcgaatgtgacaagcccccacccccaccgccttcctccccagagcgcgaggagcgcgggcgaccccggggccccgccaggccacagaccccgcccagcggccagcacccggcgcaggcccggcagccgagctgcgcggcggcaccatgcaggtcaccctgaagaccctccagcagcagaccttcaagatagacattgaccccgaggagacggtgaaagcactgaaagagaagattgaatctgaaaaggggaaagatgcctttccagtagcaggtcaaaaattaatttatgcaggcaaaatcctcaatgatgatactgctctcaaagaatataaaattgatgagaaaaactttgtggtggttatggtgaccaaacccaaagcagtgtccacaccagcaccagctacaactcagcagtcagctcctgccagcactacagcagttacttcctccaccaccacaactgtggctcaggctccaacccctgtccctgccttggcccccacttccacacctgcatccatcactccagcatcagcgacagcatcttctgaacctgcacctgctagtgcagctaaacaagagaagcctgcagaaaagccagcagagacaccagtggctactagcccaacagcaactgacagtacatcgggtgattcttctcggtcaaacctttttgaagatgcaacgagtgcacttgtgacgggtcagtcttacgagaatatggtaactgagatcatgtcaatgggctatgaacgagagcaagtaattgcagccctgagagccagtttcaacaaccctgacagagcagtggagtatcttttaatgggaatccctggagatagagaaagtcaggctgtggttgacccccctcaagcagctagtactggggctcctcagtcttcagcagtggctgcagctgcagcaactacgacagcaacaactacaacaacaagttctggaggacatccccttgaatttttacggaatcagcctcagtttcaacagatgagacaaattattcagcagaatccttccttgcttccagcgttactacagcagataggtcgagagaatcctcaattacttcagcaaattagccaacaccaggagcattttattcagatgttaaatgaaccagttcaagaagctggtggtcaaggaggaggaggtggaggtggcagtggaggaattgcagaagctggaagtggtcatatgaactacattcaagtaacacctcaggaaaaagaagctatagaaaggttaaaggcattaggatttcctgaaggacttgtgatacaagcgtattttgcttgtgagaagaatgagaatttggctgccaattttcttctacagcagaactttgatgaagattgaaagggacttttttatatctcacacttcacaccagtgcattacactaacttgttcactggattgtctgggatgacttgggctcatatccacaatacttggtataaggtagtagattgttgggggtggggagggagggatctaggatacagggcagggataaatacagtgcatgtctgcttcaattagcagatgccgcaactccacacagtgtgtaaaatatatacaaccaaaaatcagcttttgcaggtctttatttcttctgtaaaacagtaggtaacttttcctaggtttcactctttttagtgtactagatccagaaacttagtgtaatgccctgctttatatttctttgacttaacattggtttcagaaagaatcttagctacctagaatttacagtctctgtttcatggcaacactggataatggctttgtgaaatttaaaaaatttttgtagcgactgtaaacagaaatgccaaattgatggttaattgttgctgcttcaaaaataagtataaaattaatatgtaaggaagcccattctttcatgttaaatacttggggtgggaggggagaaagggaaccttttcttaaaatgaaaataattactgctattttaaaatttcttgatcattgaatgtgagacccttctaacatgatttgagaagctgtacaagtataggcagagttattttcctgtttacattttttttttgttttggggaaaaaattggtaggtgtctaattactgtttacttcattgttatattgcagtaaaagttttaaaacaacc

SEQ ID NO: 6182 - protein, 409 aa, Homo sapiens; identical to SEQ ID NO: 845

SEQ ID NO: 6183 - DNA, 2944 bp, Homo sapiens
aattctggggcggagtcctcggccgcgccggcgcaaagcgtcgccgcaccccacgcctgcgcgcttcgcccgcccggccccatccccccaggtttttcgcgtgggggagggggcacgtctcggcgagtcacgatgatggcggccaccatcctgtggtgagctagcggattccctgcttgtctcgccgaccccctcgcgccttctgcagactccgtggctggcgctcggcgcgtgaggaagcacggcggcccgagttcgcggggaaggccgcagtcgcggaggcagcggcgcggtccggggcacgggctgggggagaggccgctccgctgggcgaatgtgacaagcccccacccccaccgccttcctccccagagcgcgaggagcgcgggcgaccccggggccccgccaggccacagaccccgcccagcggccagcacccggcgcaggcccggcagccgagctgcgcggcggcaccatgcaggtcaccctgaagaccctccagcagcagaccttcaagatagacattgaccccgaggagacggtgaaagcactgaaagagaagattgaatctgaaaaggggaaagatgcctttccagtagcaggtcaaaaattaatttatgcaggcaaaatcctcaatgatgatactgctctcaaagaatataaaattgatgagaaaaactttgtggtggttatggtgaccaaacccaaagcagtgtccacaccagcaccagctacaactcagcagtcagctcctgccagcactacagcagttacttcctccaccaccacaactgtggctcaggctccaacccctgtccctgccttggcccccacttccacacctgcatccatcactccagcatcagcgacagcatcttctgaacctgcacctgctagtgcagctaaacaagagaagcctgcagaaaagccagcagagacaccagtggctactagcccaacagcaactgacagtacatcgggtgattcttctcggtcaaacctttttgaagatgcaacgagtgcacttgtgacgggtcagtcttacgagaatatggtaactgagatcatgtcaatgggctatgaacgagagcaagtaattgcagccctgagagccagtttcaacaaccctgacagagcagtggagtatcttttaatgggaatccctggagatagagaaagtcaggctgtggttgacccccctcaagcagctagtactggggctcctcagtcttcagcagtggctgcagctgcagcaactacgacagcaacaactacaacaacaagttctggaggacatccccttgaatttttacggaatcagcctcagtttcaacagatgagacaaattattcagcagaatccttccttgcttccagcgttactacagcagataggtcgagagaatcctcaattacttcagcaaattagccaacaccaggagcattttattcagatgttaaatgaaccagttcaagaagctggtggtcaaggaggaggaggtggaggtggcagtggaggaattgcagaagctggaagtggtcatatgaactacattcaagtaacacctcaggaaaaagaagctatagaaaggttaaaggcattaggatttcctgaaggacttgtgatacaagcgtattttgcttgtgagaagaatgagaatttggctgccaattttcttctacagcagaactttgatgaagattgaaagggacttttttatatctcacacttcacaccagtgcattacactaacttgttcactggattgtctgggatgacttgggctcatatccacaatacttggtataaggtagtagattgttgggggtggggagggagggatctaggatacagggcagggataaatacagtgcatgtctgcttcaattagcagatgccgcaactccacacagtgtgtaaaatatatacaaccaaaaatcagcttttgcaggtctttatttcttctgtaaaacagtaggtaacttttcctaggtttcactctttttagtgtactagatccagaaacttagtgtaatgccctgctttatatttctttgacttaacattggtttcagaaagaatcttagctacctagaatttacagtctctgtttcatggcaacactggataatggctttgtgaaatttaaaaaatttttgtagcgactgtaaacagaaatgccaaattgatggttaattgttgctgcttcaaaaataagtataaaattaatatgtaaggaagcccattctttcatgttaaatacttggggtgggaggggagaaagggaaccttttcttaaaatgaaaataattactgctattttaaaatttcttgatcattgaatgtgagacccttctaacatgatttgagaagctgtacaagtataggcagagttattttcctgtttacattttttttttgttttggggaaaaaattggtaggtgtctaattactgtttacttcattgttatattgcagtaaaagttttaaaacaaccattgcatgtttgcttttgatgtatccctttgtgaaattagcacttttggggccaatggagaaatgcagcattcactctccctgtcttttccccttccctcagcagaaacgtgtttatcagcaagtcgtgagtcaaactgctgccttttaaaaaacccacaaaatgctgattcagttcaaaattaatgcaaatgtttcaaaactgggtttctgatatttgtaaatgtgtttctttattagataagagtgtattaccattaaagtcattagtataatattgctttcaaaaagaaatggtagacaaaactataatccagcatcttttattgcattggaaagactggcaaagtcttttggatgggttgggagatgtggctggaaagtactttggaaaatatacaatcaagatatctcatggcatattaaaagaaaaatcttaatagcagt

SEQ ID NO: 6184 - protein, 409 aa, Homo sapiens; identical to SEQ ID NO: 845

SEQ ID NO: 6185 - DNA, 3101 bp, Homo sapiens
aattctggggcggagtcctcggccgcgccggcgcaaagcgtcgccgcaccccacgcctgcgcgcttcgcccgcccggccccatccccccaggtttttcgcgtgggggagggggcacgtctcggcgagtcacgatgatggcggccaccatcctgtggtgagctagcggattccctgcttgtctcgccgaccccctcgcgccttctgcagactccgtggctggcgctcggcgcgtgaggaagcacggcggcccgagttcgcggggaaggccgcagtcgcggaggcagcggcgcggtccggggcacgggctgggggagaggccgctccgctgggcgaatgtgacaagcccccacccccaccgccttcctccccagagcgcgaggagcgcgggcgaccccggggccccgccaggccacagaccccgcccagcggccagcacccggcgcaggcccggcagccgagctgcgcggcggcaccatgcaggtcaccctgaagaccctccagcagcagaccttcaagatagacattgaccccgaggagacggtgaaagcactgaaagagaagattgaatctgaaaaggggaaagatgcctttccagtagcaggtcaaaaattaatttatgcaggcaaaatcctcaatgatgatactgctctcaaagaatataaaattgatgagaaaaactttgtggtggttatggtgaccaaacccaaagcagtgtccacaccagcaccagctacaactcagcagtcagctcctgccagcactacagcagttacttcctccaccaccacaactgtggctcaggctccaacccctgtccctgccttggcccccacttccacacctgcatccatcactccagcatcagcgacagcatcttctgaacctgcacctgctagtgcagctaaacaagagaagcctgcagaaaagccagcagagacaccagtggctactagcccaacagcaactgacagtacatcgggtgattcttctcggtcaaacctttttgaagatgcaacgagtgcacttgtgacgggtcagtcttacgagaatatggtaactgagatcatgtcaatgggctatgaacgagagcaagtaattgcagccctgagagccagtttcaacaaccctgacagagcagtggagtatcttttaatgggaatccctggagatagagaaagtcaggctgtggttgacccccctcaagcagctagtactggggctcctcagtcttcagcagtggctgcagctgcagcaactacgacagcaacaactacaacaacaagttctggaggacatccccttgaatttttacggaatcagcctcagtttcaacagatgagacaaattattcagcagaatccttccttgcttccagcgttactacagcagataggtcgagagaatcctcaattacttcagcaaattagccaacaccaggagcattttattcagatgttaaatgaaccagttcaagaagctggtggtcaaggaggaggaggtggaggtggcagtggaggaattgcagaagctggaagtggtcatatgaactacattcaagtaacacctcaggaaaaagaagctatagaaaggttaaaggcattaggatttcctgaaggacttgtgatacaagcgtattttgcttgtgagaagaatgagaatttggctgccaattttcttctacagcagaactttgatgaagattgaaagggacttttttatatctcacacttcacaccagtgcattacactaacttgttcactggattgtctgggatgacttgggctcatatccacaatacttggtataaggtagtagattgttgggggtggggagggagggatctaggatacagggcagggataaatacagtgcatgtctgcttcaattagcagatgccgcaactccacacagtgtgtaaaatatatacaaccaaaaatcagcttttgcaggtctttatttcttctgtaaaacagtaggtaacttttcctaggtttcactctttttagtgtactagatccagaaacttagtgtaatgccctgctttatatttctttgacttaacattggtttcagaaagaatcttagctacctagaatttacagtctctgtttcatggcaacactggataatggctttgtgaaatttaaaaaatttttgtagcgactgtaaacagaaatgccaaattgatggttaattgttgctgcttcaaaaataagtataaaattaatatgtaaggaagcccattctttcatgttaaatacttggggtgggaggggagaaagggaaccttttcttaaaatgaaaataattactgctattttaaaatttcttgatcattgaatgtgagacccttctaacatgatttgagaagctgtacaagtataggcagagttattttcctgtttacattttttttttgttttggggaaaaaattggtaggtgtctaattactgtttacttcattgttatattgcagtaaaagttttaaaacaaccattgcatgtttgcttttgatgtatccctttgtgaaattagcacttttggggccaatggagaaatgcagcattcactctccctgtcttttccccttccctcagcagaaacgtgtttatcagcaagtcgtgagtcaaactgctgccttttaaaaaacccacaaaatgctgattcagttcaaaattaatgcaaatgtttcaaaactgggtttctgatatttgtaaatgtgtttctttattagataagagtgtattaccattaaagtcattagtataatattgctttcaaaaagaaatggtagacaaaactataatccagcatcttttattgcattggaaagactggcaaagtcttttggatgggttgggagatgtggctggaaagtactttggaaaatatacaatcaagatatctcatggcatattaaaagaaaaatcttaatagcagtgttggcttttatttggattttttcatctcagttttttctgtggaatctccttcattggcattgttatttaatcataaacggggcagatgtctacttgttcagtttttcaaatctgttttcctgagtataaataagagtatttaaagaaataatttgg

SEQ ID NO: 6186 - protein, 409 aa, Homo sapiens; identical to SEQ ID NO: 845

SEQ ID NO: 6187 - DNA, 4243 bp, Homo sapiens
aattctggggcggagtcctcggccgcgccggcgcaaagcgtcgccgcaccccacgcctgcgcgcttcgcccgcccggccccatccccccaggtttttcgcgtgggggagggggcacgtctcggcgagtcacgatgatggcggccaccatcctgtggtgagctagcggattccctgcttgtctcgccgaccccctcgcgccttctgcagactccgtggctggcgctcggcgcgtgaggaagcacggcggcccgagttcgcggggaaggccgcagtcgcggaggcagcggcgcggtccggggcacgggctgggggagaggccgctccgctgggcgaatgtgacaagcccccacccccaccgccttcctccccagagcgcgaggagcgcgggcgaccccggggccccgccaggccacagaccccgcccagcggccagcacccggcgcaggcccggcagccgagctgcgcggcggcaccatgcaggtcaccctgaagaccctccagcagcagaccttcaagatagacattgaccccgaggagacggtgaaagcactgaaagagaagattgaatctgaaaaggggaaagatgcctttccagtagcaggtcaaaaattaatttatgcaggcaaaatcctcaatgatgatactgctctcaaagaatataaaattgatgagaaaaactttgtggtggttatggtgaccaaacccaaagcagtgtccacaccagcaccagctacaactcagcagtcagctcctgccagcactacagcagttacttcctccaccaccacaactgtggctcaggctccaacccctgtccctgccttggcccccacttccacacctgcatccatcactccagcatcagcgacagcatcttctgaacctgcacctgctagtgcagctaaacaagagaagcctgcagaaaagccagcagagacaccagtggctactagcccaacagcaactgacagtacatcgggtgattcttctcggtcaaacctttttgaagatgcaacgagtgcacttgtgacgggtcagtcttacgagaatatggtaactgagatcatgtcaatgggctatgaacgagagcaagtaattgcagccctgagagccagtttcaacaaccctgacagagcagtggagtatcttttaatgggaatccctggagatagagaaagtcaggctgtggttgacccccctcaagcagctagtactggggctcctcagtcttcagcagtggctgcagctgcagcaactacgacagcaacaactacaacaacaagttctggaggacatccccttgaatttttacggaatcagcctcagtttcaacagatgagacaaattattcagcagaatccttccttgcttccagcgttactacagcagataggtcgagagaatcctcaattacttcagcaaattagccaacaccaggagcattttattcagatgttaaatgaaccagttcaagaagctggtggtcaaggaggaggaggtggaggtggcagtggaggaattgcagaagctggaagtggtcatatgaactacattcaagtaacacctcaggaaaaagaagctatagaaaggttaaaggcattaggatttcctgaaggacttgtgatacaagcgtattttgcttgtgagaagaatgagaatttggctgccaattttcttctacagcagaactttgatgaagattgaaagggacttttttatatctcacacttcacaccagtgcattacactaacttgttcactggattgtctgggatgacttgggctcatatccacaatacttggtataaggtagtagattgttgggggtggggagggagggatctaggatacagggcagggataaatacagtgcatgtctgcttcaattagcagatgccgcaactccacacagtgtgtaaaatatatacaaccaaaaatcagcttttgcaggtctttatttcttctgtaaaacagtaggtaacttttcctaggtttcactctttttagtgtactagatccagaaacttagtgtaatgccctgctttatatttctttgacttaacattggtttcagaaagaatcttagctacctagaatttacagtctctgtttcatggcaacactggataatggctttgtgaaatttaaaaaatttttgtagcgactgtaaacagaaatgccaaattgatggttaattgttgctgcttcaaaaataagtataaaattaatatgtaaggaagcccattctttcatgttaaatacttggggtgggaggggagaaagggaaccttttcttaaaatgaaaataattactgctattttaaaatttcttgatcattgaatgtgagacccttctaacatgatttgagaagctgtacaagtataggcagagttattttcctgtttacattttttttttgttttggggaaaaaattggtaggtgtctaattactgtttacttcattgttatattgcagtaaaagttttaaaacaaccattgcatgtttgcttttgatgtatccctttgtgaaattagcacttttggggccaatggagaaatgcagcattcactctccctgtcttttccccttccctcagcagaaacgtgtttatcagcaagtcgtgagtcaaactgctgccttttaaaaaacccacaaaatgctgattcagttcaaaattaatgcaaatgtttcaaaactgggtttctgatatttgtaaatgtgtttctttattagataagagtgtattaccattaaagtcattagtataatattgctttcaaaaagaaatggtagacaaaactataatccagcatcttttattgcattggaaagactggcaaagtcttttggatgggttgggagatgtggctggaaagtactttggaaaatatacaatcaagatatctcatggcatattaaaagaaaaatcttaatagcagtgttggcttttatttggattttttcatctcagttttttctgtggaatctccttcattggcattgttatttaatcataaacggggcagatgtctacttgttcagtttttcaaatctgttttcctgagtataaataagagtatttaaagaaataatttggattgcttttgttttttgtttccttttttttaaccatctgatactaagaagatgaatttgcacagatttctctgcataatttctcaatatctttagcacagtatggtgatgatgacttttaagcatttacatcacgtactcataacctattatgaaaataaatgaaactggctgggtatggtggctcatgcctataatcccagcactttgggaggccgaggtgggcagatcacttgaggccaggagattgagaccagcctgaccgtcatggcgaaaccccgtctatactaaaaatacaaaaaatagccaggcatggtggcgcacgcctgtggtcccagctacttgggaggctgaggcatgagaattgcttgaacccgggaagtgaaggttgccgtgagctgagatcacaccactgccataaacatgacaggcttttggactttgtattacctgtatgttttataatggatcatgcataatttctcaggagaataaaatgagaattcatatatacgttcatctttcaagtcagagcaatgagttgggaaaagaggtggcatttctgatcggataatggaatactctcatttattttatgacattctctgtctactcagatcatagtgaaaactggaaacaaaaaaaaaaaacagcctcttcttggaaagtgacagcagaaggtggcatggagcttgtgtccttggacaacaaatctggatatactaggattaattatcagaagacagctcaggccaagttttgatcgttccatacagtaccttgtttatctgcttcttaaagaatcagccgagacaccataaaagaaataggctttttgtgccttttgctgttaatgtttaatttacaaactgttttggtaaatctcttaatgtaagtagctatttgactttggaattttgcattcgaggtatactgtcatttcttgaaatctttttctcgtttagttgctctgtgggaaatgtgaggaagcctaagtttgtatttgtaaatttcttatgccatcctctagtcaaattttttttcattgtttaaaaatacggaagtgttccaatataattttttcctgtactggatggctaggattctagagaattgattataaaatattttcaatacatccaa

SEQ ID NO: 6188 - protein, 409 aa, Homo sapiens; identical to SEQ ID NO: 845

SEQ ID NO: 6189 - DNA, 1534 bp, Homo sapiens
ggtgggggagggagacgtaggcgtcgccactacccctgtgtggacctggttagccgcttagttcccagagttggtaacccgagaagatgagccttaagaaaaaaaaaagtatcaggttccgtttgccgccgagaggtgaaagcactgaaagagaagattgaatctgaaaaggggaaagatgcctttccagtagcaggtcaaaaattaatttatgcaggcaaaatcctcaatgatgatactgctctcaaagaatataaaattgatgagaaaaactttgtggtggttatggtgaccaaacccaaagcagtgtccacaccagcaccagctacaactcagcagtcagctcctgccagcactacagcagttacttcctccaccaccacaactgtggctcaggctccaacccctgtccctgccttggcccccacttccacacctgcatccatcactccagcatcagcgacagcatcttctgaacctgcacctgctagtgcagctaaacaagagaagcctgcagaaaagccagcagagacaccagtggctactagcccaacagcaactgacagtacatcgggtgattcttctcggtcaaacctttttgaagatgcaacgagtgcacttgtgacgggtcagtcttacgagaatatggtaactgagatcatgtcaatgggctatgaacgagagcaagtaattgcagccctgagagccagtttcaacaaccctgacagagcagtggagtatcttttaatgggaatccctggagatagagaaagtcaggctgtggttgacccccctcaagcagctagtactggggctcctcagtcttcagcagtggctgcagctgcagcaactacgacagcaacaactacaacaacaagttctggaggacatccccttgaatttttacggaatcagcctcagtttcaacagatgagacaaattattcagcagaatccttccttgcttccagcgttactacagcagataggtcgagagaatcctcaattacttcagcaaattagccaacaccaggagcattttattcagatgttaaatgaaccagttcaagaagctggtggtcaaggaggaggaggtggaggtggcagtggaggaattgcagaagctggaagtggtcatatgaactacattcaagtaacacctcaggaaaaagaagctatagaaaggttaaaggcattaggatttcctgaaggacttgtgatacaagcgtattttgcttgtgagaagaatgagaatttggctgccaattttcttctacagcagaactttgatgaagattgaaagggacttttttatatctcacacttcacaccagtgcattacactaacttgttcactggattgtctgggatgacttgggctcatatccacaatacttggtataaggtagtagattgttgggggtggggagggagggatctaggatacagggcagggataaatacagtgcatgtctgcttcaattagcagatgccgcaactccacacagtgtgtaaaatatatacaaccaaaaatc

SEQ ID NO: 6190 - protein, 337 aa, Homo sapiens
MVTKPKAVSTPAPATTQQSAPASTTAVTSSTTTTVAQAPTPVPALAPTSTPASITPASATASSEPAPASAAKQEKPAEKPAETPVATSPTATDSTSGDSSRSNLFEDATSALVTGQSYENMVTEIMSMGYEREQVIAALRASFNNPDRAVEYLLMGIPGDRESQAVVDPPQAASTGAPQSSAVAAAAATTTATTTTTSSGGHPLEFLRNQPQFQQMRQIIQQNPSLLPALLQQIGRENPQLLQQISQHQEHFIQMLNEPVQEAGGQGGGGGGGSGGIAEAGSGHMNYIQVTPQEKEAIERLKALGFPEGLVIQAYFACEKNENLAANFLLQQNFDED

SEQ ID NO: 6191 - DNA, 691 bp, Homo sapiens
atttgccctctggtgtgctctgcctagaaactctcccctattcctctctcctcagtaggccaacgtttaaaacccacttcaacgtggccaggcgcggtggctcacgcctgtaatcccagcactttgggaggccgagacgggcagatcacgaggtcaggagttcgagaccagcctggccaacatggtgaaacccccgtctctactattagctgggcatggtggcagcgcctgtggtcccagctactcgggaggctgaggcaggagaatcgcttgaaaccaaacaacgttacaggctctgtgaaggctttcctgccccagagtcagcagaggattgttcccttgttccactccctgaacatgtggtacacaaacggctttgccactgggtgccactggatcaggggcctcccatgaccctctcactggaccaagggactctcatgaacaccttcaccacctgacactggaccgggggtctcctgtgacatccctcacgcccccactggatcaggagtctcccatggactctgctgtcaatacttgccctcgacgcaaagcattgcctctgtctgatttttttctttttttttttccatcatgacagtgtgaactcctggagggcaggcctgtatgtttttcttctggatgtccttactacctggcacctagtaggtgctcaatacattttggt

SEQ ID NO: 6192 - protein, 81 aa, Homo sapiens
MVAAPVVPATREAEAGESLETKQRYRLCEGFPAPESAEDCSLVPLPEHVVHKRLCHWVPLDQGPPMTLSLDQGTLMNTFTT

SEQ ID NO: 6193 - DNA, 7566 bp, Homo sapiens
gctccacttacctttggtgcccggccctctggccgctctcctcccgccctcgcgccccttcggcccgtcccgtccagcccgggctgcccggctctcgcaggcccccccgcgccgaccgcgttcctatggacagacgcacagacacctgcaggagtgacactgctgatcctgtaacatggaggattgtcttcatacctcatctgagaatctgtccaaattggtcagctgggcccatagccatgggactatttgcagcctcattccaaacctgaaacacttgctttctgaaggttcccatgggaacctgacagcaatgtggggctgtagtgctggccatgcttatcactggccactaacagctacttgcagagctgggtcccaagagagggtctgtttccaggataacagaagttttaactctgatagtcccagtataatcggggtgccctctgagacacagactagccctgttgaaaggtaccctgggagaccagtgaaagcaaagctagactgtaaccggaccagagactcttgtgacttctcctactgtagtgagccctctgaactggatgaaactgttgaagaatatgaagatgagaacaccctgtttgacatggtttgtgagtcttctgttacagatgaggatagtgactttgaaccccaaacccaaaggcctcaaagcattgctcgcaaaagacctggggtagtcccatcttccctccattcaagctcccagacgcagatggttgacgaatgcagcaatgatgtcatcatcaagaaaatcaaacaagaaatccccgaagattattacattgtggcaaatgcagaactgacaggaggagtagatggaccagccctgtccttgacacagatggcaaaacccaagcctcagactcacgctggtccctcctgtgtagggtctgctaaactgattccccatgtcacatctgccatcagcacggagctagacccacacggtatgtctgcatccccctctgtgatctccagaccaattgtccagaagactgctagggtatctctggcttcaccaaacagaggaccccctggtacacatggcaccaaccaacaggtggccatgcaaatgcctgtgagcacatcccatcctaacaaacagatcagtatccccttgtctgccctgcagctgcctggacaggatgagcaagttgcctctgaagagttcctgtcccatctgcccagccaggtctcctcctgtgaggtagccctttctccctcagttaacacagagccagaagtgagctccagtcagcagcagcccccagtcgctccagccataaccactgaggccacagcacagtgcataccagcttattccactaagctcaacaaatttcctgtatttaatattaatgatgacttgaatgatctgtgtaccagtgcagtaagcccaaatactaccaaagccacgcggtacgccttgaatgtgtggcgttattggtgcatgaccaacgggctcaaagaccacacagacatcaccaagatccctgcagtgaagttgaacgagctgctcgagaacttttatgtcaccgtcaagaagagcgacggctcggacttcctggccacctcgctccatgctattcgccgaggcctggaccgcatcctgaagaatgcaggtgtcggcttttccatcaccagcagcaccttcagctcctccaccaagaaactcaaggagaagctgtgggtgctgagtaaggcaggcatgtcgggcgcgcgttctcgcaacatcgtctacttctccctttctgacgaggaggagatgtggcaggcagggtgtctgggggatgacagccctatcactctcctgtccactgtggtcaagtacaacagccagtacctgaacatgcggacgctgcaggagcatgcggatctgatgtatggtgacatcgagctgctcaaagacccccaaaaccagccctactttgcccggacggacagcgtcaagcgggagagtcggagcggctccaccagagtgtgtcacgggaagatctaccatgagcattcccggggacacaaacagtgcccttactgcctcctctacaagtacatgtacatccaccggccgcccacccaaatggaggccaagtcccccttctacctgactgccaggaaggaggccacagacatgggcagcgtgtggtatgaggagcagaggatggggctgcgctctcttcggggaattgtcccaaacttagccaagaaggtcaagctggaaaactgtgagaacttcacctttgtctcgttcactcaggtctcccggaggcttggctcccacagctgctgccagtgagcccccactggggcccggccactgccctgtcacctgctcgggccagccagggttggagcagctggagctccttggaggcaggggctgaccaggtgtgacctcccggtctggcggctctcccctggtgtggcctgccctccctttgacttggggtttgctttttaaaatgaaactagatgagtctaaatcattcggatggtttatccaaatgtgcgtcaacttcgttagcttttagaatctaacacaatgtataattgttacatacaagagtgaggaaattcattttctctagtgcctttctagcacaggttttctcaaaacaaacaaacaaaaaaggaaactgttaagtagtcgtttaaaaaaaaaatcccagtagcgcagtagctttagaacgttaggaagactgtacactttgttgaattacactcacaattagaaactagagagaggcagacacgttccctatttccaggagacagattgcgcttgatgcgccttttttttctgttggtggataaggtggttctggagggcaggcagccttgtgtcggggagtatcctcaagcgacacttggtcatctgacaaggacttgggctgctcccacggctcccagcagcggtaggaaccccatctcggctgtcaatggagagaattttatgataaaagattcacgcaccagaagggtgtctgtgagaacaaggcttctagtgaactagacagtttgtaccatgagggaatttctagtagtgaaggaaaatggcttggaaaagccaatctgtgatcaaaatgtgaaaacctcctgaagcagaagtgcctatgttttatttctcagcaccatgtgagagctcctttgattggaacattttttgaggtttctgtctgttcttcgtgtcatcccattattcggtcagcatataccactggatctataaaacaactaaaggtaatttttagtcttagccaagaaaagctaaccaaacaagctgcaaaaaacacagatccccaaactttctttattaaagagatttggaatatttttgtcaatgtatgacttttcagccacaattacatgtcatcattttaggatggcaccaatacttgggacacgatgatttaggcaccccaccaggtaagcaaactcagcattaaggatgtagttataaaattagcgcataatggtaggtaatgcagtttgaaaccatttcactcaggtaaaatgcaacctgaccacattatttaaaaatcagcagaattttctaataactactctgagtgcaacaacaagtgaaaaaggagctcaaagagtgctcattaagagtaacaataatttctagggaccttgactttgcatttgaggaaaatcttgtgtaactttattccattatgctcctaatatgctttctaatcccaaattaaaactctaatacaaattcattttgtagaagtcttaaaatcagtcctctttctttttgaaaacattattttagtatttattttaattaattggtttcttaaaaaatcatacactagtcattgacatatgtaatacttcctttaccagagaagactcaaccaatgctgccttaagatttaatgttattccctttttagtcactgtgcatttataagtttgtttactagttgacctttcctgaatagagattagtttcggcatttctccatctgtatataaataacaggtaatatttaatcatcagtgtatgacttgatatcacataacgttctggtgtggtttcctgtagtgatcttagggttttgatttaaaagaaatacacaaaacattaggtacaatttcctttagtttgctaaacacccaaaggatattttgttttgttggttctgcacttaaactgaaatacaacctatgtgaactattgggcaaagcctgcagcctaattaattaaaacctccatttttatttgaatagattcaagtagaaattgccgttaggaatcactgggatcttttcggattttgaccttttcaaaggtagcaataactactccagaggttgtaatctttctgttggtagtggcttttcatcagctaaataatcatctctgcctcaaatgtgttgcctgtcacctagttgatgttccataaaatccctgggttctgaagtgaattattataattaataatcaggagggcgaatcttcagtggcatctgatggaatgaaagaactgtgtctgagcagcctaaaagctgtttgtgacatgccaccttgggaaacaagagtgaggaagaaaacacagtcatcaagtgccagcgtgtgccacccattgtactaggtactttattatgcatttatgtatatgtgtgtgtgtctgtgtatacacacaaacacatatacataagtgtttacacacacacacgcacaatatgtggttaagcctggtaagcctgctaaaatggcaaagcggcctggcgcgtggctcacgcctataatcccagcactttgggaggccaaggtgggcagatcacttgaggtcaggagttcaagatcaggaccaacatggtgaaaccccatctctactaaaaatacaaaaattagccgggcgtggtggcaggtgcctgtaatcccagctacttgagagtctgaagcaggagaattgcttgaacctgggaggcggaggttgcagtgagccgagaccatgccactgcactccagcctgggcaacaaagctagactccatctcaaaaaaaataaaaaataaaatggcgaagcacctgtccatgtgtttggccaaagccgtcctccgaggtcttaagggggccagagtagcagtcctcgttggcgttctaaggcagttgttctggcttccagtcagctctaaaccttaccttctggggactccaggattttctgctcttggcctaatgcaagagaaaggagaatccccagagaaagaagtggggaggtaaagagcgttttctccacttacctttgggttttttatgctcccaagtagaaataaatatcaagaattcacaggttgactgaagcacaagttgcccctgggctctgtgtcaaggctggtggtactgtaggtgttatgagaggacccatagggtgtccttcaggtgagctgttgtccacagcacctttcatatctgctgtaaagggagccctactttctgtctatcccccccaccgccggcccccggaatctaagcagactccctgttggaagcttactctggcacagaagctaggatgtcaccttaaagggtgtgattcaattgaatatagtttagtgcggtaccaggcacatcataagcatgcaataaatgttagccagcttagttataacttttggtaataattaatattatttaactaatttgcattataccacttatttcttccattatggagattctgtctcccttaaactgttaaacttgaagaagaaaccaaacatgataatctggtcaagttaacacattttcgcccatgaattctacctccaacacagccaagctctgatacctcagatataagcaaaaacaagtgaaggaagaacagaaaagccttatggggctttatgagaaggtttttccattgtttagtgtgtttgcaaaaaggaattttatggaagtacctaaccaaagctgtgacagaagggtctccttggtcatgtggcattttccagctttccttggattttatgctacattaatttgccctggctgataaatggtgtttgaagaaatgtgaaattttgttactttgatttttattttaattcaagcttattaaaagcatcaagcattatatgccacactcagcattttcatagacatagtcattaggagaatctggacaaagtaatactcttgtagaaacggaagcatcttgctgtacttgaaagataactggactcagagctacttcactcctcacttgggcaaatgccgatatcactttgcttagctataaagtgccatcagtgggatggatcgtcttcacggtgaaccgtgttacacttctgcaattcctcaagttcatattaattaggaagtggcagagctaggacacaaaattcctaattcctgaagatagttagtctcctaattaagtgcttctcactatattgggatgccttctttaggaataagactttcctttaattttcaagttccacaacttctaaaattattttgctatctcgaagcagcagaatattgatcatttttctcagtttaggctaacacagtccacaccattaccacttaaataaagtaaccgaatgctaaatattatccttatcaaacatccatcactttgttgcttttatgagatgtagattgctaaaaacttttgagctagtagacgttacctttaagcatcaatgaatgcaaacagtgaagacctcaaagaagagttacctcattttctctacatgatctccaatgtagtctcagataaggcccatacatagttaaaagctggtaacagctctgaacagaagtatgtattaaatgtttcaaacttgtatatatttttgaatgcttttgtttttggagtgaatttttaatactctgtgttaaaagaaaaacattccatcttgtaggcagtgttcctcagtaaaaatctttgttgcattttcccatataaatgaatcacccttattaaaacaggaggagggagggatttgtggtgacctaccgctgccctccctttctaagagaagaggaggccatggggtatgataactaaatgaacatctctggaagttcctccgtctgatatgtgtattctgacataacagaatttcccaagacttctttgaggaaggctgtccacgcttcaggcaaagtttacccattattattatgattttgaatattccttgttcattacagtccagaaaatctgcagaagttctccatgttcagtggttgaccagaatctgattgttgcgctcaattaaagtgcttattatttagctaaaacaacttatatggaagttaattatttcaggaaatacataataagaccaaaaaaatcactggataatatgtagatatattttagttccattactattaatagcaattagataactctccctccccccattgaggtgagaatgggctcctagatacttggtggtcaatagaactgatttgattaactttcatttaactgtggttattgttacatctactgattttttcaaataaaaatttctagaaggctcagatttgact

SEQ ID NO: 6194 - protein, 716 aa, Homo sapiens; identical to SEQ ID NO: 847

SEQ ID NO: 6195 - DNA, 7932 bp, Homo sapiens
gctccacttacctttggtgcccggccctctggccgctctcctcccgccctcgcgccccttcggcccgtcccgtccagcccgggctgcccggctctcgcaggcccccccgcgccgaccgcgttcctatggacagacgcacagacacctgcaggagtgacactgctgatcctgtaacatggaggattgtcttcatacctcatctgagaatctgtccaaattggtcagctgggcccatagccatgggactatttgcagcctcattccaaacctgaaacacttgctttctgaaggttcccatgggaacctgacagcaatgtggggctgtagtgctggccatgcttatcactggccactaacagctacttgcagagctgggtcccaagagagggtctgtttccaggataacagaagttttaactctgatagtcccagtataatcggggtgccctctgagacacagactagccctgttgaaaggtaccctgggagaccagtgaaagcaaagctagactgtaaccggaccagagactcttgtgacttctcctactgtagtgagccctctgaactggatgaaactgttgaagaatatgaagatgagaacaccctgtttgacatggtttgtgagtcttctgttacagatgaggatagtgactttgaaccccaaacccaaaggcctcaaagcattgctcgcaaaagacctggggtagtcccatcttccctccattcaagctcccagacgcagatggttgacgaatgcagcaatgatgtcatcatcaagaaaatcaaacaagaaatccccgaagattattacattgtggcaaatgcagaactgacaggaggagtagatggaccagccctgtccttgacacagatggcaaaacccaagcctcagactcacgctggtccctcctgtgtagggtctgctaaactgattccccatgtcacatctgccatcagcacggagctagacccacacggtatgtctgcatccccctctgtgatctccagaccaattgtccagaagactgctagggtatctctggcttcaccaaacagaggaccccctggtacacatggcaccaaccaacaggtggccatgcaaatgcctgtgagcacatcccatcctaacaaacagatcagtatccccttgtctgccctgcagctgcctggacaggatgagcaagttgcctctgaagagttcctgtcccatctgcccagccaggtctcctcctgtgaggtagccctttctccctcagttaacacagagccagaagtgagctccagtcagcagcagcccccagtcgctccagccataaccactgaggccacagcacagtgcataccagcttattccactaagctcaacaaatttcctgtatttaatattaatgatgacttgaatgatctgtgtaccagtgcagtaagcccaaatactaccaaagccacgcggtacgccttgaatgtgtggcgttattggtgcatgaccaacgggctcaaagaccacacagacatcaccaagatccctgcagtgaagttgaacgagctgctcgagaacttttatgtcaccgtcaagaagagcgacggctcggacttcctggccacctcgctccatgctattcgccgaggcctggaccgcatcctgaagaatgcaggtgtcggcttttccatcaccagcagcaccttcagctcctccaccaagaaactcaaggagaagctgtgggtgctgagtaaggcaggcatgtcgggcgcgcgttctcgcaacatcgtctacttctccctttctgacgaggaggagatgtggcaggcagggtgtctgggggatgacagccctatcactctcctgtccactgtggtcaagtacaacagccagtacctgaacatgcggacgctgcaggagcatgcggatctgatgtatggtgacatcgagctgctcaaagacccccaaaaccagccctactttgcccggacggacagcgtcaagcgggagagtcggagcggctccaccagagtgtgtcacgggaagatctaccatgagcattcccggggacacaaacagtgcccttactgcctcctctacaagtacatgtacatccaccggccgcccacccaaatggaggccaagtcccccttctacctgactgccaggaaggaggccacagacatgggcagcgtgtggtatgaggagcagaggatggggctgcgctctcttcggggaattgtcccaaacttagccaagaaggtcaagctggaaaactgtgagaacttcacctttgtctcgttcactcaggtctcccggaggcttggctcccacagctgctgccagtgagcccccactggggcccggccactgccctgtcacctgctcgggccagccagggttggagcagctggagctccttggaggcaggggctgaccaggtgtgacctcccggtctggcggctctcccctggtgtggcctgccctccctttgacttggggtttgctttttaaaatgaaactagatgagtctaaatcattcggatggtttatccaaatgtgcgtcaacttcgttagcttttagaatctaacacaatgtataattgttacatacaagagtgaggaaattcattttctctagtgcctttctagcacaggttttctcaaaacaaacaaacaaaaaaggaaactgttaagtagtcgtttaaaaaaaaaatcccagtagcgcagtagctttagaacgttaggaagactgtacactttgttgaattacactcacaattagaaactagagagaggcagacacgttccctatttccaggagacagattgcgcttgatgcgccttttttttctgttggtggataaggtggttctggagggcaggcagccttgtgtcggggagtatcctcaagcgacacttggtcatctgacaaggacttgggctgctcccacggctcccagcagcggtaggaaccccatctcggctgtcaatggagagaattttatgataaaagattcacgcaccagaagggtgtctgtgagaacaaggcttctagtgaactagacagtttgtaccatgagggaatttctagtagtgaaggaaaatggcttggaaaagccaatctgtgatcaaaatgtgaaaacctcctgaagcagaagtgcctatgttttatttctcagcaccatgtgagagctcctttgattggaacattttttgaggtttctgtctgttcttcgtgtcatcccattattcggtcagcatataccactggatctataaaacaactaaaggtaatttttagtcttagccaagaaaagctaaccaaacaagctgcaaaaaacacagatccccaaactttctttattaaagagatttggaatatttttgtcaatgtatgacttttcagccacaattacatgtcatcattttaggatggcaccaatacttgggacacgatgatttaggcaccccaccaggtaagcaaactcagcattaaggatgtagttataaaattagcgcataatggtaggtaatgcagtttgaaaccatttcactcaggtaaaatgcaacctgaccacattatttaaaaatcagcagaattttctaataactactctgagtgcaacaacaagtgaaaaaggagctcaaagagtgctcattaagagtaacaataatttctagggaccttgactttgcatttgaggaaaatcttgtgtaactttattccattatgctcctaatatgctttctaatcccaaattaaaactctaatacaaattcattttgtagaagtcttaaaatcagtcctctttctttttgaaaacattattttagtatttattttaattaattggtttcttaaaaaatcatacactagtcattgacatatgtaatacttcctttaccagagaagactcaaccaatgctgccttaagatttaatgttattccctttttagtcactgtgcatttataagtttgtttactagttgacctttcctgaatagagattagtttcggcatttctccatctgtatataaataacaggtaatatttaatcatcagtgtatgacttgatatcacataacgttctggtgtggtttcctgtagtgatcttagggttttgatttaaaagaaatacacaaaacattaggtacaatttcctttagtttgctaaacacccaaaggatattttgttttgttggttctgcacttaaactgaaatacaacctatgtgaactattgggcaaagcctgcagcctaattaattaaaacctccatttttatttgaatagattcaagtagaaattgccgttaggaatcactgggatcttttcggattttgaccttttcaaaggtagcaataactactccagaggttgtaatctttctgttggtagtggcttttcatcagctaaataatcatctctgcctcaaatgtgttgcctgtcacctagttgatgttccataaaatccctgggttctgaagtgaattattataattaataatcaggagggcgaatcttcagtggcatctgatggaatgaaagaactgtgtctgagcagcctaaaagctgtttgtgacatgccaccttgggaaacaagagtgaggaagaaaacacagtcatcaagtgccagcgtgtgccacccattgtactaggtactttattatgcatttatgtatatgtgtgtgtgtctgtgtatacacacaaacacatatacataagtgtttacacacacacacgcacaatatgtggttaagcctggtaagcctgctaaaatggcaaagcggcctggcgcgtggctcacgcctataatcccagcactttgggaggccaaggtgggcagatcacttgaggtcaggagttcaagatcaggaccaacatggtgaaaccccatctctactaaaaatacaaaaattagccgggcgtggtggcaggtgcctgtaatcccagctacttgagagtctgaagcaggagaattgcttgaacctgggaggcggaggttgcagtgagccgagaccatgccactgcactccagcctgggcaacaaagctagactccatctcaaaaaaaataaaaaataaaatggcgaagcacctgtccatgtgtttggccaaagccgtcctccgaggtcttaagggggccagagtagcagtcctcgttggcgttctaaggcagttgttctggcttccagtcagctctaaaccttaccttctggggactccaggattttctgctcttggcctaatgcaagagaaaggagaatccccagagaaagaagtggggaggtaaagagcgttttctccacttacctttgggttttttatgctcccaagtagaaataaatatcaagaattcacaggttgactgaagcacaagttgcccctgggctctgtgtcaaggctggtggtactgtaggtgttatgagaggacccatagggtgtccttcaggtgagctgttgtccacagcacctttcatatctgctgtaaagggagccctactttctgtctatcccccccaccgccggcccccggaatctaagcagactccctgttggaagcttactctggcacagaagctaggatgtcaccttaaagggtgtgattcaattgaatatagtttagtgcggtaccaggcacatcataagcatgcaataaatgttagccagcttagttataacttttggtaataattaatattatttaactaatttgcattataccacttatttcttccattatggagattctgtctcccttaaactgttaaacttgaagaagaaaccaaacatgataatctggtcaagttaacacattttcgcccatgaattctacctccaacacagccaagctctgatacctcagatataagcaaaaacaagtgaaggaagaacagaaaagccttatggggctttatgagaaggtttttccattgtttagtgtgtttgcaaaaaggaattttatggaagtacctaaccaaagctgtgacagaagggtctccttggtcatgtggcattttccagctttccttggattttatgctacattaatttgccctggctgataaatggtgtttgaagaaatgtgaaattttgttactttgatttttattttaattcaagcttattaaaagcatcaagcattatatgccacactcagcattttcatagacatagtcattaggagaatctggacaaagtaatactcttgtagaaacggaagcatcttgctgtacttgaaagataactggactcagagctacttcactcctcacttgggcaaatgccgatatcactttgcttagctataaagtgccatcagtgggatggatcgtcttcacggtgaaccgtgttacacttctgcaattcctcaagttcatattaattaggaagtggcagagctaggacacaaaattcctaattcctgaagatagttagtctcctaattaagtgcttctcactatattgggatgccttctttaggaataagactttcctttaattttcaagttccacaacttctaaaattattttgctatctcgaagcagcagaatattgatcatttttctcagtttaggctaacacagtccacaccattaccacttaaataaagtaaccgaatgctaaatattatccttatcaaacatccatcactttgttgcttttatgagatgtagattgctaaaaacttttgagctagtagacgttacctttaagcatcaatgaatgcaaacagtgaagacctcaaagaagagttacctcattttctctacatgatctccaatgtagtctcagataaggcccatacatagttaaaagctggtaacagctctgaacagaagtatgtattaaatgtttcaaacttgtatatatttttgaatgcttttgtttttggagtgaatttttaatactctgtgttaaaagaaaaacattccatcttgtaggcagtgttcctcagtaaaaatctttgttgcattttcccatataaatgaatcacccttattaaaacaggaggagggagggatttgtggtgacctaccgctgccctccctttctaagagaagaggaggccatggggtatgataactaaatgaacatctctggaagttcctccgtctgatatgtgtattctgacataacagaatttcccaagacttctttgaggaaggctgtccacgcttcaggcaaagtttacccattattattatgattttgaatattccttgttcattacagtccagaaaatctgcagaagttctccatgttcagtggttgaccagaatctgattgttgcgctcaattaaagtgcttattatttagctaaaacaacttatatggaagttaattatttcaggaaatacataataagaccaaaaaaatcactggataatatgtagatatattttagttccattactattaatagcaattagataactctccctccccccattgaggtgagaatgggctcctagatacttggtggtcaatagaactgatttgattaactttcatttaactgtggttattgttacatctactgattttttcaaataaaaatttctagaaggctcagatttgactaagactgtgttacgtgctttctcacagctgccatatattctcatgtaatctttacaaccgctctacaaggtatgtctaattatttccattttacttattgagaatctaggctcagaggagttaaaattctgaaaatctcaccgataagttggagaatttaagtttgtaagttggagaatgcaggttttctgactccaaatctagtgctcagtccatgagacaaaactgcctcctggaggccatggaagtccattaactttaagaaagttaaacacagttttggtttgtttggcaaatatttcatctctcaagccatactgtgtcacccctccatgtattctcttactaaatgattgctcacttggg

SEQ ID NO: 6196 - protein, 716 aa, Homo sapiens; identical to SEQ ID NO: 847

SEQ ID NO: 6197 - DNA, 1491 bp, Homo sapiens
tattcttcctgttttacctcgccttgacccagaatgaagaaaacatttgcgatggaaaagtgactttgtaatatcaaatgccaaagctactatcattcagtgctacatgaactgtgactttaagaattttggtgaactttgatattttttgtttgtctgaaagaaaggaatgtgtaagtgaaagctgaaagaagaataaccaggatgatgagagctgtggaagctgtatcgtccaaggaattgattatgtaccgtgactgtaacttttttgtaatgctgtttaactctcaatcagactgtgaactggatggtcacgaagtcattccccaactcctagcaagtttgactgaatatatcatgtccacagtagattttcaagaatcatttatagtacttaactttaaagaaacaaggctgcttttaaaaaatgaactaataggcttaaatcaattgcatccatatttgctgtttataggattgctatcagtataccttttgcgtttatagtcaacatgtatcatcctgaaatattctttctggacttataactacttccccctttttcactttaaaacaaacctcaagaataaattactaaccagtcttaaccatcttttataaacatatgctcttataaatgttgtgactagatgcaattaaaaataatagggaatgtggtaggtttttaatttgtacatcctcttatttagtgttaccacataaatgatgagtttgtgtggttctgttttccatttttgttctaactgaaaactttttggctgggcacggtgcctcatgcctgtaatcccagcactttgggagcctgggaggttgaggctgcagtgggccatgattgcacaacttggcctcctaaagtgctgagattacaggtgtgagccactgcatctggcttacttattttgtctattgtctgttccactagtatgtaaagtcttagagagcaagaatttttgtttatttctttctcttcctcctttcctttcttcctcttttacttcgttcactactgtattccacataaaatatatttggcatatagtaggtgttcaatatgttgaaggaatgaaagaatttatagacttgagttgcaatataaaatgtatttttttttactgtgagttatggcaaaaaaagttttgaaagccgcttctaaataatgcagatgtcagtgctttgaccctggaataaaaactgaaatgacttagtgatttcaaaggcatatttgttttcctgaacaatctataaactgtctcattaagttgtctcagttatttgcttcacttcggcaacagaacctcagcctttacatgtgtttaaagcctcttgaggcaaaggatttggaaaatatggttacatggagaatagaagataatgagagagagtatcaattcattagtgcagttgaacccctctattggaatcccatcagcgagcacaagtcccatttcaacagcaataaatgcaacaagt

SEQ ID NO: 6198 - protein, 100 aa, Homo sapiens [sequence omitted]

SEQ ID NO: 6199 - DNA, 1382 bp, Homo sapiens
tattcttcctgttttacctcgccttgacccagaatgaagaaaacatttgcgatggaaaagtgactttgtaatatcaaatgccaaagctactatcattcagtgctacatgaactgtgactttaagaattttggtgaactttgatattttttgtttgtctgaaagaaaggaatgtgtaagtgaaagctgaaagaagaataaccaggatgatgagagctgtggaagctgtatcgtccaaggaattgattatgtaccgtgactgtaacttttttgtaatgctgtttaactctcaatcagactgtgaactggatggtcacgaagtcattccccaactcctagcaagtttgactgaatatatcatgtccacagtagattttcaagaatcatttatagtacttaactttaaagaaacaaggctgcttttaaaaaatgaactaataggcttaaatcaattgcatccatatttgctgtttataggattgctatcagtataccttttgcgtttatagtcaacatgtatcatcctgaaatattctttctggacttataactacttccccctttttcactttaaaacaaacctcaagaataaattactaaccagtcttaaccatcttttataaacatatgctcttataaatgttgtgactagatgcaattaaaaataatagggaatgtggtaggtttttaatttgtacatcctcttatttagtgttaccacataaatgatgagtttgtgtggttctgttttccatttttgttctaactgaaaactttttggctgggcacgccactgcatctggcttacttattttgtctattgtctgttccactagtatgtaaagtcttagagagcaagaatttttgtttatttctttctcttcctcctttcctttcttcctcttttacttcgttcactactgtattccacataaaatatatttggcatatagtaggtgttcaatatgttgaaggaatgaaagaatttatagacttgagttgcaatataaaatgtatttttttttactgtgagttatggcaaaaaaagttttgaaagccgcttctaaataatgcagatgtcagtgctttgaccctggaataaaaactgaaatgacttagtgatttcaaaggcatatttgttttcctgaacaatctataaactgtctcattaagttgtctcagttatttgcttcacttcggcaacagaacctcagcctttacatgtgtttaaagcctcttgaggcaaaggatttggaaaatatggttacatggagaatagaagataatgagagagagtatcaattcattagtgcagttgaacccctctattggaatcccatcagcgagcacaagtcccatttcaacagcaataaatgcaacaagt

SEQ ID NO: 6200 - protein, 100 aa, Homo sapiens [sequence omitted]

SEQ ID NO: 6201 - DNA, 4179 bp, Homo sapiens
ctggagtgttaaaggcacgatcatggctcacggcagcctctacttcatgggctcaagcgatcctcctgcctcagcctcccaagtagctagcctacaggcacatgccaccaagcctgggttttcaaaacaaaaatagagttgcaatcttggcagaactggacaaagagaaaagaaaactacttatgcagaaccagtcttcaacaaatcatcctggagctagcatgctcatgcacattcatctggatacttcatcactcaagactctgcatttgggaaccttattcttcctgttttacctcgccttgacccagaatgaagaaaacatttgcgatggaaaagtgactttgtaatatcaaatgccaaagctactatcattcagtgctacatgaactgtgactttaagaattttggtgaactttgatattttttgtttgtctgaaagaaaggaatgtgtaagtgaaagctgaaagaagaataaccaggatgatgagagctgtggaagctgtatcgtccaaggaattgattatgtaccgtgactgtaacttttttgtaatgctgtttaactctcaatcagactgtgaactggatggtcacgaagtcattccccaactcctagcaagtttgactgaatatatcatgtccacagtagattttcaagaatcatttatagtacttaactttaaagaaacaaggctgcttttaaaaaatgaactaataggcttaaatcaattgcatccatatttgctgtttataggattgctatcagtataccttttgcgtttatagtcaacatgtatcatcctgaaatattctttctggacttataactacttccccctttttcactttaaaacaaacctcaagaataaattactaaccagtcttaaccatcttttataaacatatgctcttataaatgttgtgactagatgcaattaaaaataatagggaatgtggtaggtttttaatttgtacatcctcttatttagtgttaccacataaatgatgagtttgtgtggttctgttttccatttttgttctaactgaaaactttttggctgggcacggtgcctcatgcctgtaatcccagcactttgggaggccaaggcgggcagatcacttgagatcaggagtttgagaccagcctggccaacatggtgaaaccctgtctctactaaaagtataaaaaattagccatgtgtggtggcacacgcctgtaatcccagctactcaggaggctgaggcaggagaatcgcttgaacctgggaggcaggggttgcagtgagctgagacggtgtcactgcactccagcctgggtgacagtgagtctttgtctcaaagaaaaaaagaaaaagaaaacttatgcaagtcgagctcctttttaattaagtaggaagggattaggttaagaaagtctctcaacatgacccatctttagcagtatctggggtgcttatttaagtatgcagtcccactaccctaccctagtcctacagaattagaatctgattcaaaataaagtctgaaaaccatgagatagagaattctatgaaatatcttgtacagattttcgtgatatatttatacacgcatgggtttgtagatccctgaaacttagaggtcatttagctaaaatctacattttttttaacttttaataggattgaaatgatattttacactgtatcacagatacagtattttatataactttttgtaactgaccttatcttggccttgagtcccatcctctctggtggtagcgtaaaactgaaaattccagtttgggtcaatatttagtgaaagttctactttcttttcagagagtttgttcccccctttcttccttagatgttttcaaacacacagccccatcctactcaaaccaagtgaagcaagagtggacaattctagaattggctgtgccatgtaggttttttttagaatttgaactgatttccttcattttgatgaggtggcaactgtccccattgtaatggtcaccattgcagcgaggatagccttacttctgcggcgcagagctcctcagggggcctctggctcctgtccttcctcaggtccatccaactactccttgggcctccttatggtagccctcattgtcttgagttgatttcactaggtttctgttctctgtcatctgcaacataactgacatggttctaaatctgtctctaaggagataacacattagtatattttctacactattgaagcctctacctaatgtatgacttttgtagctcaggtaaagagatctttttaccagtgttatcgtttctagtctgtttgttagtcttcttttaaatagatatggcctaaatcctgtattcctggctaggaagcacttctctccacccctctgctttgagttacaaattcaattcaatttcctatgtatttattaatacctacagataaagtactgtgctttgggggacacaaaggtgactggtacctgctcttttaggaggtcaccgtgcagaggatcctattctggtacaccaatagttataaagcaagccacagcctaggcaacatagtgagacccctgtctctactaaaaaattaaaaaaaaaaaaaaaagattggctaggtgtgctggtgcatgcatagagtcccagccactcgggaggctgaggtgggaggattgcttgagcctgggaggttgaggctgcagtgggccatgattgcacaacttggcaacagagtgagaccctgtctctaaatcaatcaatcaagcgagccagaatgcagtagtggcctgagagaggcatcctggaacgcagtgcggtctggctaggcttagaagtattcatgtgatttttacctgacaagggaaggaagagctgctccacgtgcagagcaaggtttcagaatgagaggagaagagcaggcactgcagagggtgagggaaagggcagcagtggactgggaagccctcaggtggaggtcagcattgcttccctcagatcatgggtgaatttgaggaactcagttaatatctttgtatgttcctccctccataaggtgagaacaagcacatgctctgcccatgtcagaaattgtctagactagtgtttttcaaagtgcaaaagcctcaacccattactgagttgagaagccaacttaatggtttaacaggattgaccagcattttttccgaaaaaatcaaaaacatctgagtgtactgcatatagaaataggtggttttgcctcatgaatattctgtttctgtgtgttcctatattttactttgtattgtgttggttttttaagagacagtcctgctctgtcatccaggctggagtgcagtggtataatcatagctcactgcaagactccttgaatccctgggctcaagcaatcctcaacccttagcctcccaagtagctgagactacaggcacatgccaccatgcccagctaatttttttttttttttaatttttgtagagacagcatcttgctatgttgcccaggctggtcttgaactcttggcctcaagcagtcctctcgatcctcccaccttggcctcctaaagtgctgagattacaggtgtgagccactgcatctggcttacttattttgtctattgtctgttccactagtatgtaaagtcttagagagcaagaatttttgtttatttctttctcttcctcctttcctttcttcctcttttacttcgttcactactgtattccacataaaatatatttggcatatagtaggtgttcaatatgttgaaggaatgaaagaatttatagacttgagttgcaatataaaatgtatttttttttactgtgagttatggcaaaaaaagttttgaaagccgcttctaaataatgcagatgtcagtgctttgaccctggaataaaaactgaaatgacttagtgatttcaaaggcatatttgttttcctgaacaatctataaactgtctcattaagttgtctcagttatttgcttcacttcggcaacagaacctcagcctttacatgtgtttaaagcctcttgaggcaaaggatttggaaaatatggttacatggagaatagaagataatgagagagagtatcaattcattagtgcagttgaacccctctattggaatcccatcagcgagcacaagtcccatttcaacagcaataaatgcaacaagt

SEQ ID NO: 6202 - protein, 82 aa, Homo sapiens
MPPSLGFQNKNRVAILAELDKEKRKLLMQNQSSTNHPGASMLMHIHLDTSSLKTLHLGTLFFLFYLALTQNEENICDGKVTL

SEQ ID NO: 6203 - DNA, 4229 bp, Homo sapiens
gtagtgccgcgagttgagctcctcttgcctaagtggtcgcgccccctttaagagcagcgattgtaaggagaggcggtcccggtgtcctcgggtcccaggtgattgtgaagtgctgaccaattgccactggacatacttgaaacaaaataggaaaatggcagcaaactcttcaggacaagcattgcactctcgagaccctctcttaataaggacttccgggatcacgctgagcagcagcatattgcagcccaacagaaggcagctttgcagcatgctcatgcacattcatctggatacttcatcactcaagactctgcatttgggaaccttattcttcctgttttacctcgccttgacccagaatgaagaaaacatttgcgatggaaaagtgactttgtaatatcaaatgccaaagctactatcattcagtgctacatgaactgtgactttaagaattttggtgaactttgatattttttgtttgtctgaaagaaaggaatgtgtaagtgaaagctgaaagaagaataaccaggatgatgagagctgtggaagctgtatcgtccaaggaattgattatgtaccgtgactgtaacttttttgtaatgctgtttaactctcaatcagactgtgaactggatggtcacgaagtcattccccaactcctagcaagtttgactgaatatatcatgtccacagtagattttcaagaatcatttatagtacttaactttaaagaaacaaggctgcttttaaaaaatgaactaataggcttaaatcaattgcatccatatttgctgtttataggattgctatcagtataccttttgcgtttatagtcaacatgtatcatcctgaaatattctttctggacttataactacttccccctttttcactttaaaacaaacctcaagaataaattactaaccagtcttaaccatcttttataaacatatgctcttataaatgttgtgactagatgcaattaaaaataatagggaatgtggtaggtttttaatttgtacatcctcttatttagtgttaccacataaatgatgagtttgtgtggttctgttttccatttttgttctaactgaaaactttttggctgggcacggtgcctcatgcctgtaatcccagcactttgggaggccaaggcgggcagatcacttgagatcaggagtttgagaccagcctggccaacatggtgaaaccctgtctctactaaaagtataaaaaattagccatgtgtggtggcacacgcctgtaatcccagctactcaggaggctgaggcaggagaatcgcttgaacctgggaggcaggggttgcagtgagctgagacggtgtcactgcactccagcctgggtgacagtgagtctttgtctcaaagaaaaaaagaaaaagaaaacttatgcaagtcgagctcctttttaattaagtaggaagggattaggttaagaaagtctctcaacatgacccatctttagcagtatctggggtgcttatttaagtatgcagtcccactaccctaccctagtcctacagaattagaatctgattcaaaataaagtctgaaaaccatgagatagagaattctatgaaatatcttgtacagattttcgtgatatatttatacacgcatgggtttgtagatccctgaaacttagaggtcatttagctaaaatctacattttttttaacttttaataggattgaaatgatattttacactgtatcacagatacagtattttatataactttttgtaactgaccttatcttggccttgagtcccatcctctctggtggtagcgtaaaactgaaaattccagtttgggtcaatatttagtgaaagttctactttcttttcagagagtttgttcccccctttcttccttagatgttttcaaacacacagccccatcctactcaaaccaagtgaagcaagagtggacaattctagaattggctgtgccatgtaggttttttttagaatttgaactgatttccttcattttgatgaggtggcaactgtccccattgtaatggtcaccattgcagcgaggatagccttacttctgcggcgcagagctcctcagggggcctctggctcctgtccttcctcaggtccatccaactactccttgggcctccttatggtagccctcattgtcttgagttgatttcactaggtttctgttctctgtcatctgcaacataactgacatggttctaaatctgtctctaaggagataacacattagtatattttctacactattgaagcctctacctaatgtatgacttttgtagctcaggtaaagagatctttttaccagtgttatcgtttctagtctgtttgttagtcttcttttaaatagatatggcctaaatcctgtattcctggctaggaagcacttctctccacccctctgctttgagttacaaattcaattcaatttcctatgtatttattaatacctacagataaagtactgtgctttgggggacacaaaggtgactggtacctgctcttttaggaggtcaccgtgcagaggatcctattctggtacaccaatagttataaagcaagccacagcctaggcaacatagtgagacccctgtctctactaaaaaattaaaaaaaaaaaaaaaagattggctaggtgtgctggtgcatgcatagagtcccagccactcgggaggctgaggtgggaggattgcttgagcctgggaggttgaggctgcagtgggccatgattgcacaacttggcaacagagtgagaccctgtctctaaatcaatcaatcaagcgagccagaatgcagtagtggcctgagagaggcatcctggaacgcagtgcggtctggctaggcttagaagtattcatgtgatttttacctgacaagggaaggaagagctgctccacgtgcagagcaaggtttcagaatgagaggagaagagcaggcactgcagagggtgagggaaagggcagcagtggactgggaagccctcaggtggaggtcagcattgcttccctcagatcatgggtgaatttgaggaactcagttaatatctttgtatgttcctccctccataaggtgagaacaagcacatgctctgcccatgtcagaaattgtctagactagtgtttttcaaagtgcaaaagcctcaacccattactgagttgagaagccaacttaatggtttaacaggattgaccagcattttttccgaaaaaatcaaaaacatctgagtgtactgcatatagaaataggtggttttgcctcatgaatattctgtttctgtgtgttcctatattttactttgtattgtgttggttttttaagagacagtcctgctctgtcatccaggctggagtgcagtggtataatcatagctcactgcaagactccttgaatccctgggctcaagcaatcctcaacccttagcctcccaagtagctgagactacaggcacatgccaccatgcccagctaatttttttttttttttaatttttgtagagacagcatcttgctatgttgcccaggctggtcttgaactcttggcctcaagcagtcctctcgatcctcccaccttggcctcctaaagtgctgagattacaggtgtgagccactgcatctggcttacttattttgtctattgtctgttccactagtatgtaaagtcttagagagcaagaatttttgtttatttctttctcttcctcctttcctttcttcctcttttacttcgttcactactgtattccacataaaatatatttggcatatagtaggtgttcaatatgttgaaggaatgaaagaatttatagacttgagttgcaatataaaatgtatttttttttactgtgagttatggcaaaaaaagttttgaaagccgcttctaaataatgcagatgtcagtgctttgaccctggaataaaaactgaaatgacttagtgatttcaaaggcatatttgttttcctgaacaatctataaactgtctcattaagttgtctcagttatttgcttcacttcggcaacagaacctcagcctttacatgtgtttaaagcctcttgaggcaaaggatttggaaaatatggttacatggagaatagaagataatgagagagagtatcaattcattagtgcagttgaacccctctattggaatcccatcagcgagcacaagtcccatttcaacagcaataaatgcaacaagt

SEQ ID NO: 6204 - protein, 81 aa, Homo sapiens
MAANSSGQALHSRDPLLIRTSGITLSSSILQPNRRQLCSMLMHIHLDTSSLKTLHLGTLFFLFYLALTQNEENICDGKVTL

SEQ ID NO: 6205 - DNA, 4336 bp, Homo sapiens
ttgtagtgccgcgagttgagctcctcttgcctaagtggtcgcgccccctttaagagcagcgattgtaaggagaggcggtcccggtgtcctcgggtcccaggtgattgtgaagtgctgaccaattgccactggacatacttgaaacaaaataggaaaatggcagcaaactcttcaggacaagacaaggtctcgctgtgttgcccaggctgatcttgaactcctggcctcaggtgatcctcctgcctcaacttcccaaagcactaggattacaaatgttttcaaaacaaaaatagagttgcaatcttggcagaactggacaaagagaaaagaaaactacttatgcagaaccagtcttcaacaaatcatcctggagctagcatgctcatgcacattcatctggatacttcatcactcaagactctgcatttgggaaccttattcttcctgttttacctcgccttgacccagaatgaagaaaacatttgcgatggaaaagtgactttgtaatatcaaatgccaaagctactatcattcagtgctacatgaactgtgactttaagaattttggtgaactttgatattttttgtttgtctgaaagaaaggaatgtgtaagtgaaagctgaaagaagaataaccaggatgatgagagctgtggaagctgtatcgtccaaggaattgattatgtaccgtgactgtaacttttttgtaatgctgtttaactctcaatcagactgtgaactggatggtcacgaagtcattccccaactcctagcaagtttgactgaatatatcatgtccacagtagattttcaagaatcatttatagtacttaactttaaagaaacaaggctgcttttaaaaaatgaactaataggcttaaatcaattgcatccatatttgctgtttataggattgctatcagtataccttttgcgtttatagtcaacatgtatcatcctgaaatattctttctggacttataactacttccccctttttcactttaaaacaaacctcaagaataaattactaaccagtcttaaccatcttttataaacatatgctcttataaatgttgtgactagatgcaattaaaaataatagggaatgtggtaggtttttaatttgtacatcctcttatttagtgttaccacataaatgatgagtttgtgtggttctgttttccatttttgttctaactgaaaactttttggctgggcacggtgcctcatgcctgtaatcccagcactttgggaggccaaggcgggcagatcacttgagatcaggagtttgagaccagcctggccaacatggtgaaaccctgtctctactaaaagtataaaaaattagccatgtgtggtggcacacgcctgtaatcccagctactcaggaggctgaggcaggagaatcgcttgaacctgggaggcaggggttgcagtgagctgagacggtgtcactgcactccagcctgggtgacagtgagtctttgtctcaaagaaaaaaagaaaaagaaaacttatgcaagtcgagctcctttttaattaagtaggaagggattaggttaagaaagtctctcaacatgacccatctttagcagtatctggggtgcttatttaagtatgcagtcccactaccctaccctagtcctacagaattagaatctgattcaaaataaagtctgaaaaccatgagatagagaattctatgaaatatcttgtacagattttcgtgatatatttatacacgcatgggtttgtagatccctgaaacttagaggtcatttagctaaaatctacattttttttaacttttaataggattgaaatgatattttacactgtatcacagatacagtattttatataactttttgtaactgaccttatcttggccttgagtcccatcctctctggtggtagcgtaaaactgaaaattccagtttgggtcaatatttagtgaaagttctactttcttttcagagagtttgttcccccctttcttccttagatgttttcaaacacacagccccatcctactcaaaccaagtgaagcaagagtggacaattctagaattggctgtgccatgtaggttttttttagaatttgaactgatttccttcattttgatgaggtggcaactgtccccattgtaatggtcaccattgcagcgaggatagccttacttctgcggcgcagagctcctcagggggcctctggctcctgtccttcctcaggtccatccaactactccttgggcctccttatggtagccctcattgtcttgagttgatttcactaggtttctgttctctgtcatctgcaacataactgacatggttctaaatctgtctctaaggagataacacattagtatattttctacactattgaagcctctacctaatgtatgacttttgtagctcaggtaaagagatctttttaccagtgttatcgtttctagtctgtttgttagtcttcttttaaatagatatggcctaaatcctgtattcctggctaggaagcacttctctccacccctctgctttgagttacaaattcaattcaatttcctatgtatttattaatacctacagataaagtactgtgctttgggggacacaaaggtgactggtacctgctcttttaggaggtcaccgtgcagaggatcctattctggtacaccaatagttataaagcaagccacagcctaggcaacatagtgagacccctgtctctactaaaaaattaaaaaaaaaaaaaaaagattggctaggtgtgctggtgcatgcatagagtcccagccactcgggaggctgaggtgggaggattgcttgagcctgggaggttgaggctgcagtgggccatgattgcacaacttggcaacagagtgagaccctgtctctaaatcaatcaatcaagcgagccagaatgcagtagtggcctgagagaggcatcctggaacgcagtgcggtctggctaggcttagaagtattcatgtgatttttacctgacaagggaaggaagagctgctccacgtgcagagcaaggtttcagaatgagaggagaagagcaggcactgcagagggtgagggaaagggcagcagtggactgggaagccctcaggtggaggtcagcattgcttccctcagatcatgggtgaatttgaggaactcagttaatatctttgtatgttcctccctccataaggtgagaacaagcacatgctctgcccatgtcagaaattgtctagactagtgtttttcaaagtgcaaaagcctcaacccattactgagttgagaagccaacttaatggtttaacaggattgaccagcattttttccgaaaaaatcaaaaacatctgagtgtactgcatatagaaataggtggttttgcctcatgaatattctgtttctgtgtgttcctatattttactttgtattgtgttggttttttaagagacagtcctgctctgtcatccaggctggagtgcagtggtataatcatagctcactgcaagactccttgaatccctgggctcaagcaatcctcaacccttagcctcccaagtagctgagactacaggcacatgccaccatgcccagctaatttttttttttttttaatttttgtagagacagcatcttgctatgttgcccaggctggtcttgaactcttggcctcaagcagtcctctcgatcctcccaccttggcctcctaaagtgctgagattacaggtgtgagccactgcatctggcttacttattttgtctattgtctgttccactagtatgtaaagtcttagagagcaagaatttttgtttatttctttctcttcctcctttcctttcttcctcttttacttcgttcactactgtattccacataaaatatatttggcatatagtaggtgttcaatatgttgaaggaatgaaagaatttatagacttgagttgcaatataaaatgtatttttttttactgtgagttatggcaaaaaaagttttgaaagccgcttctaaataatgcagatgtcagtgctttgaccctggaataaaaactgaaatgacttagtgatttcaaaggcatatttgttttcctgaacaatctataaactgtctcattaagttgtctcagttatttgcttcacttcggcaacagaacctcagcctttacatgtgtttaaagcctcttgaggcaaaggatttggaaaatatggttacatggagaatagaagataatgagagagagtatcaattcattagtgcagttgaacccctctattggaatcccatcagcgagcacaagtcccatttcaacagcaataaatgcaacaagt

SEQ ID NO: 6206 - protein, 55 aa, Homo sapiens
MQNQSSTNHPGASMLMHIHLDTSSLKTLHLGTLFFLFYLALTQNEENICDGKVTL

SEQ ID NO: 6207 - DNA, 4398 bp, Homo sapiens
gcgggggcgggaaggttgtagtgccgcgagttgagctcctcttgcctaagtggtcgcgccccctttaagagcagcgattgtaaggagaggcggtcccggtgtcctcgggtcccaggtgattgtgaagtgctgaccaattgccactggacatacttgaaacaaaataggaaaatggcagcaaactcttcaggacaagacaaggtctcgctgtgttgcccaggctgatcttgaactcctggcctcaggttttcaaaacaaaaatagagttgcaatcttggcagaactggacaaagagaaaagaaaactacttatgcagaaccagtcttcaacaaatcatcctggagctagcattgcactctcgagaccctctcttaataaggacttccgggatcacgctgagcagcagcatattgcagcccaacagaaggcagctttgcagcatgctcatgcacattcatctggatacttcatcactcaagactctgcatttgggaaccttattcttcctgttttacctcgccttgacccagaatgaagaaaacatttgcgatggaaaagtgactttgtaatatcaaatgccaaagctactatcattcagtgctacatgaactgtgactttaagaattttggtgaactttgatattttttgtttgtctgaaagaaaggaatgtgtaagtgaaagctgaaagaagaataaccaggatgatgagagctgtggaagctgtatcgtccaaggaattgattatgtaccgtgactgtaacttttttgtaatgctgtttaactctcaatcagactgtgaactggatggtcacgaagtcattccccaactcctagcaagtttgactgaatatatcatgtccacagtagattttcaagaatcatttatagtacttaactttaaagaaacaaggctgcttttaaaaaatgaactaataggcttaaatcaattgcatccatatttgctgtttataggattgctatcagtataccttttgcgtttatagtcaacatgtatcatcctgaaatattctttctggacttataactacttccccctttttcactttaaaacaaacctcaagaataaattactaaccagtcttaaccatcttttataaacatatgctcttataaatgttgtgactagatgcaattaaaaataatagggaatgtggtaggtttttaatttgtacatcctcttatttagtgttaccacataaatgatgagtttgtgtggttctgttttccatttttgttctaactgaaaactttttggctgggcacggtgcctcatgcctgtaatcccagcactttgggaggccaaggcgggcagatcacttgagatcaggagtttgagaccagcctggccaacatggtgaaaccctgtctctactaaaagtataaaaaattagccatgtgtggtggcacacgcctgtaatcccagctactcaggaggctgaggcaggagaatcgcttgaacctgggaggcaggggttgcagtgagctgagacggtgtcactgcactccagcctgggtgacagtgagtctttgtctcaaagaaaaaaagaaaaagaaaacttatgcaagtcgagctcctttttaattaagtaggaagggattaggttaagaaagtctctcaacatgacccatctttagcagtatctggggtgcttatttaagtatgcagtcccactaccctaccctagtcctacagaattagaatctgattcaaaataaagtctgaaaaccatgagatagagaattctatgaaatatcttgtacagattttcgtgatatatttatacacgcatgggtttgtagatccctgaaacttagaggtcatttagctaaaatctacattttttttaacttttaataggattgaaatgatattttacactgtatcacagatacagtattttatataactttttgtaactgaccttatcttggccttgagtcccatcctctctggtggtagcgtaaaactgaaaattccagtttgggtcaatatttagtgaaagttctactttcttttcagagagtttgttcccccctttcttccttagatgttttcaaacacacagccccatcctactcaaaccaagtgaagcaagagtggacaattctagaattggctgtgccatgtaggttttttttagaatttgaactgatttccttcattttgatgaggtggcaactgtccccattgtaatggtcaccattgcagcgaggatagccttacttctgcggcgcagagctcctcagggggcctctggctcctgtccttcctcaggtccatccaactactccttgggcctccttatggtagccctcattgtcttgagttgatttcactaggtttctgttctctgtcatctgcaacataactgacatggttctaaatctgtctctaaggagataacacattagtatattttctacactattgaagcctctacctaatgtatgacttttgtagctcaggtaaagagatctttttaccagtgttatcgtttctagtctgtttgttagtcttcttttaaatagatatggcctaaatcctgtattcctggctaggaagcacttctctccacccctctgctttgagttacaaattcaattcaatttcctatgtatttattaatacctacagataaagtactgtgctttgggggacacaaaggtgactggtacctgctcttttaggaggtcaccgtgcagaggatcctattctggtacaccaatagttataaagcaagccacagcctaggcaacatagtgagacccctgtctctactaaaaaattaaaaaaaaaaaaaaaagattggctaggtgtgctggtgcatgcatagagtcccagccactcgggaggctgaggtgggaggattgcttgagcctgggaggttgaggctgcagtgggccatgattgcacaacttggcaacagagtgagaccctgtctctaaatcaatcaatcaagcgagccagaatgcagtagtggcctgagagaggcatcctggaacgcagtgcggtctggctaggcttagaagtattcatgtgatttttacctgacaagggaaggaagagctgctccacgtgcagagcaaggtttcagaatgagaggagaagagcaggcactgcagagggtgagggaaagggcagcagtggactgggaagccctcaggtggaggtcagcattgcttccctcagatcatgggtgaatttgaggaactcagttaatatctttgtatgttcctccctccataaggtgagaacaagcacatgctctgcccatgtcagaaattgtctagactagtgtttttcaaagtgcaaaagcctcaacccattactgagttgagaagccaacttaatggtttaacaggattgaccagcattttttccgaaaaaatcaaaaacatctgagtgtactgcatatagaaataggtggttttgcctcatgaatattctgtttctgtgtgttcctatattttactttgtattgtgttggttttttaagagacagtcctgctctgtcatccaggctggagtgcagtggtataatcatagctcactgcaagactccttgaatccctgggctcaagcaatcctcaacccttagcctcccaagtagctgagactacaggcacatgccaccatgcccagctaatttttttttttttttaatttttgtagagacagcatcttgctatgttgcccaggctggtcttgaactcttggcctcaagcagtcctctcgatcctcccaccttggcctcctaaagtgctgagattacaggtgtgagccactgcatctggcttacttattttgtctattgtctgttccactagtatgtaaagtcttagagagcaagaatttttgtttatttctttctcttcctcctttcctttcttcctcttttacttcgttcactactgtattccacataaaatatatttggcatatagtaggtgttcaatatgttgaaggaatgaaagaatttatagacttgagttgcaatataaaatgtatttttttttactgtgagttatggcaaaaaaagttttgaaagccgcttctaaataatgcagatgtcagtgctttgaccctggaataaaaactgaaatgacttagtgatttcaaaggcatatttgttttcctgaacaatctataaactgtctcattaagttgtctcagttatttgcttcacttcggcaacagaacctcagcctttacatgtgtttaaagcctcttgaggcaaaggatttggaaaatatggttacatggagaatagaagataatgagagagagtatcaattcattagtgcagttgaacccctctattggaatcccatcagcgagcacaagtcccatttcaacagcaataaatgcaacaagt

SEQ ID NO: 6208 - protein, 74 aa, Homo sapiens
MQNQSSTNHPGASIALSRPSLNKDFRDHAEQQHIAAQQKAALQHAHAHSSGYFITQDSAFGNLILPVLPRLDPE

SEQ ID NO: 6209 - DNA, 4183 bp, Homo sapiens
agcgcagcgggggcgggaaggttgtagtgccgcgagttgagctcctcttgcctaagtggtcgcgccccctttaagagcagcgattgtaaggagaggcggtcccggtgtcctcgggtcccaggttttcaaaacaaaaatagagttgcaatcttggcagaactggacaaagagaaaagaaaactacttatgcagaaccagtcttcaacaaatcatcctggagctagcatgctcatgcacattcatctggatacttcatcactcaagactctgcatttgggaaccttattcttcctgttttacctcgccttgacccagaatgaagaaaacatttgcgatggaaaagtgactttgtaatatcaaatgccaaagctactatcattcagtgctacatgaactgtgactttaagaattttggtgaactttgatattttttgtttgtctgaaagaaaggaatgtgtaagtgaaagctgaaagaagaataaccaggatgatgagagctgtggaagctgtatcgtccaaggaattgattatgtaccgtgactgtaacttttttgtaatgctgtttaactctcaatcagactgtgaactggatggtcacgaagtcattccccaactcctagcaagtttgactgaatatatcatgtccacagtagattttcaagaatcatttatagtacttaactttaaagaaacaaggctgcttttaaaaaatgaactaataggcttaaatcaattgcatccatatttgctgtttataggattgctatcagtataccttttgcgtttatagtcaacatgtatcatcctgaaatattctttctggacttataactacttccccctttttcactttaaaacaaacctcaagaataaattactaaccagtcttaaccatcttttataaacatatgctcttataaatgttgtgactagatgcaattaaaaataatagggaatgtggtaggtttttaatttgtacatcctcttatttagtgttaccacataaatgatgagtttgtgtggttctgttttccatttttgttctaactgaaaactttttggctgggcacggtgcctcatgcctgtaatcccagcactttgggaggccaaggcgggcagatcacttgagatcaggagtttgagaccagcctggccaacatggtgaaaccctgtctctactaaaagtataaaaaattagccatgtgtggtggcacacgcctgtaatcccagctactcaggaggctgaggcaggagaatcgcttgaacctgggaggcaggggttgcagtgagctgagacggtgtcactgcactccagcctgggtgacagtgagtctttgtctcaaagaaaaaaagaaaaagaaaacttatgcaagtcgagctcctttttaattaagtaggaagggattaggttaagaaagtctctcaacatgacccatctttagcagtatctggggtgcttatttaagtatgcagtcccactaccctaccctagtcctacagaattagaatctgattcaaaataaagtctgaaaaccatgagatagagaattctatgaaatatcttgtacagattttcgtgatatatttatacacgcatgggtttgtagatccctgaaacttagaggtcatttagctaaaatctacattttttttaacttttaataggattgaaatgatattttacactgtatcacagatacagtattttatataactttttgtaactgaccttatcttggccttgagtcccatcctctctggtggtagcgtaaaactgaaaattccagtttgggtcaatatttagtgaaagttctactttcttttcagagagtttgttcccccctttcttccttagatgttttcaaacacacagccccatcctactcaaaccaagtgaagcaagagtggacaattctagaattggctgtgccatgtaggttttttttagaatttgaactgatttccttcattttgatgaggtggcaactgtccccattgtaatggtcaccattgcagcgaggatagccttacttctgcggcgcagagctcctcagggggcctctggctcctgtccttcctcaggtccatccaactactccttgggcctccttatggtagccctcattgtcttgagttgatttcactaggtttctgttctctgtcatctgcaacataactgacatggttctaaatctgtctctaaggagataacacattagtatattttctacactattgaagcctctacctaatgtatgacttttgtagctcaggtaaagagatctttttaccagtgttatcgtttctagtctgtttgttagtcttcttttaaatagatatggcctaaatcctgtattcctggctaggaagcacttctctccacccctctgctttgagttacaaattcaattcaatttcctatgtatttattaatacctacagataaagtactgtgctttgggggacacaaaggtgactggtacctgctcttttaggaggtcaccgtgcagaggatcctattctggtacaccaatagttataaagcaagccacagcctaggcaacatagtgagacccctgtctctactaaaaaattaaaaaaaaaaaaaaaagattggctaggtgtgctggtgcatgcatagagtcccagccactcgggaggctgaggtgggaggattgcttgagcctgggaggttgaggctgcagtgggccatgattgcacaacttggcaacagagtgagaccctgtctctaaatcaatcaatcaagcgagccagaatgcagtagtggcctgagagaggcatcctggaacgcagtgcggtctggctaggcttagaagtattcatgtgatttttacctgacaagggaaggaagagctgctccacgtgcagagcaaggtttcagaatgagaggagaagagcaggcactgcagagggtgagggaaagggcagcagtggactgggaagccctcaggtggaggtcagcattgcttccctcagatcatgggtgaatttgaggaactcagttaatatctttgtatgttcctccctccataaggtgagaacaagcacatgctctgcccatgtcagaaattgtctagactagtgtttttcaaagtgcaaaagcctcaacccattactgagttgagaagccaacttaatggtttaacaggattgaccagcattttttccgaaaaaatcaaaaacatctgagtgtactgcatatagaaataggtggttttgcctcatgaatattctgtttctgtgtgttcctatattttactttgtattgtgttggttttttaagagacagtcctgctctgtcatccaggctggagtgcagtggtataatcatagctcactgcaagactccttgaatccctgggctcaagcaatcctcaacccttagcctcccaagtagctgagactacaggcacatgccaccatgcccagctaatttttttttttttttaatttttgtagagacagcatcttgctatgttgcccaggctggtcttgaactcttggcctcaagcagtcctctcgatcctcccaccttggcctcctaaagtgctgagattacaggtgtgagccactgcatctggcttacttattttgtctattgtctgttccactagtatgtaaagtcttagagagcaagaatttttgtttatttctttctcttcctcctttcctttcttcctcttttacttcgttcactactgtattccacataaaatatatttggcatatagtaggtgttcaatatgttgaaggaatgaaagaatttatagacttgagttgcaatataaaatgtatttttttttactgtgagttatggcaaaaaaagttttgaaagccgcttctaaataatgcagatgtcagtgctttgaccctggaataaaaactgaaatgacttagtgatttcaaaggcatatttgttttcctgaacaatctataaactgtctcattaagttgtctcagttatttgcttcacttcggcaacagaacctcagcctttacatgtgtttaaagcctcttgaggcaaaggatttggaaaatatggttacatggagaatagaagataatgagagagagtatcaattcattagtgcagttgaacccctctattggaatcccatcagcgagcacaagtcccatttcaacagcaataaatgcaacaagt

SEQ ID NO: 6210 - protein, 55 aa, Homo sapiens; identical to SEQ ID NO: 6206

SEQ ID NO: 6211 - DNA, 4458 bp, Homo sapiens
aggaggcggaagcgcagcgggggcgggaaggttgtagtgccgcgagttgagctcctcttgcctaagtggtcgcgccccctttaagagcagcgattgtaaggagaggcggtcccggtgtcctcgggtcccaggtgattgtgaagtgctgaccaattgccactggacatacttgaaacaaaataggaaaatggcagcaaactcttcaggacaagacaaggtctcgctgtgttgcccaggctgatcttgaactcctggcctcaggtgatcctcctgcctcaacttcccaaagcactaggattacaaatgttttcaaaacaaaaatagagttgcaatcttggcagaactggacaaagagaaaagaaaactacttatgcagaaccagtcttcaacaaatcatcctggagctagcattgcactctcgagaccctctcttaataaggacttccgggatcacgctgagcagcagcatattgcagcccaacagaaggcagctttgcagcatgctcatgcacattcatctggatacttcatcactcaagactctgcatttgggaaccttattcttcctgttttacctcgccttgacccagaatgaagaaaacatttgcgatggaaaagtgactttgtaatatcaaatgccaaagctactatcattcagtgctacatgaactgtgactttaagaattttggtgaactttgatattttttgtttgtctgaaagaaaggaatgtgtaagtgaaagctgaaagaagaataaccaggatgatgagagctgtggaagctgtatcgtccaaggaattgattatgtaccgtgactgtaacttttttgtaatgctgtttaactctcaatcagactgtgaactggatggtcacgaagtcattccccaactcctagcaagtttgactgaatatatcatgtccacagtagattttcaagaatcatttatagtacttaactttaaagaaacaaggctgcttttaaaaaatgaactaataggcttaaatcaattgcatccatatttgctgtttataggattgctatcagtataccttttgcgtttatagtcaacatgtatcatcctgaaatattctttctggacttataactacttccccctttttcactttaaaacaaacctcaagaataaattactaaccagtcttaaccatcttttataaacatatgctcttataaatgttgtgactagatgcaattaaaaataatagggaatgtggtaggtttttaatttgtacatcctcttatttagtgttaccacataaatgatgagtttgtgtggttctgttttccatttttgttctaactgaaaactttttggctgggcacggtgcctcatgcctgtaatcccagcactttgggaggccaaggcgggcagatcacttgagatcaggagtttgagaccagcctggccaacatggtgaaaccctgtctctactaaaagtataaaaaattagccatgtgtggtggcacacgcctgtaatcccagctactcaggaggctgaggcaggagaatcgcttgaacctgggaggcaggggttgcagtgagctgagacggtgtcactgcactccagcctgggtgacagtgagtctttgtctcaaagaaaaaaagaaaaagaaaacttatgcaagtcgagctcctttttaattaagtaggaagggattaggttaagaaagtctctcaacatgacccatctttagcagtatctggggtgcttatttaagtatgcagtcccactaccctaccctagtcctacagaattagaatctgattcaaaataaagtctgaaaaccatgagatagagaattctatgaaatatcttgtacagattttcgtgatatatttatacacgcatgggtttgtagatccctgaaacttagaggtcatttagctaaaatctacattttttttaacttttaataggattgaaatgatattttacactgtatcacagatacagtattttatataactttttgtaactgaccttatcttggccttgagtcccatcctctctggtggtagcgtaaaactgaaaattccagtttgggtcaatatttagtgaaagttctactttcttttcagagagtttgttcccccctttcttccttagatgttttcaaacacacagccccatcctactcaaaccaagtgaagcaagagtggacaattctagaattggctgtgccatgtaggttttttttagaatttgaactgatttccttcattttgatgaggtggcaactgtccccattgtaatggtcaccattgcagcgaggatagccttacttctgcggcgcagagctcctcagggggcctctggctcctgtccttcctcaggtccatccaactactccttgggcctccttatggtagccctcattgtcttgagttgatttcactaggtttctgttctctgtcatctgcaacataactgacatggttctaaatctgtctctaaggagataacacattagtatattttctacactattgaagcctctacctaatgtatgacttttgtagctcaggtaaagagatctttttaccagtgttatcgtttctagtctgtttgttagtcttcttttaaatagatatggcctaaatcctgtattcctggctaggaagcacttctctccacccctctgctttgagttacaaattcaattcaatttcctatgtatttattaatacctacagataaagtactgtgctttgggggacacaaaggtgactggtacctgctcttttaggaggtcaccgtgcagaggatcctattctggtacaccaatagttataaagcaagccacagcctaggcaacatagtgagacccctgtctctactaaaaaattaaaaaaaaaaaaaaaagattggctaggtgtgctggtgcatgcatagagtcccagccactcgggaggctgaggtgggaggattgcttgagcctgggaggttgaggctgcagtgggccatgattgcacaacttggcaacagagtgagaccctgtctctaaatcaatcaatcaagcgagccagaatgcagtagtggcctgagagaggcatcctggaacgcagtgcggtctggctaggcttagaagtattcatgtgatttttacctgacaagggaaggaagagctgctccacgtgcagagcaaggtttcagaatgagaggagaagagcaggcactgcagagggtgagggaaagggcagcagtggactgggaagccctcaggtggaggtcagcattgcttccctcagatcatgggtgaatttgaggaactcagttaatatctttgtatgttcctccctccataaggtgagaacaagcacatgctctgcccatgtcagaaattgtctagactagtgtttttcaaagtgcaaaagcctcaacccattactgagttgagaagccaacttaatggtttaacaggattgaccagcattttttccgaaaaaatcaaaaacatctgagtgtactgcatatagaaataggtggttttgcctcatgaatattctgtttctgtgtgttcctatattttactttgtattgtgttggttttttaagagacagtcctgctctgtcatccaggctggagtgcagtggtataatcatagctcactgcaagactccttgaatccctgggctcaagcaatcctcaacccttagcctcccaagtagctgagactacaggcacatgccaccatgcccagctaatttttttttttttttaatttttgtagagacagcatcttgctatgttgcccaggctggtcttgaactcttggcctcaagcagtcctctcgatcctcccaccttggcctcctaaagtgctgagattacaggtgtgagccactgcatctggcttacttattttgtctattgtctgttccactagtatgtaaagtcttagagagcaagaatttttgtttatttctttctcttcctcctttcctttcttcctcttttacttcgttcactactgtattccacataaaatatatttggcatatagtaggtgttcaatatgttgaaggaatgaaagaatttatagacttgagttgcaatataaaatgtatttttttttactgtgagttatggcaaaaaaagttttgaaagccgcttctaaataatgcagatgtcagtgctttgaccctggaataaaaactgaaatgacttagtgatttcaaaggcatatttgttttcctgaacaatctataaactgtctcattaagttgtctcagttatttgcttcacttcggcaacagaacctcagcctttacatgtgtttaaagcctcttgaggcaaaggatttggaaaatatggttacatggagaatagaagataatgagagagagtatcaattcattagtgcagttgaacccctctattggaatcccatcagcgagcacaagtcccatttcaacagcaataaatgcaacaagt

SEQ ID NO: 6212 - protein, 74 aa, Homo sapiens; identical to SEQ ID NO: 6208

SEQ ID NO: 6213 - DNA, 4295 bp, Homo sapiens
tccctggggcgcacgtcagtcaggaggcggaagcgcagcgggggcgggaaggttgtagtgccgcgagttgagctcctcttgcctaagtggtcgcgccccctttaagagcagcgattgtaaggagaggcggtcccggtgtcctcgggtcccaggtgattgtgaagtgctgaccaattgccactggacatacttgaaacaaaataggaaaatggcagcaaactcttcaggacaaggttttcaaaacaaaaatagagttgcaatcttggcagaactggacaaagagaaaagaaaactacttatgcagaaccagtcttcaacaaatcatcctggagctagcatgctcatgcacattcatctggatacttcatcactcaagactctgcatttgggaaccttattcttcctgttttacctcgccttgacccagaatgaagaaaacatttgcgatggaaaagtgactttgtaatatcaaatgccaaagctactatcattcagtgctacatgaactgtgactttaagaattttggtgaactttgatattttttgtttgtctgaaagaaaggaatgtgtaagtgaaagctgaaagaagaataaccaggatgatgagagctgtggaagctgtatcgtccaaggaattgattatgtaccgtgactgtaacttttttgtaatgctgtttaactctcaatcagactgtgaactggatggtcacgaagtcattccccaactcctagcaagtttgactgaatatatcatgtccacagtagattttcaagaatcatttatagtacttaactttaaagaaacaaggctgcttttaaaaaatgaactaataggcttaaatcaattgcatccatatttgctgtttataggattgctatcagtataccttttgcgtttatagtcaacatgtatcatcctgaaatattctttctggacttataactacttccccctttttcactttaaaacaaacctcaagaataaattactaaccagtcttaaccatcttttataaacatatgctcttataaatgttgtgactagatgcaattaaaaataatagggaatgtggtaggtttttaatttgtacatcctcttatttagtgttaccacataaatgatgagtttgtgtggttctgttttccatttttgttctaactgaaaactttttggctgggcacggtgcctcatgcctgtaatcccagcactttgggaggccaaggcgggcagatcacttgagatcaggagtttgagaccagcctggccaacatggtgaaaccctgtctctactaaaagtataaaaaattagccatgtgtggtggcacacgcctgtaatcccagctactcaggaggctgaggcaggagaatcgcttgaacctgggaggcaggggttgcagtgagctgagacggtgtcactgcactccagcctgggtgacagtgagtctttgtctcaaagaaaaaaagaaaaagaaaacttatgcaagtcgagctcctttttaattaagtaggaagggattaggttaagaaagtctctcaacatgacccatctttagcagtatctggggtgcttatttaagtatgcagtcccactaccctaccctagtcctacagaattagaatctgattcaaaataaagtctgaaaaccatgagatagagaattctatgaaatatcttgtacagattttcgtgatatatttatacacgcatgggtttgtagatccctgaaacttagaggtcatttagctaaaatctacattttttttaacttttaataggattgaaatgatattttacactgtatcacagatacagtattttatataactttttgtaactgaccttatcttggccttgagtcccatcctctctggtggtagcgtaaaactgaaaattccagtttgggtcaatatttagtgaaagttctactttcttttcagagagtttgttcccccctttcttccttagatgttttcaaacacacagccccatcctactcaaaccaagtgaagcaagagtggacaattctagaattggctgtgccatgtaggttttttttagaatttgaactgatttccttcattttgatgaggtggcaactgtccccattgtaatggtcaccattgcagcgaggatagccttacttctgcggcgcagagctcctcagggggcctctggctcctgtccttcctcaggtccatccaactactccttgggcctccttatggtagccctcattgtcttgagttgatttcactaggtttctgttctctgtcatctgcaacataactgacatggttctaaatctgtctctaaggagataacacattagtatattttctacactattgaagcctctacctaatgtatgacttttgtagctcaggtaaagagatctttttaccagtgttatcgtttctagtctgtttgttagtcttcttttaaatagatatggcctaaatcctgtattcctggctaggaagcacttctctccacccctctgctttgagttacaaattcaattcaatttcctatgtatttattaatacctacagataaagtactgtgctttgggggacacaaaggtgactggtacctgctcttttaggaggtcaccgtgcagaggatcctattctggtacaccaatagttataaagcaagccacagcctaggcaacatagtgagacccctgtctctactaaaaaattaaaaaaaaaaaaaaaagattggctaggtgtgctggtgcatgcatagagtcccagccactcgggaggctgaggtgggaggattgcttgagcctgggaggttgaggctgcagtgggccatgattgcacaacttggcaacagagtgagaccctgtctctaaatcaatcaatcaagcgagccagaatgcagtagtggcctgagagaggcatcctggaacgcagtgcggtctggctaggcttagaagtattcatgtgatttttacctgacaagggaaggaagagctgctccacgtgcagagcaaggtttcagaatgagaggagaagagcaggcactgcagagggtgagggaaagggcagcagtggactgggaagccctcaggtggaggtcagcattgcttccctcagatcatgggtgaatttgaggaactcagttaatatctttgtatgttcctccctccataaggtgagaacaagcacatgctctgcccatgtcagaaattgtctagactagtgtttttcaaagtgcaaaagcctcaacccattactgagttgagaagccaacttaatggtttaacaggattgaccagcattttttccgaaaaaatcaaaaacatctgagtgtactgcatatagaaataggtggttttgcctcatgaatattctgtttctgtgtgttcctatattttactttgtattgtgttggttttttaagagacagtcctgctctgtcatccaggctggagtgcagtggtataatcatagctcactgcaagactccttgaatccctgggctcaagcaatcctcaacccttagcctcccaagtagctgagactacaggcacatgccaccatgcccagctaatttttttttttttttaatttttgtagagacagcatcttgctatgttgcccaggctggtcttgaactcttggcctcaagcagtcctctcgatcctcccaccttggcctcctaaagtgctgagattacaggtgtgagccactgcatctggcttacttattttgtctattgtctgttccactagtatgtaaagtcttagagagcaagaatttttgtttatttctttctcttcctcctttcctttcttcctcttttacttcgttcactactgtattccacataaaatatatttggcatatagtaggtgttcaatatgttgaaggaatgaaagaatttatagacttgagttgcaatataaaatgtatttttttttactgtgagttatggcaaaaaaagttttgaaagccgcttctaaataatgcagatgtcagtgctttgaccctggaataaaaactgaaatgacttagtgatttcaaaggcatatttgttttcctgaacaatctataaactgtctcattaagttgtctcagttatttgcttcacttcggcaacagaacctcagcctttacatgtgtttaaagcctcttgaggcaaaggatttggaaaatatggttacatggagaatagaagataatgagagagagtatcaattcattagtgcagttgaacccctctattggaatcccatcagcgagcacaagtcccatttcaacagcaataaatgcaacaagt

SEQ ID NO: 6214 - protein, 85 aa, Homo sapiens
MAANSSGQGFQNKNRVAILAELDKEKRKLLMQNQSSTNHPGASMLMHIHLDTSSLKTLHLGTLFFLFYLALTQNEENICDGKVTL

SEQ ID NO: 6215 - DNA, 4316 bp, Homo sapiens
ggggtttccgctccctggggcgcacgtcagtcaggaggcggaagcgcagcgggggcgggaaggttgtagtgccgcgagttgagctcctcttgcctaagtggtcgcgccccctttaagagcagcgattgtaaggagaggcggtcccggtgtcctcgggtcccaggttttcaaaacaaaaatagagttgcaatcttggcagaactggacaaagagaaaagaaaactacttatgcagaaccagtcttcaacaaatcatcctggagctagcattgcactctcgagaccctctcttaataaggacttccgggatcacgctgagcagcagcatattgcagcccaacagaaggcagctttgcagcatgctcatgcacattcatctggatacttcatcactcaagactctgcatttgggaaccttattcttcctgttttacctcgccttgacccagaatgaagaaaacatttgcgatggaaaagtgactttgtaatatcaaatgccaaagctactatcattcagtgctacatgaactgtgactttaagaattttggtgaactttgatattttttgtttgtctgaaagaaaggaatgtgtaagtgaaagctgaaagaagaataaccaggatgatgagagctgtggaagctgtatcgtccaaggaattgattatgtaccgtgactgtaacttttttgtaatgctgtttaactctcaatcagactgtgaactggatggtcacgaagtcattccccaactcctagcaagtttgactgaatatatcatgtccacagtagattttcaagaatcatttatagtacttaactttaaagaaacaaggctgcttttaaaaaatgaactaataggcttaaatcaattgcatccatatttgctgtttataggattgctatcagtataccttttgcgtttatagtcaacatgtatcatcctgaaatattctttctggacttataactacttccccctttttcactttaaaacaaacctcaagaataaattactaaccagtcttaaccatcttttataaacatatgctcttataaatgttgtgactagatgcaattaaaaataatagggaatgtggtaggtttttaatttgtacatcctcttatttagtgttaccacataaatgatgagtttgtgtggttctgttttccatttttgttctaactgaaaactttttggctgggcacggtgcctcatgcctgtaatcccagcactttgggaggccaaggcgggcagatcacttgagatcaggagtttgagaccagcctggccaacatggtgaaaccctgtctctactaaaagtataaaaaattagccatgtgtggtggcacacgcctgtaatcccagctactcaggaggctgaggcaggagaatcgcttgaacctgggaggcaggggttgcagtgagctgagacggtgtcactgcactccagcctgggtgacagtgagtctttgtctcaaagaaaaaaagaaaaagaaaacttatgcaagtcgagctcctttttaattaagtaggaagggattaggttaagaaagtctctcaacatgacccatctttagcagtatctggggtgcttatttaagtatgcagtcccactaccctaccctagtcctacagaattagaatctgattcaaaataaagtctgaaaaccatgagatagagaattctatgaaatatcttgtacagattttcgtgatatatttatacacgcatgggtttgtagatccctgaaacttagaggtcatttagctaaaatctacattttttttaacttttaataggattgaaatgatattttacactgtatcacagatacagtattttatataactttttgtaactgaccttatcttggccttgagtcccatcctctctggtggtagcgtaaaactgaaaattccagtttgggtcaatatttagtgaaagttctactttcttttcagagagtttgttcccccctttcttccttagatgttttcaaacacacagccccatcctactcaaaccaagtgaagcaagagtggacaattctagaattggctgtgccatgtaggttttttttagaatttgaactgatttccttcattttgatgaggtggcaactgtccccattgtaatggtcaccattgcagcgaggatagccttacttctgcggcgcagagctcctcagggggcctctggctcctgtccttcctcaggtccatccaactactccttgggcctccttatggtagccctcattgtcttgagttgatttcactaggtttctgttctctgtcatctgcaacataactgacatggttctaaatctgtctctaaggagataacacattagtatattttctacactattgaagcctctacctaatgtatgacttttgtagctcaggtaaagagatctttttaccagtgttatcgtttctagtctgtttgttagtcttcttttaaatagatatggcctaaatcctgtattcctggctaggaagcacttctctccacccctctgctttgagttacaaattcaattcaatttcctatgtatttattaatacctacagataaagtactgtgctttgggggacacaaaggtgactggtacctgctcttttaggaggtcaccgtgcagaggatcctattctggtacaccaatagttataaagcaagccacagcctaggcaacatagtgagacccctgtctctactaaaaaattaaaaaaaaaaaaaaaagattggctaggtgtgctggtgcatgcatagagtcccagccactcgggaggctgaggtgggaggattgcttgagcctgggaggttgaggctgcagtgggccatgattgcacaacttggcaacagagtgagaccctgtctctaaatcaatcaatcaagcgagccagaatgcagtagtggcctgagagaggcatcctggaacgcagtgcggtctggctaggcttagaagtattcatgtgatttttacctgacaagggaaggaagagctgctccacgtgcagagcaaggtttcagaatgagaggagaagagcaggcactgcagagggtgagggaaagggcagcagtggactgggaagccctcaggtggaggtcagcattgcttccctcagatcatgggtgaatttgaggaactcagttaatatctttgtatgttcctccctccataaggtgagaacaagcacatgctctgcccatgtcagaaattgtctagactagtgtttttcaaagtgcaaaagcctcaacccattactgagttgagaagccaacttaatggtttaacaggattgaccagcattttttccgaaaaaatcaaaaacatctgagtgtactgcatatagaaataggtggttttgcctcatgaatattctgtttctgtgtgttcctatattttactttgtattgtgttggttttttaagagacagtcctgctctgtcatccaggctggagtgcagtggtataatcatagctcactgcaagactccttgaatccctgggctcaagcaatcctcaacccttagcctcccaagtagctgagactacaggcacatgccaccatgcccagctaatttttttttttttttaatttttgtagagacagcatcttgctatgttgcccaggctggtcttgaactcttggcctcaagcagtcctctcgatcctcccaccttggcctcctaaagtgctgagattacaggtgtgagccactgcatctggcttacttattttgtctattgtctgttccactagtatgtaaagtcttagagagcaagaatttttgtttatttctttctcttcctcctttcctttcttcctcttttacttcgttcactactgtattccacataaaatatatttggcatatagtaggtgttcaatatgttgaaggaatgaaagaatttatagacttgagttgcaatataaaatgtatttttttttactgtgagttatggcaaaaaaagttttgaaagccgcttctaaataatgcagatgtcagtgctttgaccctggaataaaaactgaaatgacttagtgatttcaaaggcatatttgttttcctgaacaatctataaactgtctcattaagttgtctcagttatttgcttcacttcggcaacagaacctcagcctttacatgtgtttaaagcctcttgaggcaaaggatttggaaaatatggttacatggagaatagaagataatgagagagagtatcaattcattagtgcagttgaacccctctattggaatcccatcagcgagcacaagtcccatttcaacagcaataaatgcaacaagt

SEQ ID NO: 6216 - protein, 74 aa, Homo sapiens; identical to SEQ ID NO: 6208

SEQ ID NO: 6217 - DNA, 4484 bp, Homo sapiens
tttggaaaaaaaagtgacgtctgcactgaggtggccgctaaagtgcgaatcacgacgggcggtggccgttgggtcccggcgggaggcggggtttccgctccctggggcgcacgtcagtcaggaggcggaagcgcagcgggggcgggaaggttgtagtgccgcgagttgagctcctcttgcctaagtggtcgcgccccctttaagagcagcgattgtaaggagaggcggtcccggtgtcctcgggtcccaggtgattgtgaagtgctgaccaattgccactggacatacttgaaacaaaataggaaaatggcagcaaactcttcaggacaaggttttcaaaacaaaaatagagttgcaatcttggcagaactggacaaagagaaaagaaaactacttatgcagaaccagtcttcaacaaatcatcctggagctagcattgcactctcgagaccctctcttaataaggacttccgggatcacgctgagcagcagcatattgcagcccaacagaaggcagctttgcagcatgctcatgcacattcatctggatacttcatcactcaagactctgcatttgggaaccttattcttcctgttttacctcgccttgacccagaatgaagaaaacatttgcgatggaaaagtgactttgtaatatcaaatgccaaagctactatcattcagtgctacatgaactgtgactttaagaattttggtgaactttgatattttttgtttgtctgaaagaaaggaatgtgtaagtgaaagctgaaagaagaataaccaggatgatgagagctgtggaagctgtatcgtccaaggaattgattatgtaccgtgactgtaacttttttgtaatgctgtttaactctcaatcagactgtgaactggatggtcacgaagtcattccccaactcctagcaagtttgactgaatatatcatgtccacagtagattttcaagaatcatttatagtacttaactttaaagaaacaaggctgcttttaaaaaatgaactaataggcttaaatcaattgcatccatatttgctgtttataggattgctatcagtataccttttgcgtttatagtcaacatgtatcatcctgaaatattctttctggacttataactacttccccctttttcactttaaaacaaacctcaagaataaattactaaccagtcttaaccatcttttataaacatatgctcttataaatgttgtgactagatgcaattaaaaataatagggaatgtggtaggtttttaatttgtacatcctcttatttagtgttaccacataaatgatgagtttgtgtggttctgttttccatttttgttctaactgaaaactttttggctgggcacggtgcctcatgcctgtaatcccagcactttgggaggccaaggcgggcagatcacttgagatcaggagtttgagaccagcctggccaacatggtgaaaccctgtctctactaaaagtataaaaaattagccatgtgtggtggcacacgcctgtaatcccagctactcaggaggctgaggcaggagaatcgcttgaacctgggaggcaggggttgcagtgagctgagacggtgtcactgcactccagcctgggtgacagtgagtctttgtctcaaagaaaaaaagaaaaagaaaacttatgcaagtcgagctcctttttaattaagtaggaagggattaggttaagaaagtctctcaacatgacccatctttagcagtatctggggtgcttatttaagtatgcagtcccactaccctaccctagtcctacagaattagaatctgattcaaaataaagtctgaaaaccatgagatagagaattctatgaaatatcttgtacagattttcgtgatatatttatacacgcatgggtttgtagatccctgaaacttagaggtcatttagctaaaatctacattttttttaacttttaataggattgaaatgatattttacactgtatcacagatacagtattttatataactttttgtaactgaccttatcttggccttgagtcccatcctctctggtggtagcgtaaaactgaaaattccagtttgggtcaatatttagtgaaagttctactttcttttcagagagtttgttcccccctttcttccttagatgttttcaaacacacagccccatcctactcaaaccaagtgaagcaagagtggacaattctagaattggctgtgccatgtaggttttttttagaatttgaactgatttccttcattttgatgaggtggcaactgtccccattgtaatggtcaccattgcagcgaggatagccttacttctgcggcgcagagctcctcagggggcctctggctcctgtccttcctcaggtccatccaactactccttgggcctccttatggtagccctcattgtcttgagttgatttcactaggtttctgttctctgtcatctgcaacataactgacatggttctaaatctgtctctaaggagataacacattagtatattttctacactattgaagcctctacctaatgtatgacttttgtagctcaggtaaagagatctttttaccagtgttatcgtttctagtctgtttgttagtcttcttttaaatagatatggcctaaatcctgtattcctggctaggaagcacttctctccacccctctgctttgagttacaaattcaattcaatttcctatgtatttattaatacctacagataaagtactgtgctttgggggacacaaaggtgactggtacctgctcttttaggaggtcaccgtgcagaggatcctattctggtacaccaatagttataaagcaagccacagcctaggcaacatagtgagacccctgtctctactaaaaaattaaaaaaaaaaaaaaaagattggctaggtgtgctggtgcatgcatagagtcccagccactcgggaggctgaggtgggaggattgcttgagcctgggaggttgaggctgcagtgggccatgattgcacaacttggcaacagagtgagaccctgtctctaaatcaatcaatcaagcgagccagaatgcagtagtggcctgagagaggcatcctggaacgcagtgcggtctggctaggcttagaagtattcatgtgatttttacctgacaagggaaggaagagctgctccacgtgcagagcaaggtttcagaatgagaggagaagagcaggcactgcagagggtgagggaaagggcagcagtggactgggaagccctcaggtggaggtcagcattgcttccctcagatcatgggtgaatttgaggaactcagttaatatctttgtatgttcctccctccataaggtgagaacaagcacatgctctgcccatgtcagaaattgtctagactagtgtttttcaaagtgcaaaagcctcaacccattactgagttgagaagccaacttaatggtttaacaggattgaccagcattttttccgaaaaaatcaaaaacatctgagtgtactgcatatagaaataggtggttttgcctcatgaatattctgtttctgtgtgttcctatattttactttgtattgtgttggttttttaagagacagtcctgctctgtcatccaggctggagtgcagtggtataatcatagctcactgcaagactccttgaatccctgggctcaagcaatcctcaacccttagcctcccaagtagctgagactacaggcacatgccaccatgcccagctaatttttttttttttttaatttttgtagagacagcatcttgctatgttgcccaggctggtcttgaactcttggcctcaagcagtcctctcgatcctcccaccttggcctcctaaagtgctgagattacaggtgtgagccactgcatctggcttacttattttgtctattgtctgttccactagtatgtaaagtcttagagagcaagaatttttgtttatttctttctcttcctcctttcctttcttcctcttttacttcgttcactactgtattccacataaaatatatttggcatatagtaggtgttcaatatgttgaaggaatgaaagaatttatagacttgagttgcaatataaaatgtatttttttttactgtgagttatggcaaaaaaagttttgaaagccgcttctaaataatgcagatgtcagtgctttgaccctggaataaaaactgaaatgacttagtgatttcaaaggcatatttgttttcctgaacaatctataaactgtctcattaagttgtctcagttatttgcttcacttcggcaacagaacctcagcctttacatgtgtttaaagcctcttgaggcaaaggatttggaaaatatggttacatggagaatagaagataatgagagagagtatcaattcattagtgcagttgaacccctctattggaatcccatcagcgagcacaagtcccatttcaacagcaataaatgcaacaagt

SEQ ID NO: 6218 - protein, 104 aa, Homo sapiens; identical to SEQ ID NO: 849

SEQ ID NO: 6219 - DNA, 1481 bp, Homo sapiens
tttggaaaaaaaagtgacgtctgcactgaggtggccgctaaagtgcgaatcacgacgggcggtggccgttgggtcccggcgggaggcggggtttccgctccctggggcgcacgtcagtcaggaggcggaagcgcagcgggggcgggaaggttgtagtgccgcgagttgagctcctcttgcctaagtggtcgcgccccctttaagagcagcgattgtaaggagaggcggtcccggtgtcctcgggtcccaggtgattgtgaagtgctgaccaattgccactggacatacttgaaacaaaataggaaaatggcagcaaactcttcaggacaaggttttcaaaacaaaaatagagttgcaatcttggcagaactggacaaagagaaaagaaaactacttatgcagaaccagtcttcaacaaatcatcctggagctagcattgcactctcgagaccctctcttaataaggacttccgggatcacgctgagcagcagcatattgcagcccaacagaaggcagctttgcagcatgctcatgcacattcatctggatacttcatcactcaagactctgcatttgggaaccttattcttcctgttttacctcgccttgacccagaatgaagaaaacatttgcgatggaaaagtgactttgtaatatcaaatgccaaagctactatcattcagtgctacatgaactgtgactttaagaattttggtgaactttgatattttttgtttgtctgaaagaaaggaatgtgtaagtgaaagctgaaagaagaataaccaggatgatgagagctgtggaagctgtatcgtccaaggaattgattatgtaccgtgactgtaacttttttgtaatgctgtttaactctcaatcagactgtgaactggatggtcacgaagtcattccccaactcctagcaagtttgactgaatatatcatgtccacagtagattttcaagaatcatttatagtacttaactttaaagaaacaaggctgcttttaaaaaatgaactaataggcttaaatcaattgcatccatatttgctgtttataggattgctatcagtataccttttgcgtttatagtcaacatgtatcatcctgaaatattctttctggacttataactacttccccctttttcactttaaaacaaacctcaagaataaattactaaccagtcttaaccatcttttataaacatatgctcttataaatgttgtgactagatgcaattaaaaataatagggaatgtggtaggtttttaatttgtacatcctcttatttagtgttaccacataaatgatgagtttgtgtggttctgttttccatttttgttctaactgaaaactttttggctgggcacggtgcctcatgcctgtaatcccagcactttgggaggccaaggcgggcagatcacttgagatcaggagtttgagaccagcctggccaacatggtgaaaccctgtctctact

SEQ ID NO: 6220 - protein, 104 aa, Homo sapiens; identical to SEQ ID NO: 849

SEQ ID NO: 6221 - DNA, 500 bp, Homo sapiens
aggaggcggaagcgcagcgggggcgggaaggttgtagtgccgcgagttgagctcctcttgcctaagtggtcgcgccccctttaagagcagcgattgtaaggagaggcggtcccggtgtcctcgggtcccaggtgattgtgaagtgctgaccaattgccactggacatacttgaaacaaaataggaaaatggcagcaaactcttcaggacaaggttttcaaaacaaaaatagagttgcaatcttggcagaactggacaaagagaaaagaaaactacttatgcagaaccagtcttcaacaaatcatcctggagctaggtattgacactataatgtgggttttttgtttgttttgttttgttttgttttgttttgagacggagtctcgccctgtcccccaggctggagtgcaatgctgattgcaccactgcaatccagcctggatgatatagtaagactgtctaaaacaaacaaacaaaaaagatccattatccccttcagcc

SEQ ID NO: 6222 - protein, 44 aa, Homo sapiens
MAANSSGQGFQNKNRVAILAELDKEKRKLLMQNQSSTNHPGARY

SEQ ID NO: 6223 - DNA, 213 bp, Homo sapiens
gagttgagctcctcttgcctaagtggtcgcgccccctttaagagcagcgattgtaaggagaggcggtcccggtgtcctcgggtcccaggttttcaaaacaaaaatagagttgcaatcttggcagaactggacaaagagaaaagaaaactacttatgcagaaccagtcttcaacaaatcatcctggagctaggtattgacactataatgtgggt

SEQ ID NO: 6224 - DNA, 455 bp, Homo sapiens
aggagaggcggtcccggtgtcctcgggtcccaggtgattgtgaagtgctgaccaattgccactggacatacttgaaacaaaataggaaaatggcagcaaactcttcaggacaagacaaggtctcgctgtgttgcccaggctgatcttgaactcctggcctcaggtgatcctcctgcctcaacttcccaaagcactaggattacaaatagacagggtcttgctctgccgcacaggccagagtgcagtggcccatcatagctcattccactgagcccaagtgatcctcctgcctcagcctcctgagtcactgggactacaggcatggtcttgctctgttgaccaggctggagtgttaaaggcacgatcatggctcacggcagcctctacttcatgggctcaagcgatcctcctgcctcagcctcccaagtagctagcctacaggcacatgccaccaa

SEQ ID NO: 6225 - protein, 61 aa, Homo sapiens [sequence omitted]

SEQ ID NO: 6226 - DNA, 420 bp, Homo sapiens
atgcgcccaccagcagccacgcttggggctgggggctttgaggacacgcacgctgccttaaatataatggacatccgtatggattaagactctatacaagctttctctttagtacaccaggggaaagtgaaaaaagaaccacatttgaattcggctttgtcactacaagtgggtgaccatgagcaagttactaacctcagtgaacctgttcctaacctaaaaaggaggagaatggagagcaggtaataataccttatgagatggttgtgagagttatatagcattctttatgtcatagtcctagcaaagtgctggcataaaataggtgctccctaaatgttaattacctaccttcctttccctttctgtcagattttctctactattcttatgaaataataaagagtttttgtaattaaa

SEQ ID NO: 6227 - protein, 44 aa, Homo sapiens
GHARCLKYNGHPYGLRLYTSFLFSTPGESEKRTTFEFGFVTTSG

SEQ ID NO: 6228 - DNA, 673 bp, Homo sapiens
gccggcagagaccagccggcgggtggcggcggcccccagcacggccggtgcaaggcctcgggttaagcggcggccgagcggggctcggcccggggtgctcggggagctcgccgcggcgggcagcaggaggaagcggcggcggcgcgtcccgagcggtgcgcgccatggcgggcgggccccccaaggccctgccgtccacggggccccactccctgcgcgacatgccgcacccgctggccggctccagcagcgaggaggccgtgggtggtgacagcacgcccagcccggacctgctgatggcccgcagcttcggtgacaaggatctcattttgcccaacggtggtactccagcaggtacttcaagtccagcttcttcatcttcccttctcaacagacttcagcttgatgatgatattgatggtgagactagagatctcttcgttatagttgatgatcccaagaagcatgtgtgtacaatggagacttacatcacctataggatcaccaccaaaagtactcgggtggagtttgacctgccagaatattctgttcgtcgaagataccaggattttgactggttgaggagcaaactggaagaatcccagcccactcatctcattcccgacctgaacgcctacaagaagcaagggatagcattgctgaccagaatggg

SEQ ID NO: 6229 - protein, 168 aa, Homo sapiens
MAGGPPKALPSTGPHSLRDMPHPLAGSSSEEAVGGDSTPSPDLLMARSFGDKDLILPNGGTPAGTSSPASSSSLLNRLQLDDDIDGETRDLFVIVDDPKKHVCTMETYITYRITTKSTRVEFDLPEYSVRRRYQDFDWLRSKLEESQPTHLIPDLNAYKKQGIALLTR

SEQ ID NO: 6230 - DNA, 5573 bp, Homo sapiens
gccggcagagaccagccggcgggtggcggcggcccccagcacggccggtgcaaggcctcgggttaagcggcggccgagcggggctcggcccggggtgctcggggagctcgccgcggcgggcagcaggaggaagcggcggcggcgcgtcccgagcggtgcgcgccatggcgggcgggccccccaaggccctgccgtccacggggccccactccctgcgcgacatgccgcacccgctggccggctccagcagcgaggaggccgtgggtggtgacagcacgcccagcccggacctgctgatggcccgcagcttcggtgacaaggatctcattttgcccaacggtggtactccagcaggtacttcaagtccagcttcttcatcttcccttctcaacagacttcagcttgatgatgatattgatggtgagactagagatctcttcgttatagttgatgatcccaagaagcatgtgtgtacaatggagacttacatcacctataggatcaccaccaaaagtactcgggtggagtttgacctgccagaatattctgttcgtcgaagataccaggattttgactggttgaggagcaaactggaagaatcccagcccactcatctcattccccctcttcccgagaagtttgtggtaaaaggtgttgtggatcgtttttcagaagagtttgtggagaccagaagaaaagctttggataaatttctaaaaagaattacggaccatcctgtgctgtctttcaatgaacactttaatattttccttactgctaaggacctgaacgcctacaagaagcaagggatagcattgctgaccagaatgggcgagtcagtcaagcacgtcactggcggctacaagctgaggactcggccgcttgagtttgctgccataggtgactacttagatacatttgcactcaaactgggaaccattgatcgaatagcccagcggatcatcaaagaagaaatagagtaccttgtggagctgagagaatacgggcctgtgtactccacatggagcgccttggagggtgagctggctgaacccctggagggtgtgtcagcttgcattgggaactgctctacagccttagaagagctgacagatgacatgacagaagacttcctacctgtgctcagggaatatattttatactctgactccatgaagagtgtattgaagaagagggaccaagttcaagcagagtatgaagccaaactggaagctgtggctctgcggaaggaagaccgccccaaggtaccggcggacgtcgagaaatgtcaggatcggatggagtgtttcaatgctgacctgaaagctgacatggagaggtggcagaacaacaagaggcaggacttccggcagctactcatggggatggctgacaagaacatccagtattatgagaagtgcctcatggcgtgggagtcgattattccactactgcaggagaaacaagaggccaagtaaagttctttcttgggacggagactcttctacctacacagggcctggcaccctataccggaatgtccctgcagtgccagagacgcagtgctgggaaaacaaccacagaaacatctctcctttgtgtatttttccctcccccacctttcaccccacagtggttttcaattagtatttattccatggtggagtctgtgaggctagaatatctctcagcaagagcagcatacctccatgttgtgaaggcatctgttcagtgaagcactacgaaaatttgaaaccaagggacaagacaacctgcagctgacgctctgacatttcatgacagtttcctctttagggacagctgagttgccagttgtgggagagaacccggggcctgcttttcaaggatgaggaggaggcaggaacagaaggcagctgctgctttctgtggaaacctggcccctctggaattggcctctgtgggcattgactcgtcttggcctaggaggcattggtgcctccctggcaagtccttaacgtacagtacctgtagctgtgagtgtggcctgctgcctgcttgtgatgagtgataccgtcttactgtttctgtttcacatagggacatttaaatcaatgtcaatgtgcgtccatgcttgagtgagcaagccagcgtccttgtcctcctgcaatgcctttgggaagctcaggggaatgctccccaagcttgtttctgacactagaatgcaacagattggaaactttttgtgtaaaatgaaaaaaacaaagtgctggttttttttttttttctgtgaaggtcttcagtgttttgcttgttcactgtcatcagagcagggattagacctgttagggaatatctattgtcttgaagtcagagtagctccccattgttgagatcagtgggcatataccaagctccacccccagtgtcagctttgtgcaatttgcctttacctcaccaaaaatacctactttaatatttcctcctgtgtcctctgaatgtctgggcgagcttttggtgagagggctggtatgtcatgttgttatgatacagtcgaaatttgtcaatgcagtgtgaatgttctacataaagtgctttaacccttaacatttcctggtcaggaaggaaaatcagtacctggacgggcctcgaaaatgacaaatgcaacagcgagccctttgtgtccagctaagctaaagtctcctcagtgtgcagccagattcctggggactgctgagtgtggttacaggctgcatttcagacaatgaccaggtttacttttcagatcacaaagcaaacagtcaccaaggatctgtcttccaactcttttttttttctgctgaaatgaagctacatgtcatgtttgtgttctttcatctgtggctcatccctgtaaaactacgaatctgagcctcaaataagcagtagtttttttgttgtttatttttaatgaaacagctgtgttaaggcgctgcttcagatgcaagttcacctggaaatactggtcagcgggcagcacgtcaaggtcacttaagcccacttttaactgcaggtcatcctcgcatcagccaaggctgtggtgctgttgatgccgcagttggacagcataggacggcttggttctgtttcattgtgtttgacaatgttgcagtttaaatgataatgtttaaatcaattggtacttgcctgtagtgttaaaccctatttgtgccattctcaagtcctttgatgtgaattttcagtttggtacagttagaaatgactcattgatgcggacaggtaagaacaacccatgtacccccgagtgattgcatgctttattctacctctaagccatcgtgttgacgtgggtatggacgcctgggtctgacctgacactgtgctgggagaatcaggatgtgtgtctaatggcgagctgacagccctctgctgatatttggcagaaggcaccagaccagcccagcagcaaatgctcatctttgggaacataggaagctttaccttggggaaggtatgctttacaaatgtccagtgtaatgaatgtttggaaaaaactggagttacaggaaaatgaaatctgactatctgctagttgccaaaacccagaaacattcctgtgtaatggttagttgggaaagaaggcagcacttgaaaaaatttaccaggttcctcactgggagatgtgggaaggggcgtgggacgcacgcggtcactccctctcctagtgagaggcagatggctggctctgaagggaggcaggcaccgtgggatttgggcttgctctgcttggtccccatgtgatgccctgtgctgtaagatatcagaaagacctggaacaaggcaaactttatgtcctcctggcatgttattgataacagagccaggaagtccagtgtacattacagattttctgggagaaatagtccttccagagaaaggattccttcccagcctccaggctggtgtctcatgaggtgaggaggctggcccagaaggaaggggacgttaggtggtgaagcaggctcccctgggcctctgagggccagcagtcccaaccatttgcctcttcgttttgaccaagcacaaaagagatattccctagaagtgtcacacggaggcttctgtgccaaagactgccttgtagaggtctcatcacctcacacttcttgacttcacaaaattgtggccctgagatcagtactcctctcttaagtatttattattattattatttactttacctcaagcagacagacataggttttgaggcttgaatacatggcagtggaatacaaggccctccctagcagccgccccaggcctggaaagtgggagatttcattcgcccgggttaaaaatccagaggaagacagaagagaggagtcctaggaactgagcagattttagagacgcaaatgatgtttaagagagccttcttgtttcagatagaaattctctatgggttgaaatgccaaaaacagaaaacatgatgttgactcatgtaatttagtccattttagcagagcctttagtgttaacaccagtggcgaggagcattgcatattctctgtcagcagcagcactcccacaccaggtggttctgggctctctgtaggctggtcctagtaggtgacacccagcaacacccctgttggacaggattgattgttcgcagtcttagaccaacacttcagtcagaaatgttactgggaggaggaaaggaaaatcactttttttcctccatgtggaaatgaggagagaggaaagtggattgcaaaccaaaatgtgagtcagtgtgatgaagcagtggctctgtcatctcggcctttatccaataacaaaccagcatctcttaaaggcgcttttggcctagacacccctgaagtttggatgaagtctggtggattccctgtctgttgtatttctgtgtgcctgttcccttcattgctgtgagttgggagtgcattgagagatgatgtccatctgatatattcctgtgaaataaactgccagcaaactttctaacttgtattttaactgttaaagaagagattaaaaacttcggctttggacatgtccacattatggactgtcatcttatttttaaaagtcattctttacgtttaaaattttaaaataaaaaccttctgaggtattgatgtagtccaccgtgtaaatgttaccttctctccatgctgccattatgccaaaacaaaagctgtgataaaaaaagtgcttgagagagtgtgttgataagaaagtgatttatttacagatggaagtctttgtttcatgaagctaccaaactttaaaaagaatgtcacccttttttttgtttgttatggaaaccagagattgtaaaatggaaaaagaatcgtttttttgttgactttttgatgctggcacgaggtttttgtccacttttttcatatatctgtgtataaaaaaattgttgtttactatggaattagtattacattttgaggtaaacaaaagaatttgtattgcttgataaatattagcttgtaaatttaaagtttctttacttcaattaacttaaaggaccaataaacccataaaagatgctttcttta

SEQ ID NO: 6231 - protein, 437 aa, Homo sapiens
MAGGPPKALPSTGPHSLRDMPHPLAGSSSEEAVGGDSTPSPDLLMARSFGDKDLILPNGGTPAGTSSPASSSSLLNRLQLDDDIDGETRDLFVIVDDPKKHVCTMETYITYRITTKSTRVEFDLPEYSVRRRYQDFDWLRSKLEESQPTHLIPPLPEKFVVKGVVDRFSEEFVETRRKALDKFLKRITDHPVLSFNEHFNIFLTAKDLNAYKKQGIALLTRMGESVKHVTGGYKLRTRPLEFAAIGDYLDTFALKLGTIDRIAQRIIKEEIEYLVELREYGPVYSTWSALEGELAEPLEGVSACIGNCSTALEELTDDMTEDFLPVLREYILYSDSMKSVLKKRDQVQAEYEAKLEAVALRKEDRPKVPADVEKCQDRMECFNADLKADMERWQNNKRQDFRQLLMGMADKNIQYYEKCLMAWESIIPLLQEKQEAK

SEQ ID NO: 6232 - DNA, 3712 bp, Homo sapiens
agtaatagcagcaactgctacccagccagattttaattagtttctgttccctgttcagagtaccttgtggagctgagagaatacgggcctgtgtactccacatggagcgccttggagggtgagctggctgaacccctggagggtgtgtcagcttgcattgggaactgctctacagccttagaagagctgacagatgacatgacagaagacttcctacctgtgctcagggaatatattttatactctgactccatgaagagtgtattgaagaagagggaccaagttcaagcagagtatgaagccaaactggaagctgtggctctgcggaaggaagaccgccccaaggtaccggcggacgtcgagaaatgtcaggatcggatggagtgtttcaatgctgacctgaaagctgacatggagaggtggcagaacaacaagaggcaggacttccggcagctactcatggggatggctgacaagaacatccagtattatgagaagtgcctcatggcgtgggagtcgattattccactactgcaggagaaacaagaggccaagtaaagttctttcttgggacggagactcttctacctacacagggcctggcaccctataccggaatgtccctgcagtgccagagacgcagtgctgggaaaacaaccacagaaacatctctcctttgtgtatttttccctcccccacctttcaccccacagtggttttcaattagtatttattccatggtggagtctgtgaggctagaatatctctcagcaagagcagcatacctccatgttgtgaaggcatctgttcagtgaagcactacgaaaatttgaaaccaagggacaagacaacctgcagctgacgctctgacatttcatgacagtttcctctttagggacagctgagttgccagttgtgggagagaacccggggcctgcttttcaaggatgaggaggaggcaggaacagaaggcagctgctgctttctgtggaaacctggcccctctggaattggcctctgtgggcattgactcgtcttggcctaggaggcattggtgcctccctggcaagtccttaacgtacagtacctgtagctgtgagtgtggcctgctgcctgcttgtgatgagtgataccgtcttactgtttctgtttcacatagggacatttaaatcaatgtcaatgtgcgtccatgcttgagtgagcaagccagcgtccttgtcctcctgcaatgcctttgggaagctcaggggaatgctccccaagcttgtttctgacactagaatgcaacagattggaaactttttgtgtaaaatgaaaaaaacaaagtgctggttttttttttttttctgtgaaggtcttcagtgttttgcttgttcactgtcatcagagcagggattagacctgttagggaatatctattgtcttgaagtcagagtagctccccattgttgagatcagtgggcatataccaagctccacccccagtgtcagctttgtgcaatttgcctttacctcaccaaaaatacctactttaatatttcctcctgtgtcctctgaatgtctgggcgagcttttggtgagagggctggtatgtcatgttgttatgatacagtcgaaatttgtcaatgcagtgtgaatttgttctcttcggccttgttctgccttgtgatcttttcaattcagtgaataaaccaggaatccattttttcaccaacccaccctgtagattgtcagctttttgtttgagagatgcctggtctcacagttacatgtatcagagtgtgtgtaagttgtctgtgttagaaaggttggggtgggggctttgttgcaggggattagactgttctttcttcatcataatttgagatacatcctgagtatgactgtctaaccctttctgtgtggcagaaaaatatgttttccaggtagtttttactactacagagagtctgtaaataagtgctttaaaaaaataacaaaccaataagatatttgtctcctatataaacattctgtgtatttagcacttgaaaatcaacaaatccagaatttaaaaaaatgccacagacttttcaaagcccaactctacttttttgagaatttgtccgtacctactaatatgccttattcttcttcacctagtgttttaaaagtcctgggtagaaagagttttagaaatgtaatcagttgttcagcttcaataatatagagatctaacatagtcagtcctcaggccccctaaagaaacaagcaagaaagtgagggccatcactagggttggctttggggaggggaaaactaaggactgcttttgccaaatgatatttttgataatgtaaggaaacacagggaccacaaaaccttttttttttttttaagtgtgaaagattagtgccttttggcatacttttgattttagaggatatagtatcggcattgacaaatcacgtagaaacaaagaatgctatagatgacaacagtattaaatgttactcctgattctgcagaacagcttttgaagatactggggggtatcttcaagcctcagagcagcttgtttcagatagaaattctctatgggttgaaatgccaaaaacagaaaacatgatgttgactcatgtaatttagtccattttagcagagcctttagtgttaacaccagtggcgaggagcattgcatattctctgtcagcagcagcactcccacaccaggtggttctgggctctctgtaggctggtcctagtaggtgacacccagcaacacccctgttggacaggattgattgttcgcagtcttagaccaacacttcagtcagaaatgttactgggaggaggaaaggaaaatcactttttttcctccatgtggaaatgaggagagaggaaagtggattgcaaaccaaaatgtgagtcagtgtgatgaagcagtggctctgtcatctcggcctttatccaataacaaaccagcatctcttaaaggcgcttttggcctagacacccctgaagtttggatgaagtctggtggattccctgtctgttgtatttctgtgtgcctgttcccttcattgctgtgagttgggagtgcattgagagatgatgtccatctgatatattcctgtgaaataaactgccagcaaactttctaacttgtattttaactgttaaagaagagattaaaaacttcggctttggacatgtccacattatggactgtcatcttatttttaaaagtcattctttacgtttaaaattttaaaataaaaaccttctgaggtattgatgtagtccaccgtgtaaatgttaccttctctccatgctgccattatgccaaaacaaaagctgtgataaaaaaagtgcttgagagagtgtgttgataagaaagtgatttatttacagatggaagtctttgtttcatgaagctaccaaactttaaaaagaatgtcacccttttttttgtttgttatggaaaccagagattgtaaaatggaaaaagaatcgtttttttgttgactttttgatgctggcacgaggtttttgtccacttttttcatatatctgtgtataaaaaaattgttgtttactatggaattagtattacattttgaggtaaacaaaagaatttgtattgcttgataaatattagcttgtaaatttaaagtttctttacttcaattaacttaaaggaccaataaacccataaaagatgctttcttta

SEQ ID NO: 6233 - protein, 119 aa, Homo sapiens
MTEDFLPVLREYILYSDSMKSVLKKRDQVQAEYEAKLEAVALRKEDRPKVPADVEKCQDRMECFNADLKADMERWQNNKRQDFRQLLMGMADKNIQYYEKCLMAWESIIPLLQEKQEAK

SEQ ID NO: 6234 - DNA, 2158 bp, Homo sapiens
aattgtaaactgccagcagggagacttctacatacagagctaatgcagaccggagagtggggcctcgtgtctgttgtttccagacccttctggcaagtaccggcggacgtcgagaaatgtcaggatcggatggagtgtttcaatgctgacctgaaagctgacatggagaggtggcagaacaacaagaggcaggacttccggcagctactcatggggatggctgacaagaacatccagtattatgagaaggcccagtttaccctcaatttaccctcttctacatcttccacatctgcaccaatctggggagatgaagaaacttcctagtgtagtagccatcatgactggcaggcaggccgacagccagctgaggcctgggttagaacatctgttagaagaaatggtgaccctggaaaagctgacaaggtttgaaactcctaccctggtgacagctggagttgaaaaggagccaatacttgggctttgagagctcagctcaggttaaaaaacacaagtttatatagcacggtcaatgtggacaaggaatgacatttctctaaacagtaagaggcttttcaggagtaggaacgattagattcattcaggctgaggagctggtcaagaggctggaccagaaggtaaggagttggggaatgagcatattgatgagtaagggtggagaggttgaacatggtcttgaatattagtgaggttggagaggttgaacgtgatcttgaacttcttgaactcatctttcccatcccatctgctctgctcatgttgcctgactcagtgcaagggtgctggctccttcccagtggaaggagacatccccattccctgcaagaggattagagatacaaactctcagagcccaaataccttgaatgtattctgcagccgtgtattttatcctgtataagaacatcaagtctgtagtcacagacagaatctgacctgggaaggaacgattcacacactcatacaatgaatgttgattttattaggtgagtctgcttttataaatccaagtaaacaaggttataaaaatgactacctcaaataaaatagctcttaatgtacctcctcttccttcacaccacccactttgggaagcactgttgactggaagtactcaattgaacatcccattgaagaaagccttgtgacatttgcttcttaaaagcaacagtagtaacaaaactacccagaagacaagggcctgagctccatccccctcctgagtgtttgtaggtaaggaagactcaggaaagaaagctgacttttttcaaggttttattttaatttaaaagacattgttcgtgcaaaactgttggtagttcttacaaaacatcccttccacattcccctcaggctgtgataatgcacgctttgagttctcccatgggactttcagcacagcacccaggtgactagttagctatactttggagccctcaagacagtcccttgaagaaaaggggcaggctcgctgtagctggagtctgaagcccctcacagggcctgggactgctgtgtgcagcctgcctgtaacccttaaggtcatgctctgctgtcacagaacccagtgtctgcctaatgggggtgtcttaaagctgagaacgtttttccatcaccaggaaagtgcttttccccatccaccagggatccctgagccagagcaggtcattctgaggccaactctggctggaacgcaggtttcttaagcagtgggttgcttaggtcaccagttccctggtcccttcttttgtcttctgggggcctggccatggctgatgttttcagttcctgcaggtaagcatcttcatttctctatgatgtctccatatggtgacaatgggacttgtttataggccacgatgctgtaagaattgaccatagagagttacaagagaacagctggaatggggtaaaggacagggctggcaagtggagagtgaagacttggaagcagccagcacagggccacatgatccttgacccctgctgtggaccactacagcacaggcacaaggcgatggccagcatctgacttcatgggcagccccaggcagctctggggtgtgggcggtcagcagtgctgacttattagtcagcgtaagtcagcgctgagagatgctacaccctctgacagggc

SEQ ID NO: 6235 - protein, 94 aa, Homo sapiens
MQTGEWGLVSVVSRPFWQVPADVEKCQDRMECFNADLKADMERWQNNKRQDFRQLLMGMADKNIQYYEKAQFTLNLPSSTSSTSAPIWGDEETS

SEQ ID NO: 6236 - DNA, 346 bp, Homo sapiens
cctcctcagaactcttcccacctcctcagaattcctcctccctcctcagaatcctcccacctcctcagaattcctccttcctcctcagaactcctttcacttcctcagaattcctcctggctcctcaggattcctcttcagagctcctcccacctcctcagaactcctcccgcctcctcagaactcctttcaccttctcacaatttctcccacctcttcagaactcccgctcctcacacctctcccaccccctcagaactcctccccacctcttcagaacctctccccacctcccccaaacccctcctgccttctcagaacccctctccacttccccaaaactcct

SEQ ID NO: 6237 - protein, 114 aa, Homo sapiens
PPQNSSHLLRIPPPSSESSHLLRIPPSSSELLSLPQNSSWLLRIPLQSSSHLLRTPPASSELLSPSHNFSHLFRTPAPHTSPTPSELLPTSSEPLPTSPKPLLPSQNPSPLPQN

SEQ ID NO: 6238 - DNA, 3383 bp, Homo sapiens
gtaaagttctttcttgggacggagactcttctacctacacagggcctggcaccctataccggaatgtccctgcagtgccagagacgcagtgctgggaaaacaaccacagaaacatctctcctttgtgtatttttccctcccccacctttcaccccacagtggttttcaattagtatttattccatggtggagtctgtgaggctagaatatctctcagcaagagcagcatacctccatgttgtgaaggcatctgttcagtgaagcactacgaaaatttgaaaccaagggacaagacaacctgcagctgacgctctgacatttcatgacagtttcctctttagggacagctgagttgccagttgtgggagagaacccggggcctgcttttcaaggatgaggaggaggcaggaacagaaggcagctgctgctttctgtggaaacctggcccctctggaattggcctctgtgggcattgactcgtcttggcctaggaggcattggtgcctccctggcaagtccttaacgtacagtacctgtagctgtgagtgtggcctgctgcctgcttgtgatgagtgataccgtcttactgtttctgtttcacatagggacatttaaatcaatgtcaatgtgcgtccatgcttgagtgagcaagccagcgtccttgtcctcctgcaatgcctttgggaagctcaggggaatgctccccaagcttgtttctgacactagaatgcaatgtgtgacttggtcctgccatcgttagctttgaaatcacaggcattgggctctgttttgacaccattcattggactgcgggacagtcattctttacgttctctcttgagctggtgagagaggaggaagagggaagtcaagagcaacctccaaggcctatgtcagcctcttctccttgggtcttggggtgggttagaactgggttccagtctggccagatgggttgctggctgcactgagggtgattcttctcagaagatgggctgcctgtggtcaggacagggcataccagtctggactccaccttcccagacacctactttaaggacctgtggaaactgggtgatccaattatagggctggggcaaccctgctttggccaccctcatttacaaacttaggttgggagcttgggtttcctgtctcacttccaaaagccttcaagatggcagcagatggacacaccctctcatttcttgtgtcttgtctgtcagatggcaggaggcctgtatcagtaaatttgaggaaaatgttctctcctgggccagcctcacagcttgcgttgggtgtgttggaattgttctcttcggccttgttctgccttgtgatcttttcaattcagtgaataaaccaggaatccattttttcaccaacccaccctgtagattgtcagctttttgtttgagagatgcctggtctcacagttacatgtatcagagtgtgtgtaagttgtctgtgttagaaaggttggggtgggggctttgttgcaggggattagactgttctttcttcatcataatttgagatacatcctgagtatgactgtctaaccctttctgtgtggcagaaaaatatgttttccaggtagtttttactactacagagagtctgtaaataagtgctttaaaaaaataacaaaccaataagatatttgtctcctatataaacattctgtgtatttagcacttgaaaatcaacaaatccagaatttaaaaaaatgccacagacttttcaaagcccaactctacttttttgagaatttgtccgtacctactaatatgccttattcttcttcacctagtgttttaaaagtcctgggtagaaagagttttagaaatgtaatcagttgttcagcttcaataatatagagatctaacatagtcagtcctcaggccccctaaagaaacaagcaagaaagtgagggccatcactagggttggctttggggaggggaaaactaaggactgcttttgccaaatgatatttttgataatgtaaggaaacacagggaccacaaaaccttttttttttttttaagtgtgaaagattagtgccttttggcatacttttgattttagaggatatagtatcggcattgacaaatcacgtagaaacaaagaatgctatagatgacaacagtattaaatgttactcctgattctgcagaacagcttttgaagatactggggggtatcttcaagcctcagagcagcttgtttcagatagaaattctctatgggttgaaatgccaaaaacagaaaacatgatgttgactcatgtaatttagtccattttagcagagcctttagtgttaacaccagtggcgaggagcattgcatattctctgtcagcagcagcactcccacaccaggtggttctgggctctctgtaggctggtcctagtaggtgacacccagcaacacccctgttggacaggattgattgttcgcagtcttagaccaacacttcagtcagaaatgttactgggaggaggaaaggaaaatcactttttttcctccatgtggaaatgaggagagaggaaagtggattgcaaaccaaaatgtgagtcagtgtgatgaagcagtggctctgtcatctcggcctttatccaataacaaaccagcatctcttaaaggcgcttttggcctagacacccctgaagtttggatgaagtctggtggattccctgtctgttgtatttctgtgtgcctgttcccttcattgctgtgagttgggagtgcattgagagatgatgtccatctgatatattcctgtgaaataaactgccagcaaactttctaacttgtattttaactgttaaagaagagattaaaaacttcggctttggacatgtccacattatggactgtcatcttatttttaaaagtcattctttacgtttaaaattttaaaataaaaaccttctgaggtattgatgtagtccaccgtgtaaatgttaccttctctccatgctgccattatgccaaaacaaaagctgtgataaaaaaagtgcttgagagagtgtgttgataagaaagtgatttatttacagatggaagtctttgtttcatgaagctaccaaactttaaaaagaatgtcacccttttttttgtttgttatggaaaccagagattgtaaaatggaaaaagaatcgtttttttgttgactttttgatgctggcacgaggtttttgtccacttttttcatatatctgtgtataaaaaaattgttgtttactatggaattagtattacattttgaggtaaacaaaagaatttgtattgcttgataaatattagcttgtaaatttaaagtttctttacttcaattaacttaaaggaccaataaacccataaaagatgctttcttta

SEQ ID NO: 6239 - protein, 38 aa, Homo sapiens
MCDLVLPSLALKSQALGSVLTPFIGLRDSHSLRSLLSW

SEQ ID NO: 6240 - DNA, 2406 bp, Homo sapiens
aggtcttcagtgttttgcttgttcactgtcatcagagcagggattagacctgttagggaatatctattgtcttgaagtcagagtagctccccattgttgagatcagtgggcatataccaagctccacccccagtgtcagctttgtgcaatttgcctttacctcaccaaaaatacctactttaatatttcctcctgtgtcctctgaatgtctgggcgagcttttggtgagagggctggtatgtcatgttgttatgatacagtcgaaatttgtcaatgcagtgaaaatgttctctcctgggccagcctcacagcttgcgttgggtgtgttggaattgttctcttcggccttgttctgccttgtgatcttttcaattcagtgaataaaccaggaatccattttttcaccaacccaccctgtagattgtcagctttttgtttgagagatgcctggtctcacagttacatgtatcagagtgtgtgtaagttgtctgtgttagaaaggttggggtgggggctttgttgcaggggattagactgttctttcttcatcataatttgagatacatcctgagtatgactgtctaaccctttctgtgtggcagaaaaatatgttttccaggtagtttttactactacagagagtctgtaaataagtgctttaaaaaaataacaaaccaataagatatttgtctcctatataaacattctgtgtatttagcacttgaaaatcaacaaatccagaatttaaaaaaatgccacagacttttcaaagcccaactctacttttttgagaatttgtccgtacctactaatatgccttattcttcttcacctagtgttttaaaagtcctgggtagaaagagttttagaaatgtaatcagttgttcagcttcaataatatagagatctaacatagtcagtcctcaggccccctaaagaaacaagcaagaaagtgagggccatcactagggttggctttggggaggggaaaactaaggactgcttttgccaaatgatatttttgataatgtaaggaaacacagggaccacaaaaccttttttttttttttaagtgtgaaagattagtgccttttggcatacttttgattttagaggatatagtatcggcattgacaaatcacgtagaaacaaagaatgctatagatgacaacagtattaaatgttactcctgattctgcagaacagcttttgaagatactggggggtatcttcaagcctcagagcagcttgtttcagatagaaattctctatgggttgaaatgccaaaaacagaaaacatgatgttgactcatgtaatttagtccattttagcagagcctttagtgttaacaccagtggcgaggagcattgcatattctctgtcagcagcagcactcccacaccaggtggttctgggctctctgtaggctggtcctagtaggtgacacccagcaacacccctgttggacaggattgattgttcgcagtcttagaccaacacttcagtcagaaatgttactgggaggaggaaaggaaaatcactttttttcctccatgtggaaatgaggagagaggaaagtggattgcaaaccaaaatgtgagtcagtgtgatgaagcagtggctctgtcatctcggcctttatccaataacaaaccagcatctcttaaaggcgcttttggcctagacacccctgaagtttggatgaagtctggtggattccctgtctgttgtatttctgtgtgcctgttcccttcattgctgtgagttgggagtgcattgagagatgatgtccatctgatatattcctgtgaaataaactgccagcaaactttctaacttgtattttaactgttaaagaagagattaaaaacttcggctttggacatgtccacattatggactgtcatcttatttttaaaagtcattctttacgtttaaaattttaaaataaaaaccttctgaggtattgatgtagtccaccgtgtaaatgttaccttctctccatgctgccattatgccaaaacaaaagctgtgataaaaaaagtgcttgagagagtgtgttgataagaaagtgatttatttacagatggaagtctttgtttcatgaagctaccaaactttaaaaagaatgtcacccttttttttgtttgttatggaaaccagagattgtaaaatggaaaaagaatcgtttttttgttgactttttgatgctggcacgaggtttttgtccacttttttcatatatctgtgtataaaaaaattgttgtttactatggaattagtattacattttgaggtaaacaaaagaatttgtattgcttgataaatattagcttgtaaatttaaagtttctttacttcaattaacttaaaggaccaataaacccataaaagatgctttcttta

SEQ ID NO: 6241 - protein, 117 aa, Homo sapiens
MSGRAFGERAGMSCCYDTVEICQCSENVLSWASLTACVGCVGIVLFGLVLPCDLFNSVNKPGIHFFTNPPCRLSAFCLRDAWSHSYMYQSVCKLSVLERLGWGLCCRGLDCSFFIII

SEQ ID NO: 6242 - DNA, 2667 bp, Homo sapiens
cacaggagcagcgtgacccgtcggccccgggggtgctggcgccaggagccagcactcgcggtgcgctcccccgcgcctggcttccctggactgtcgccagtcctactctgcctgaggtggcgagggcagggtggagcgcggccttttctggcctgaggaggagtcactcgggaggtcactcggctgctgggcgggctgctgtcacaggcgctgcgtgccctggctctgctcgccactggccggcgcgctcccggcgcacggagcacactcgcgctcccggcgcacggagcacactcgcgctccgggactgaaacctgagcagccgtagcagccgaatttgggagcatatccttgtcactgcagccagaaagcccttcgatccccatcagagaggtcacatgagccccgaggtcacctgcccgcggaggggccacctgcctcgcttccacccgaggacctgggttgagcccgtggtggcctcgtcccaggtggctgcctccctctacgatgcggggctactcctcgtggtgaaggcgtcctacggaaccggaggctcctccaaccacagtgccagcccatcgccccggggggctctagaggaccaacagcagagagccatctccaatttctacattatctacaaccttgtggtgggcctgtcccccctgctgtccgcctacgggctgggatggctcagcgaccgctaccaccgaaagatctccatctgcatgtcgctgctgggcttcctgctctcccgcctcgggctgctgctcaaggtgctgctggactggccagtggaggtgctgtacggggcggcggcgctgaacgggctattcggcggcttctccgccttctggtccggggtcatggcgctgggatcgctgggctcctccgagggccgccgctctgtgcgcctcatcctcattgacctgatgctgggcttggcggggttctgcgggagcatggcttccgggcatctcttcaagcagatggctgggcactctgggcagggcctgatactgacggcctgcagcgtgagctgtgcctcgtttgccctgctctacagccttttggtgctaaaggtccctgagtcggtggccaaacccagccaggagctccccgccgtggataccgtgtctggcacggttggcacataccgcactctggatcctgatcagttggaccaacagtatgcagtggggcaccctccatctcctggaaaagcaaaaccccataaaaccaccattgccttgctctttgtgggtgctatcatatatgacctggcggtggtgggcacagtggacgtgatccctctttttgtgctgagggagcctctcggttggaaccaagtgcaggtgggctatggtatggctgcagggtacaccatcttcatcaccagcttcctgggtgtcctggtcttctcccgctgctttcgggacaccaccatgatcatgattgggatggtctcctttgggtcaggagccctcctcttggcttttgtgaaagagacatacatgttctatattgctcgagccgtcatgctgtttgctctcatccccgtcacaaccatccgatcagctatgtccaaactcataaagggctcctcttatggaaaggtgttcgtcatactgcagctgtccttggctctgaccggcgtggtgacatccaccttgtacaacaagatctaccagctcaccatggacatgtttgtgggctcctgctttgctctctcctcctttctctccttcctggccatcattccaattagcatcgtggcctataaacaagtcccattgtcaccatatggagacatcatagagaaatgaagatgcttacctgcaggaactgaaaacatcagccatggccaggcccccagaagacaaaagaagggaccagggaactggtgacctaagcaacccactgcttaagaaacctgcgttccagccagagttggcctcagaatgacctgctctggctcagggatccctggtggatggggaaaagcactttcctggtgatggaaaaacgttctcagctttaagacacccccattaggcagacactgggttctgtgacagcagagcatgaccttaagggttacaggcaggctgcacacagcagtcccaggccctgtgaggggcttcagactccagctacagcgagcctgccccttttcttcaagggactgtcttgagggctccaaagtatagctaactagtcacctgggtgctgtgctgaaagtcccatgggagaactcaaagcgtgcattatcacagcctgaggggaatgtggaagggatgttttgtaagaactaccaacagttttgcacgaacaatgtcttttaaattaaaataaaaccttgaaaaaagtcagctttctttcctgagtcttccttacctacaaacactcaggagggggatggagctcaggcccttgtcttctgggtagttttgttactactgttgcttttaagaagcaaatgtcacaaggctttcttcaatgggatgttcaattgagtacttccagtcaacagtgcttcccaaagtgggtggtgtgaaggaagaggaggtacattaagagctattttatttgaggtagtcatttttataaccttgtttacttggatttataaaagcagactcacctaataaaatcaacattcattgt

SEQ ID NO: 6243 - protein, 475 aa, Homo sapiens
MSPEVTCPRRGHLPRFHPRTWVEPVVASSQVAASLYDAGLLLVVKASYGTGGSSNHSASPSPRGALEDQQQRAISNFYIIYNLVVGLSPLLSAYGLGWLSDRYHRKISICMSLLGFLLSRLGLLLKVLLDWPVEVLYGAAALNGLFGGFSAFWSGVMALGSLGSSEGRRSVRLILIDLMLGLAGFCGSMASGHLFKQMAGHSGQGLILTACSVSCASFALLYSLLVLKVPESVAKPSQELPAVDTVSGTVGTYRTLDPDQLDQQYAVGHPPSPGKAKPHKTTIALLFVGAIIYDLAVVGTVDVIPLFVLREPLGWNQVQVGYGMAAGYTIFITSFLGVLVFSRCFRDTTMIMIGMVSFGSGALLLAFVKETYMFYIARAVMLFALIPVTTIRSAMSKLIKGSSYGKVFVILQLSLALTGVVTSTLYNKIYQLTMDMFVGSCFALSSFLSFLAIIPISIVAYKQVPLSPYGDIIEK

SEQ ID NO: 6244 - DNA, 2371 bp, Homo sapiens
cacaggagcagcgtgacccgtcggccccgggggtgctggcgccaggagccagcactcgcggtgcgctcccccgcgcctggcttccctggactgtcgccagtcctactctgcctgaggtggcgagggcagggtggagcgcggccttttctggcctgaggaggagtcactcgggaggtcactcggctgctgggcgggctgctgtcacaggcgctgcgtgccctggctctgctcgccactggccggcgcgctcccggcgcacggagcacactcgcgctcccggcgcacggagcacactcgcgctccgggactgaaacctgagcagccgtagcagccgaatttgggagcatatccttgtcactgcagccagaaagcccttcgatccccatcagagaggtcacatgagccccgaggtcacctgcccgcggaggggccacctgcctcgcttccacccgaggacctgggttgagcccgtggtggcctcgtcccaggtggctgcctccctctacgatgcggggctactcctcgtggtgaaggcgtcctacggaaccggaggctcctccaaccacagtgccagcccatcgccccggggggctctagaggaccaacagcagagagccatctccaatttctacattatctacaaccttgtggtgggcctgtcccccctgctgtccgcctacgggctgggatggctcagcgaccgctaccaccgaaagatctccatctgcatgtcgctgctgggcttcctgctctcccgcctcgggctgctgctcaaggtgctgctggactggccagtggaggtgctgtacggggcggcggcgctgaacgggctattcggcggcttctccgccttctggtccggggtcatggcgctgggatcgctgggctcctccgagggccgccgctctgtgcgcctcatcctcattgacctgatgctgggcttggcggggttctgcgggagcatggcttccgggcatctcttcaagcagatggctgggcactctgggcagggcctgatactgacggcctgcagcgtgagctgtgcctcgtttgccctgctctacagccttttggtgctaaaggtccctgagtcggtggccaaacccagccaggagctccccgccgtggataccgtgtctggcacggttggcacataccgcactctggatcctgatcagttggaccaacagtatgcagtggggcaccctccatctcctggaaaagcaaaaccccataaaaccaccattgccttgctctttgtgggtgctatcatatatgacctggcggtggtgggcacagtggacgtgatccctctttttgtgctgagggagcctctcggttggaaccaagtgcaggtgggctatggtatggctgcagggtacaccatcttcatcaccagcttcctgggtgtcctggtcttctcccgctgctttcgggacaccaccatgatcatgattgggatggtctcctttgggtcaggagccctcctcttggcttttgtgaaagagacatacatgttctatattgctcgagccgtcatgctgtttgctctcatccccgtcacaaccatccgatcagctatgtccaaactcataaagggctcctcttatggaaaggtgttcgtcatactgcagctgtccttggctctgaccggcgtggtgacatccaccttgtacaacaagatctaccagctcaccatggacatgtttgtgggctcctgctttgctctctcctcctttctctccttcctggccatcattccaattagcatcgtggcctataaacaagtcccattgtcaccatatggagacatcatagagaaatgaagatgcttacctgcaggaactgaaaacatcagccatggccaggcccccagaagacaaaagaagggaccagggaactggtgacctaagcaacccactgcttaagaaacctgcgttccagccagagttggcctcagaatgacctgctctggctcagggatccctggtggatggggaaaagcactttcctggtgatggaaaaacgttctcagctttaagacacccccattaggcagacactgggttctgtgacagcagagcatgaccttaagggttacaggcaggctgcacacagcagtcccaggccctgtgaggggcttcagactccagctacagcgagcctgccccttttcttcaagggactgtcttgagggctccaaagtatagctaactagtcacctgggtgctgtgctgaaagtcccatgggagaactcaaagcgtgcattatcacagcctgaggggaatgtggaagggatgttttgtaagaactaccaacagttttgcacgaacaatgtcttttaaattaaaataaaaccttgaaaaaagtc

SEQ ID NO: 6245 - protein, 475 aa, Homo sapiens; identical to SEQ ID NO: 6243

SEQ ID NO: 6246 - DNA, 2775 bp, Homo sapiens
tgctgaatctctgtctgtccatctttctgaccccagcctgctaccaccactgccgccgccagcactggcccctgcccattgcacgtaaatgtggagcggttcctggctcagagtttgaggggcacaaacggatttctgaacagccccttcccaacaagacaatcagcccacccccagcccccgcccctgccgctgcgcctctaccctgtggaccaacagagaccatccccagcttcctgctcaccagggcagggcgagaccaggccatctgtgagctgcaagaagaggtgtcccggcttcgtctgcggctggaagacagcctgcaccagccactccagggcagcccgacacgcccagcatctgcctttgaccgccccgcccggacccgcggccggccagcagactccccagccacctggggctcccattatggcagtaaatccacagagagattgcctggtgagcctagaggtgaagagcagattgtccctccaggaaggcagcgagccaggtcttcctcagtgcctcgggaggtgctccgactgtccctgagttcagaatctgagctgccctccctaccactgttctctgagaagagcaagaccaccaaggacagtccacaggcagctcgggatggaaagagaggggtgggcagtgctggatggccagacagggtcaccttccggggccaatacacaggccacgaataccatgttctgtcccctaaggcggtcccaaaaggcaatggcacagtctcctgtccccactgccggcccattaggacccaggatgcgggtggtgctgtcacaggggacccactgggaccgcctcccgctgatacccttcagtgtcccctgtgtggtcaagttgggtctcccccagaggcagatggtccaggctcagccacctctggggcagagaaggccaccacgaggagaaaagcatcttcaactcccagccccaagcagaggagcaagcaggcggggtcgtcgccacgcccaccccccggactgtggtatctggcaacagcgcccccagcaccagcccctccagcctttgcctacatctcctcggttcccatcatgccttatccacctgccgctgtgtactatgcgcctgcaggacctacctcagcccaaccagctgccaagtggccgcccacagcctctcccccaccagcccggagacaccggcactccatccagctcgacctgggcgacctagaggagctcaacaaggccctgagccgggccgtgcaggctgccgagagcgtccgctctaccaccaggcagatgagaagctcgctgtcagccgacctgcgccaggctcacagcctgcggggctcctgcctcttctgacttcactgggggcccagaggcagatgggtgggtgggtgggcaggtggcctgccaggccaggagtgggctggagctgctgaggcccagaaggcccgcatagttcctcaccaggagggtctccctccagcacaggtcccgcctgctcagtccctgtgctttccaagtggagggggtgtcagctcggtcaccaagagaagtgacttcccaggagcaccagtcccctcacagaggtgctgtgagcgaggcctccttcggtccaggcagaacctcaggcagtctctcctggtcctgcatgtgtgcaactccagctaataataggtattttatatacagatggacagatatttttttaaactggggagttttcctgatcttgggtcctctttagggggccagacaagaaaggcctacggtttctggagcaaacctgtcccccacctgtgaccagtcactctggggcaagcatcactgggaagggcatagccggagacctttctcctagtgactggtagtcagtggggcattttaggatgtcagggccccagggtgacatgtgtccagcttttctatggcagcagaggcctttccctcagacaagctacaaagtgcccaggatgccatccaccatggtccccttcagtacctcacgcatggtccccagcttctcctaggatcccagtggcgtttatcagtggccagctacctgccaggcccgggctggggcacggtctgcggccatgaggccaggccgcctcccgcacccctaccccgtggcagcagcatacctctgcatttctggaatgtgtgtgcatcaatgatgtttgtatatttgaggcatttaaaaatctattttcgttacgagggcaaatgaagaatgaatattgatcttaaaaaaagaaaagaagacaaaaaaaatacccaaagccatccgtgtctctgctgtatgtcattaacttttgccttcaatgtcaagtttatggggtggtaggtttgatgcccagccaagccctttcccaggggacctgttgggtgctctgcctgcctccctctggtggcttctgtttctccagttttccccctttgcctatctcagaaccataaatctttcaactgcggagggccttgaggtggggctgcctagccaagtcccttttgactgaggccagagatgtaaatgaggcacacagcaagttgctgtctacaagagtatgcacctggactctccagtgctcctttctttcttttttttttcttttttctttttctttttttttttttttttgagactgagttttgctctggttgcccaggctggggtacagtggtggaatctcggctcactgcaacctccgcctcccgggttcaagtgattctcttgcctcagcctcccgagtagctgggattacaggcatgcacc

SEQ ID NO: 6247 - protein, 196 aa, Homo sapiens [sequence omitted]

SEQ ID NO: 6248 - DNA, 3649 bp, Homo sapiens
tgctgaatctctgtctgtccatctttctgaccccagcctgctaccaccactgccgccgccagcactggcccctgcccattgcacgtaaatgtggaggtgagctctggcaacagtgaggtggaggacaggccacaggaccccctggcccgactcaggcacaaggagctgcagatggagcaagtttaccatggcctcatggagcggtacctcagtgtgaagtctctcccagaagccatgagaatggaggaggaggaagaaggagaggaggaggaggaggaagaggggggaggtgactccctggaagttgatggggtggctgcaactccagggaaagcagaggccaccagggtcctcccaaggcagtgcccggtgcaggctgagaaaagtcatggggctcccctggaggaggccacggagaagatggtatctatgaagccaccaggtttccaggcatccctggctagagacgggcacatgtcaggcctgggcaaggctgaggcagcccctccaggccctggcgtgccaccccaccctccaggcaccaagtccgcagcatcccaccaaagtagtatgaccagcctggagggaagcggcatctctgagcgccttccacagaagcctttgcaccgaggcggtgggccccacctggaggagacctggatggcgtccccagagacagacagtggctttgtgggctcagaaacaagcagagtttcacccctcacccagactccagagcaccggctctcccacatcagcacagcaggaacattagcccagccctttgctgcatctgtgcccagggatggagcttcctaccccaaggccaggggttctctgattcccagaagagccacagagcccagcacaccccggagccaagcacagaggtacctctccagcccaagtgggcctctccggcagagggcacccaacttcagcctggagcggacactggcagccgagatggcggttcctggctcagagtttgaggggcacaaacggatttctgaacagccccttcccaacaagacaatcagcccacccccagcccccgcccctgccgctgcgcctctaccctgtggaccaacagagaccatccccagcttcctgctcaccagggcagggcgagaccaggccatctgtgagctgcaagaagaggtgtcccggcttcgtctgcggctggaagacagcctgcaccagccactccagggcagcccgacacgcccagcatctgcctttgaccgccccgcccggacccgcggccggccagcagactccccagccacctggggctcccattatggcagtaaatccacagagagattgcctggtgagcctagaggtgaagagcagattgtccctccaggaaggcagcgagccaggtcttcctcagtgcctcgggaggtgctccgactgtccctgagttcagaatctgagctgccctccctaccactgttctctgagaagagcaagaccaccaaggacagtccacaggcagctcgggatggaaagagaggggtgggcagtgctggatggccagacagggtcaccttccggggccaatacacaggccacgaataccatgttctgtcccctaaggcggtcccaaaaggcaatggcacagtctcctgtccccactgccggcccattaggacccaggatgcgggtggtgctgtcacaggggacccactgggaccgcctcccgctgatacccttcagtgtcccctgtgtggtcaagttgggtctcccccagaggcagatggtccaggctcagccacctctggggcagagaaggccaccacgaggagaaaagcatcttcaactcccagccccaagcagaggagcaagcaggcggggtcgtcgccacgcccaccccccggactgtggtatctggcaacagcgcccccagcaccagcccctccagcctttgcctacatctcctcggttcccatcatgccttatccacctgccgctgtgtactatgcgcctgcaggacctacctcagcccaaccagctgccaagtggccgcccacagcctctcccccaccagcccggagacaccggcactccatccagctcgacctgggcgacctagaggagctcaacaaggccctgagccgggccgtgcaggctgccgagagcgtccgctctaccaccaggcagatgagaagctcgctgtcagccgacctgcgccaggctcacagcctgcggggctcctgcctcttctgacttcactgggggcccagaggcagatgggtgggtgggtgggcaggtggcctgccaggccaggagtgggctggagctgctgaggcccagaaggcccgcatagttcctcaccaggagggtctccctccagcacaggtcccgcctgctcagtccctgtgctttccaagtggagggggtgtcagctcggtcaccaagagaagtgacttcccaggagcaccagtcccctcacagaggtgctgtgagcgaggcctccttcggtccaggcagaacctcaggcagtctctcctggtcctgcatgtgtgcaactccagctaataataggtattttatatacagatggacagatatttttttaaactggggagttttcctgatcttgggtcctctttagggggccagacaagaaaggcctacggtttctggagcaaacctgtcccccacctgtgaccagtcactctggggcaagcatcactgggaagggcatagccggagacctttctcctagtgactggtagtcagtggggcattttaggatgtcagggccccagggtgacatgtgtccagcttttctatggcagcagaggcctttccctcagacaagctacaaagtgcccaggatgccatccaccatggtccccttcagtacctcacgcatggtccccagcttctcctaggatcccagtggcgtttatcagtggccagctacctgccaggcccgggctggggcacggtctgcggccatgaggccaggccgcctcccgcacccctaccccgtggcagcagcatacctctgcatttctggaatgtgtgtgcatcaatgatgtttgtatatttgaggcatttaaaaatctattttcgttacgagggcaaatgaagaatgaatattgatcttaaaaaaagaaaagaagacaaaaaaaatacccaaagccatccgtgtctctgctgtatgtcattaacttttgccttcaatgtcaagtttatggggtggtaggtttgatgcccagccaagccctttcccaggggacctgttgggtgctctgcctgcctccctctggtggcttctgtttctccagttttccccctttgcctatctcagaaccataaatctttcaactgcggagggccttgaggtggggctgcctagccaagtcccttttgactgaggccagagatgtaaatgaggcacacagcaagttgctgtctacaagagtatgcacctggactctccagtgctcctttctttcttttttttttcttttttctttttctttttttttttttttttgagactgagttttgctctggttgcccaggctggggtacagtggtggaatctcggctcactgcaacctccgcctcccgggttcaagtgattctcttgcctcagcctcccgagtagctgggattacaggcatgcacc

SEQ ID NO: 6249 - protein, 686 aa, Homo sapiens
MEQVYHGLMERYLSVKSLPEAMRMEEEEEGEEEEEEEGGGDSLEVDGVAATPGKAEATRVLPRQCPVQAEKSHGAPLEEATEKMVSMKPPGFQASLARDGHMSGLGKAEAAPPGPGVPPHPPGTKSAASHQSSMTSLEGSGISERLPQKPLHRGGGPHLEETWMASPETDSGFVGSETSRVSPLTQTPEHRLSHISTAGTLAQPFAASVPRDGASYPKARGSLIPRRATEPSTPRSQAQRYLSSPSGPLRQRAPNFSLERTLAAEMAVPGSEFEGHKRISEQPLPNKTISPPPAPAPAAAPLPCGPTETIPSFLLTRAGRDQAICELQEEVSRLRLRLEDSLHQPLQGSPTRPASAFDRPARTRGRPADSPATWGSHYGSKSTERLPGEPRGEEQIVPPGRQRARSSSVPREVLRLSLSSESELPSLPLFSEKSKTTKDSPQAARDGKRGVGSAGWPDRVTFRGQYTGHEYHVLSPKAVPKGNGTVSCPHCRPIRTQDAGGAVTGDPLGPPPADTLQCPLCGQVGSPPEADGPGSATSGAEKATTRRKASSTPSPKQRSKQAGSSPRPPPGLWYLATAPPAPAPPAFAYISSVPIMPYPPAAVYYAPAGPTSAQPAAKWPPTASPPPARRHRHSIQLDLGDLEELNKALSRAVQAAESVRSTTRQMRSSLSADLRQAHSLRGSCLF

SEQ ID NO: 6250 - DNA, 1051 bp, Homo sapiens
accctagtgacagccttgattctacctgggaaggagagaccgatggcccccagcccactgccctggcagaaaccttgccagagggccccagccaccacctcctaagcccagatggcagaactggaggcagtgttgctcgggcaacccccatggaattccaggactcctcagctcccccagcccagagtccgcagcatgccacagatagatggaggagagaaacgaccagattcttctgccctcagcccaaggaacacatcatggtccccttcagtacctcacgcatggtccccagcttctcctaggatcccagtggcgtttatcagtggccagctacctgccaggcccgggctggggcacggtctgcggccatgaggccaggccgcctcccgcacccctaccccgtggcagcagcatacctctgcatttctggaatgtgtgtgcatcaatgatgtttgtatatttgaggcatttaaaaatctattttcgttacgagggcaaatgaagaatgaatattgatcttaaaaaaagaaaagaagacaaaaaaaatacccaaagccatccgtgtctctgctgtatgtcattaacttttgccttcaatgtcaagtttatggggtggtaggtttgatgcccagccaagccctttcccaggggacctgttgggtgctctgcctgcctccctctggtggcttctgtttctccagttttccccctttgcctatctcagaaccataaatctttcaactgcggagggccttgaggtggggctgcctagccaagtcccttttgactgaggccagagatgtaaatgaggcacacagcaagttgctgtctacaagagtatgcacctggactctccagtgctcctttctttcttttttttttcttttttctttttctttttttttttttttttgagactgagttttgctctggttgcccaggctggggtacagtggtggaatctcggctcactgcaacctccgcctcccgggttcaagtgattctcttgcctcagcctcccgagtagctgggattacaggcatgcacc

SEQ ID NO: 6251 - protein, 98 aa, Homo sapiens
MEERNDQILLPSAQGTHHGPLQYLTHGPQLLLGSQWRLSVASYLPGPGWGTVCGHEARPPPAPLPRGSSIPLHFWNVCASMMFVYLRHLKIYFRYEGK

SEQ ID NO: 6252 - DNA, 984 bp, Homo sapiens
cagtgggacagtgagcctcgaccaccctagtgacagccttgattctacctgggaaggagagaccgatggcccccagcccactgccctggcagaaaccttgccagagggccccagccaccacctcctaagcccagatggcagaactggaggcagtgttgctcgggcaacccccatggaattccaggactcctcagctcccccagcccagagtccgcagcatgccacagatagatggaggagagaaacgaccagattcttctgccctcagcccaaggaacacatctggaagcagaggtctgcggccatgaggccaggccgcctcccgcacccctaccccgtggcagcagcatacctctgcatttctggaatgtgtgtgcatcaatgatgtttgtatatttgaggcatttaaaaatctattttcgttacgagggcaaatgaagaatgaatattgatcttaaaaaaagaaaagaagacaaaaaaaatacccaaagccatccgtgtctctgctgtatgtcattaacttttgccttcaatgtcaagtttatggggtggtaggtttgatgcccagccaagccctttcccaggggacctgttgggtgctctgcctgcctccctctggtggcttctgtttctccagttttccccctttgcctatctcagaaccataaatctttcaactgcggagggccttgaggtggggctgcctagccaagtcccttttgactgaggccagagatgtaaatgaggcacacagcaagttgctgtctacaagagtatgcacctggactctccagtgctcctttctttcttttttttttcttttttctttttctttttttttttttttttgagactgagttttgctctggttgcccaggctggggtacagtggtggaatctcggctcactgcaacctccgcctcccgggttcaagtgattctcttgcctcagcctcccgagtagctgggattacaggcatgcacc

SEQ ID NO: 6253 - protein, 70 aa, Homo sapiens
MEFQDSSAPPAQSPQHATDRWRRETTRFFCPQPKEHIWKQRSAAMRPGRLPHPYPVAAAYLCISGMCVHQ

SEQ ID NO: 6254 - DNA, 5346 bp, Homo sapiens
gaggctggtctcagcttggaaggccatggaaacaccagccccatggctcttgggcatggtcaggccaggggctgggtggcttctggcgaacaagccagtggggacaaactttctgaacattccgaggtcaacccatccgttgaactcagcccggcaaggtcctggagcagtgggacagtgagcctcgaccaccctagtgacagccttgattctacctgggaaggagagaccgatggcccccagcccactgccctggcagaaaccttgccagagggccccagccaccacctcctaagcccagatggcagaactggaggcagtgttgctcgggcaacccccatggaattccaggactcctcagctcccccagcccagagtccgcagcatgccacagatagatggaggagagaaacgaccagattcttctgccctcagcccaaggaacacatctggaagcagacaaagacgtcacctaagccactcccttcccgattcattggctccatcagccccctgaatccccagcccaggccaacgcggcagggcaggccgctgcccagacagggagccactctggctggccgctcctcttctaatgcccccaagtatggccgggggcagttgaactacccactccctgatttctccaaggtagggccccgggtgagattccccaaagatgagagctaccgtccccccaagtccagaagccacaacaggaagcctcaggcccctgccaggcccctcatcttcaagtctccagctgagattgtgcaggaggtgctgttgagcagtggagaagcagccctggcaaaggacacgcctcctgcccaccctatcaccagggtaccccaagaatttcagacgcctgagcaagccactgagctggtccatcagctccaggaagactaccacaggctcctcaccaagtacgctgaggccgagaacaccattgaccagctacgcctcggggccaaggtgaacctgttctctgacccaccccagcccaaccacagcatccacacgggaatggtgccccaggggaccaaggtcttgtccttcaccatcccacagccccgctctgcagagtggtggccgggcccggccgaggacccccaggcctctgcggcctcagcctgggggcagccctggccctgccacttggcatcttggtgaccctggggtggccatcagctcgaggagacttgagcccctcctcgcttaccagcatgcccaccctggggtggcttccggagaaccgggacatctctgaggaccagtcctcagcagagcagacccaggcactggcttctcaggccagccagttcctggccaaggtggagtcctttgaaagactgatacaggcaggacgtctcatgccccaggaccaagtcaagggcttccagcggctgaaggctgcccacgcggccctagaggaggagtacctgaaggcttgtcgggagcaacaccctgcccagccgcttgccggctccaaggggacgcctggaagatttgatcctcgcagggagctggaggcagagatataccgtctgggaagctgcctggaagagctgaaggaacacatagaccagacccagcaagagcctgagccgcccgggtcagactcagctctggacagcaccccagccctgccctgcctccatcagccaacgcacctgcctgctccttctggacaagcccccatgccagccatcaagacctcctgccctgagcctgctaccaccactgccgccgccagcactggcccctgcccattgcacgtaaatgtggaggtgagctctggcaacagtgaggtggaggacaggccacaggaccccctggcccgactcaggcacaaggagctgcagatggagcaagtttaccatggcctcatggagcggtacctcagtgtgaagtctctcccagaagccatgagaatggaggaggaggaagaaggagaggaggaggaggaggaagaggggggaggtgactccctggaagttgatggggtggctgcaactccagggaaagcagaggccaccagggtcctcccaaggcagtgcccggtgcaggctgagaaaagtcatggggctcccctggaggaggccacggagaagatggtatctatgaagccaccaggtttccaggcatccctggctagagacgggcacatgtcaggcctgggcaaggctgaggcagcccctccaggccctggcgtgccaccccaccctccaggcaccaagtccgcagcatcccaccaaagtagtatgaccagcctggagggaagcggcatctctgagcgccttccacagaagcctttgcaccgaggcggtgggccccacctggaggagacctggatggcgtccccagagacagacagtggctttgtgggctcagaaacaagcagagtttcacccctcacccagactccagagcaccggctctcccacatcagcacagcaggaacattagcccagccctttgctgcatctgtgcccagggatggagcttcctaccccaaggccaggggttctctgattcccagaagagccacagagcccagcacaccccggagccaagcacagaggtacctctccagcccaagtgggcctctccggcagagggcacccaacttcagcctggagcggacactggcagccgagatggcggttcctggctcagagtttgaggggcacaaacggatttctgaacagccccttcccaacaagacaatcagcccacccccagcccccgcccctgccgctgcgcctctaccctgtggaccaacagagaccatccccagcttcctgctcaccagggcagggcgagaccaggccatctgtgagctgcaagaagaggtgtcccggcttcgtctgcggctggaagacagcctgcaccagccactccagggcagcccgacacgcccagcatctgcctttgaccgccccgcccggacccgcggccggccagcagactccccagccacctggggctcccattatggcagtaaatccacagagagattgcctggtgagcctagaggtgaagagcagattgtccctccaggaaggcagcgagccaggtcttcctcagtgcctcgggaggtgctccgactgtccctgagttcagaatctgagctgccctccctaccactgttctctgagaagagcaagaccaccaaggacagtccacaggcagctcgggatggaaagagaggggtgggcagtgctggatggccagacagggtcaccttccggggccaatacacaggccacgaataccatgttctgtcccctaaggcggtcccaaaaggcaatggcacagtctcctgtccccactgccggcccattaggacccaggatgcgggtggtgctgtcacaggggacccactgggaccgcctcccgctgatacccttcagtgtcccctgtgtggtcaagttgggtctcccccagaggcagatggtccaggctcagccacctctggggcagagaaggccaccacgaggagaaaagcatcttcaactcccagccccaagcagaggagcaagcaggcggggtcgtcgccacgcccaccccccggactgtggtatctggcaacagcgcccccagcaccagcccctccagcctttgcctacatctcctcggttcccatcatgccttatccacctgccgctgtgtactatgcgcctgcaggacctacctcagcccaaccagctgccaagtggccgcccacagcctctcccccaccagcccggagacaccggcactccatccagctcgacctgggcgacctagaggagctcaacaaggccctgagccgggccgtgcaggctgccgagagcgtccgctctaccaccaggcagatgagaagctcgctgtcagccgacctgcgccaggctcacagcctgcggggctcctgcctcttctgacttcactgggggcccagaggcagatgggtgggtgggtgggcaggtggcctgccaggccaggagtgggctggagctgctgaggcccagaaggcccgcatagttcctcaccaggagggtctccctccagcacaggtcccgcctgctcagtccctgtgctttccaagtggagggggtgtcagctcggtcaccaagagaagtgacttcccaggagcaccagtcccctcacagaggtgctgtgagcgaggcctccttcggtccaggcagaacctcaggcagtctctcctggtcctgcatgtgtgcaactccagctaataataggtattttatatacagatggacagatatttttttaaactggggagttttcctgatcttgggtcctctttagggggccagacaagaaaggcctacggtttctggagcaaacctgtcccccacctgtgaccagtcactctggggcaagcatcactgggaagggcatagccggagacctttctcctagtgactggtagtcagtggggcattttaggatgtcagggccccagggtgacatgtgtccagcttttctatggcagcagaggcctttccctcagacaagctacaaagtgcccaggatgccatccaccatggtccccttcagtacctcacgcatggtccccagcttctcctaggatcccagtggcgtttatcagtggccagctacctgccaggcccgggctggggcacggtctgcggccatgaggccaggccgcctcccgcacccctaccccgtggcagcagcatacctctgcatttctggaatgtgtgtgcatcaatgatgtttgtatatttgaggcatttaaaaatctattttcgttacgagggcaaatgaagaatgaatattgatcttaaaaaaagaaaagaagacaaaaaaaatacccaaagccatccgtgtctctgctgtatgtcattaacttttgccttcaatgtcaagtttatggggtggtaggtttgatgcccagccaagccctttcccaggggacctgttgggtgctctgcctgcctccctctggtggcttctgtttctccagttttccccctttgcctatctcagaaccataaatctttcaactgcggagggccttgaggtggggctgcctagccaagtcccttttgactgaggccagagatgtaaatgaggcacacagcaagttgctgtctacaagagtatgcacctggactctccagtgctcctttctttcttttttttttcttttttctttttctttttttttttttttttgagactgagttttgctctggttgcccaggctggggtacagtggtggaatctcggctcactgcaacctccgcctcccgggttcaagtgattctcttgcctcagcctcccgagtagctgggattacaggcatgcacc

SEQ ID NO: 6255 - protein, 899 aa, Homo sapiens
MPTLGWLPENRDISEDQSSAEQTQALASQASQFLAKVESFERLIQAGRLMPQDQVKGFQRLKAAHAALEEEYLKACREQHPAQPLAGSKGTPGRFDPRRELEAEIYRLGSCLEELKEHIDQTQQEPEPPGSDSALDSTPALPCLHQPTHLPAPSGQAPMPAIKTSCPEPATTTAAASTGPCPLHVNVEVSSGNSEVEDRPQDPLARLRHKELQMEQVYHGLMERYLSVKSLPEAMRMEEEEEGEEEEEEEGGGDSLEVDGVAATPGKAEATRVLPRQCPVQAEKSHGAPLEEATEKMVSMKPPGFQASLARDGHMSGLGKAEAAPPGPGVPPHPPGTKSAASHQSSMTSLEGSGISERLPQKPLHRGGGPHLEETWMASPETDSGFVGSETSRVSPLTQTPEHRLSHISTAGTLAQPFAASVPRDGASYPKARGSLIPRRATEPSTPRSQAQRYLSSPSGPLRQRAPNFSLERTLAAEMAVPGSEFEGHKRISEQPLPNKTISPPPAPAPAAAPLPCGPTETIPSFLLTRAGRDQAICELQEEVSRLRLRLEDSLHQPLQGSPTRPASAFDRPARTRGRPADSPATWGSHYGSKSTERLPGEPRGEEQIVPPGRQRARSSSVPREVLRLSLSSESELPSLPLFSEKSKTTKDSPQAARDGKRGVGSAGWPDRVTFRGQYTGHEYHVLSPKAVPKGNGTVSCPHCRPIRTQDAGGAVTGDPLGPPPADTLQCPLCGQVGSPPEADGPGSATSGAEKATTRRKASSTPSPKQRSKQAGSSPRPPPGLWYLATAPPAPAPPAFAYISSVPIMPYPPAAVYYAPAGPTSAQPAAKWPPTASPPPARRHRHSIQLDLGDLEELNKALSRAVQAAESVRSTTRQMRSSLSADLRQAHSLRGSCLF

SEQ ID NO: 6256 - DNA, 5566 bp, Homo sapiens
gtgatgaggaaatggaagccagagagttgaagtgacttagggtaagttacaaggtgggtgcagagctggtatatgctaagaagtgaatggcctgtctttccagaggctgaagcagaggatgtggacagcccagcaagttcccatgagcctcttgcctggctcccccagcagggccgtcagctggacatgactgaagaggagccagatgggaccctcggaagtctggaggttgaggaggctggagagagctcctcaaggttggggtatgaggctggtctcagcttggaaggccatggaaacaccagccccatggctcttgggcatggtcaggccaggggctgggtggcttctggcgaacaagccagtggggacaaactttctgaacattccgaggtcaacccatccgttgaactcagcccggcaaggtcctggagcagtgggacagtgagcctcgaccaccctagtgacagccttgattctacctgggaaggagagaccgatggcccccagcccactgccctggcagaaaccttgccagagggccccagccaccacctcctaagcccagatggcagaactggaggcagtgttgctcgggcaacccccatggaattccaggactcctcagctcccccagcccagagtccgcagcatgccacagatagatggaggagagaaacgaccagattcttctgccctcagcccaaggaacacatctggaagcagacaaagacgtcacctaagccactcccttcccgattcattggctccatcagccccctgaatccccagcccaggccaacgcggcagggcaggccgctgcccagacagggagccactctggctggccgctcctcttctaatgcccccaagtatggccgggggcagttgaactacccactccctgatttctccaaggtagggccccgggtgagattccccaaagatgagagctaccgtccccccaagtccagaagccacaacaggaagcctcaggcccctgccaggcccctcatcttcaagtctccagctgagattgtgcaggaggtgctgttgagcagtggagaagcagccctggcaaaggacacgcctcctgcccaccctatcaccagggtaccccaagaatttcagacgcctgagcaagccactgagctggtccatcagctccaggaagactaccacaggctcctcaccaagtacgctgaggccgagaacaccattgaccagctacgcctcggggccaaggtgaacctgttctctgacccaccccagcccaaccacagcatccacacgggaatggtgccccaggggaccaaggtcttgtccttcaccatcccacagccccgctctgcagagtggtggccgggcccggccgaggacccccaggcctctgcggcctcagggtggccatcagctcgaggagacttgagcccctcctcgcttaccagcatgcccaccctggggtggcttccggagaaccgggacatctctgaggaccagtcctcagcagagcagacccaggcactggcttctcaggccagccagttcctggccaaggtggagtcctttgaaagactgatacaggcaggacgtctcatgccccaggaccaagtcaagggcttccagcggctgaaggctgcccacgcggccctagaggaggagtacctgaaggcttgtcgggagcaacaccctgcccagccgcttgccggctccaaggggacgcctggaagatttgatcctcgcagggagctggaggcagagatataccgtctgggaagctgcctggaagagctgaaggaacacatagaccagacccagcaagagcctgagccgcccgggtcagactcagctctggacagcaccccagccctgccctgcctccatcagccaacgcacctgcctgctccttctggacaagcccccatgccagccatcaagacctcctgccctgagcctgctaccaccactgccgccgccagcactggcccctgcccattgcacgtaaatgtggaggtgagctctggcaacagtgaggtggaggacaggccacaggaccccctggcccgactcaggcacaaggagctgcagatggagcaagtttaccatggcctcatggagcggtacctcagtgtgaagtctctcccagaagccatgagaatggaggaggaggaagaaggagaggaggaggaggaggaagaggggggaggtgactccctggaagttgatggggtggctgcaactccagggaaagcagaggccaccagggtcctcccaaggcagtgcccggtgcaggctgagaaaagtcatggggctcccctggaggaggccacggagaagatggtatctatgaagccaccaggtttccaggcatccctggctagagacgggcacatgtcaggcctgggcaaggctgaggcagcccctccaggccctggcgtgccaccccaccctccaggcaccaagtccgcagcatcccaccaaagtagtatgaccagcctggagggaagcggcatctctgagcgccttccacagaagcctttgcaccgaggcggtgggccccacctggaggagacctggatggcgtccccagagacagacagtggctttgtgggctcagaaacaagcagagtttcacccctcacccagactccagagcaccggctctcccacatcagcacagcaggaacattagcccagccctttgctgcatctgtgcccagggatggagcttcctaccccaaggccaggggttctctgattcccagaagagccacagagcccagcacaccccggagccaagcacagaggtacctctccagcccaagtgggcctctccggcagagggcacccaacttcagcctggagcggacactggcagccgagatggcggttcctggctcagagtttgaggggcacaaacggatttctgaacagccccttcccaacaagacaatcagcccacccccagcccccgcccctgccgctgcgcctctaccctgtggaccaacagagaccatccccagcttcctgctcaccagggcagggcgagaccaggccatctgtgagctgcaagaagaggtgtcccggcttcgtctgcggctggaagacagcctgcaccagccactccagggcagcccgacacgcccagcatctgcctttgaccgccccgcccggacccgcggccggccagcagactccccagccacctggggctcccattatggcagtaaatccacagagagattgcctggtgagcctagaggtgaagagcagattgtccctccaggaaggcagcgagccaggtcttcctcagtgcctcgggaggtgctccgactgtccctgagttcagaatctgagctgccctccctaccactgttctctgagaagagcaagaccaccaaggacagtccacaggcagctcgggatggaaagagaggggtgggcagtgctggatggccagacagggtcaccttccggggccaatacacaggccacgaataccatgttctgtcccctaaggcggtcccaaaaggcaatggcacagtctcctgtccccactgccggcccattaggacccaggatgcgggtggtgctgtcacaggggacccactgggaccgcctcccgctgatacccttcagtgtcccctgtgtggtcaagttgggtctcccccagaggcagatggtccaggctcagccacctctggggcagagaaggccaccacgaggagaaaagcatcttcaactcccagccccaagcagaggagcaagcaggcggggtcgtcgccacgcccaccccccggactgtggtatctggcaacagcgcccccagcaccagcccctccagcctttgcctacatctcctcggttcccatcatgccttatccacctgccgctgtgtactatgcgcctgcaggacctacctcagcccaaccagctgccaagtggccgcccacagcctctcccccaccagcccggagacaccggcactccatccagctcgacctgggcgacctagaggagctcaacaaggccctgagccgggccgtgcaggctgccgagagcgtccgctctaccaccaggcagatgagaagctcgctgtcagccgacctgcgccaggctcacagcctgcggggctcctgcctcttctgacttcactgggggcccagaggcagatgggtgggtgggtgggcaggtggcctgccaggccaggagtgggctggagctgctgaggcccagaaggcccgcatagttcctcaccaggagggtctccctccagcacaggtcccgcctgctcagtccctgtgctttccaagtggagggggtgtcagctcggtcaccaagagaagtgacttcccaggagcaccagtcccctcacagaggtgctgtgagcgaggcctccttcggtccaggcagaacctcaggcagtctctcctggtcctgcatgtgtgcaactccagctaataataggtattttatatacagatggacagatatttttttaaactggggagttttcctgatcttgggtcctctttagggggccagacaagaaaggcctacggtttctggagcaaacctgtcccccacctgtgaccagtcactctggggcaagcatcactgggaagggcatagccggagacctttctcctagtgactggtagtcagtggggcattttaggatgtcagggccccagggtgacatgtgtccagcttttctatggcagcagaggcctttccctcagacaagctacaaagtgcccaggatgccatccaccatggtccccttcagtacctcacgcatggtccccagcttctcctaggatcccagtggcgtttatcagtggccagctacctgccaggcccgggctggggcacggtctgcggccatgaggccaggccgcctcccgcacccctaccccgtggcagcagcatacctctgcatttctggaatgtgtgtgcatcaatgatgtttgtatatttgaggcatttaaaaatctattttcgttacgagggcaaatgaagaatgaatattgatcttaaaaaaagaaaagaagacaaaaaaaatacccaaagccatccgtgtctctgctgtatgtcattaacttttgccttcaatgtcaagtttatggggtggtaggtttgatgcccagccaagccctttcccaggggacctgttgggtgctctgcctgcctccctctggtggcttctgtttctccagttttccccctttgcctatctcagaaccataaatctttcaactgcggagggccttgaggtggggctgcctagccaagtcccttttgactgaggccagagatgtaaatgaggcacacagcaagttgctgtctacaagagtatgcacctggactctccagtgctcctttctttcttttttttttcttttttctttttctttttttttttttttttgagactgagttttgctctggttgcccaggctggggtacagtggtggaatctcggctcactgcaacctccgcctcccgggttcaagtgattctcttgcctcagcctcccgagtagctgggattacaggcatgcacc

SEQ ID NO: 6257 - protein, 1358 aa, Homo sapiens
MLRSEWPVFPEAEAEDVDSPASSHEPLAWLPQQGRQLDMTEEEPDGTLGSLEVEEAGESSSRLGYEAGLSLEGHGNTSPMALGHGQARGWVASGEQASGDKLSEHSEVNPSVELSPARSWSSGTVSLDHPSDSLDSTWEGETDGPQPTALAETLPEGPSHHLLSPDGRTGGSVARATPMEFQDSSAPPAQSPQHATDRWRRETTRFFCPQPKEHIWKQTKTSPKPLPSRFIGSISPLNPQPRPTRQGRPLPRQGATLAGRSSSNAPKYGRGQLNYPLPDFSKVGPRVRFPKDESYRPPKSRSHNRKPQAPARPLIFKSPAEIVQEVLLSSGEAALAKDTPPAHPITRVPQEFQTPEQATELVHQLQEDYHRLLTKYAEAENTIDQLRLGAKVNLFSDPPQPNHSIHTGMVPQGTKVLSFTIPQPRSAEWWPGPAEDPQASAASGWPSARGDLSPSSLTSMPTLGWLPENRDISEDQSSAEQTQALASQASQFLAKVESFERLIQAGRLMPQDQVKGFQRLKAAHAALEEEYLKACREQHPAQPLAGSKGTPGRFDPRRELEAEIYRLGSCLEELKEHIDQTQQEPEPPGSDSALDSTPALPCLHQPTHLPAPSGQAPMPAIKTSCPEPATTTAAASTGPCPLHVNVEVSSGNSEVEDRPQDPLARLRHKELQMEQVYHGLMERYLSVKSLPEAMRMEEEEEGEEEEEEEGGGDSLEVDGVAATPGKAEATRVLPRQCPVQAEKSHGAPLEEATEKMVSMKPPGFQASLARDGHMSGLGKAEAAPPGPGVPPHPPGTKSAASHQSSMTSLEGSGISERLPQKPLHRGGGPHLEETWMASPETDSGFVGSETSRVSPLTQTPEHRLSHISTAGTLAQPFAASVPRDGASYPKARGSLIPRRATEPSTPRSQAQRYLSSPSGPLRQRAPNFSLERTLAAEMAVPGSEFEGHKRISEQPLPNKTISPPPAPAPAAAPLPCGPTETIPSFLLTRAGRDQAICELQEEVSRLRLRLEDSLHQPLQGSPTRPASAFDRPARTRGRPADSPATWGSHYGSKSTERLPGEPRGEEQIVPPGRQRARSSSVPREVLRLSLSSESELPSLPLFSEKSKTTKDSPQAARDGKRGVGSAGWPDRVTFRGQYTGHEYHVLSPKAVPKGNGTVSCPHCRPIRTQDAGGAVTGDPLGPPPADTLQCPLCGQVGSPPEADGPGSATSGAEKATTRRKASSTPSPKQRSKQAGSSPRPPPGLWYLATAPPAPAPPAFAYISSVPIMPYPPAAVYYAPAGPTSAQPAAKWPPTASPPPARRHRHSIQLDLGDLEELNKALSRAVQAAESVRSTTRQMRSSLSADLRQAHSLRGSCLF

SEQ ID NO: 6258 - DNA, 6012 bp, Homo sapiens
gggagcgatgctggtctgtgagcagcagcttgggctggcagaacggcctggaggtgggccagggcgcaatggagacagggggctccctgggtttggaacaaagaattcacaggcaggtcccctgaaactgggtcggcaggacggtggtggagcccgagagagggcacaggcaggatggccgatgctgacaggaaccagcggtgactctggggcccctggcagcagctctgtctcctgaagatgaagtggcccaggtgaagcccaggccagccccaatggccagctcggagactgagatccgctgggctgagcctggcctggggaagggcccccagcggcggcgctgggcctgggccgaggacaagagggatgtggatagaagtagttcacaaagctgggaagaagagagactctttcccaatgccaccagccccgagctcctagaggacttccgcctggcccagcagcacctgccgcccctggagtgggacccacacccgcagcccgatgggcatcaggattccgagtcaggagagacttcgggagaagaggctgaagcagaggatgtggacagcccagcaagttcccatgagcctcttgcctggctcccccagcagggccgtcagctggacatgactgaagaggagccagatgggaccctcggaagtctggaggttgaggaggctggagagagctcctcaaggttggggtatgaggctggtctcagcttggaaggccatggaaacaccagccccatggctcttgggcatggtcaggccaggggctgggtggcttctggcgaacaagccagtggggacaaactttctgaacattccgaggtcaacccatccgttgaactcagcccggcaaggtcctggagcagtgggacagtgagcctcgaccaccctagtgacagccttgattctacctgggaaggagagaccgatggcccccagcccactgccctggcagaaaccttgccagagggccccagccaccacctcctaagcccagatggcagaactggaggcagtgttgctcgggcaacccccatggaattccaggactcctcagctcccccagcccagagtccgcagcatgccacagatagatggaggagagaaacgaccagattcttctgccctcagcccaaggaacacatctggaagcagacaaagacgtcacctaagccactcccttcccgattcattggctccatcagccccctgaatccccagcccaggccaacgcggcagggcaggccgctgcccagacagggagccactctggctggccgctcctcttctaatgcccccaagtatggccgggggcagttgaactacccactccctgatttctccaaggtagggccccgggtgagattccccaaagatgagagctaccgtccccccaagtccagaagccacaacaggaagcctcaggcccctgccaggcccctcatcttcaagtctccagctgagattgtgcaggaggtgctgttgagcagtggagaagcagccctggcaaaggacacgcctcctgcccaccctatcaccagggtaccccaagaatttcagacgcctgagcaagccactgagctggtccatcagctccaggaagactaccacaggctcctcaccaagtacgctgaggccgagaacaccattgaccagctacgcctcggggccaaggtgaacctgttctctgacccaccccagcccaaccacagcatccacacgggaatggtgccccaggggaccaaggtcttgtccttcaccatcccacagccccgctctgcagagtggtggccgggcccggccgaggacccccaggcctctgcggcctcagggtggccatcagctcgaggagacttgagcccctcctcgcttaccagcatgcccaccctggggtggcttccggagaaccgggacatctctgaggaccagtcctcagcagagcagacccaggcactggcttctcaggccagccagttcctggccaaggtggagtcctttgaaagactgatacaggcaggacgtctcatgccccaggaccaagtcaagggcttccagcggctgaaggctgcccacgcggccctagaggaggagtacctgaaggcttgtcgggagcaacaccctgcccagccgcttgccggctccaaggggacgcctggaagatttgatcctcgcagggagctggaggcagagatataccgtctgggaagctgcctggaagagctgaaggaacacatagaccagacccagcaagagcctgagccgcccgggtcagactcagctctggacagcaccccagccctgccctgcctccatcagccaacgcacctgcctgctccttctggacaagcccccatgccagccatcaagacctcctgccctgagcctgctaccaccactgccgccgccagcactggcccctgcccattgcacgtaaatgtggaggtgagctctggcaacagtgaggtggaggacaggccacaggaccccctggcccgactcaggcacaaggagctgcagatggagcaagtttaccatggcctcatggagcggtacctcagtgtgaagtctctcccagaagccatgagaatggaggaggaggaagaaggagaggaggaggaggaggaagaggggggaggtgactccctggaagttgatggggtggctgcaactccagggaaagcagaggccaccagggtcctcccaaggcagtgcccggtgcaggctgagaaaagtcatggggctcccctggaggaggccacggagaagatggtatctatgaagccaccaggtttccaggcatccctggctagagacgggcacatgtcaggcctgggcaaggctgaggcagcccctccaggccctggcgtgccaccccaccctccaggcaccaagtccgcagcatcccaccaaagtagtatgaccagcctggagggaagcggcatctctgagcgccttccacagaagcctttgcaccgaggcggtgggccccacctggaggagacctggatggcgtccccagagacagacagtggctttgtgggctcagaaacaagcagagtttcacccctcacccagactccagagcaccggctctcccacatcagcacagcaggaacattagcccagccctttgctgcatctgtgcccagggatggagcttcctaccccaaggccaggggttctctgattcccagaagagccacagagcccagcacaccccggagccaagcacagaggtacctctccagcccaagtgggcctctccggcagagggcacccaacttcagcctggagcggacactggcagccgagatggcggttcctggctcagagtttgaggggcacaaacggatttctgaacagccccttcccaacaagacaatcagcccacccccagcccccgcccctgccgctgcgcctctaccctgtggaccaacagagaccatccccagcttcctgctcaccagggcagggcgagaccaggccatctgtgagctgcaagaagaggtgtcccggcttcgtctgcggctggaagacagcctgcaccagccactccagggcagcccgacacgcccagcatctgcctttgaccgccccgcccggacccgcggccggccagcagactccccagccacctggggctcccattatggcagtaaatccacagagagattgcctggtgagcctagaggtgaagagcagattgtccctccaggaaggcagcgagccaggtcttcctcagtgcctcgggaggtgctccgactgtccctgagttcagaatctgagctgccctccctaccactgttctctgagaagagcaagaccaccaaggacagtccacaggcagctcgggatggaaagagaggggtgggcagtgctggatggccagacagggtcaccttccggggccaatacacaggccacgaataccatgttctgtcccctaaggcggtcccaaaaggcaatggcacagtctcctgtccccactgccggcccattaggacccaggatgcgggtggtgctgtcacaggggacccactgggaccgcctcccgctgatacccttcagtgtcccctgtgtggtcaagttgggtctcccccagaggcagatggtccaggctcagccacctctggggcagagaaggccaccacgaggagaaaagcatcttcaactcccagccccaagcagaggagcaagcaggcggggtcgtcgccacgcccaccccccggactgtggtatctggcaacagcgcccccagcaccagcccctccagcctttgcctacatctcctcggttcccatcatgccttatccacctgccgctgtgtactatgcgcctgcaggacctacctcagcccaaccagctgccaagtggccgcccacagcctctcccccaccagcccggagacaccggcactccatccagctcgacctgggcgacctagaggagctcaacaaggccctgagccgggccgtgcaggctgccgagagcgtccgctctaccaccaggcagatgagaagctcgctgtcagccgacctgcgccaggctcacagcctgcggggctcctgcctcttctgacttcactgggggcccagaggcagatgggtgggtgggtgggcaggtggcctgccaggccaggagtgggctggagctgctgaggcccagaaggcccgcatagttcctcaccaggagggtctccctccagcacaggtcccgcctgctcagtccctgtgctttccaagtggagggggtgtcagctcggtcaccaagagaagtgacttcccaggagcaccagtcccctcacagaggtgctgtgagcgaggcctccttcggtccaggcagaacctcaggcagtctctcctggtcctgcatgtgtgcaactccagctaataataggtattttatatacagatggacagatatttttttaaactggggagttttcctgatcttgggtcctctttagggggccagacaagaaaggcctacggtttctggagcaaacctgtcccccacctgtgaccagtcactctggggcaagcatcactgggaagggcatagccggagacctttctcctagtgactggtagtcagtggggcattttaggatgtcagggccccagggtgacatgtgtccagcttttctatggcagcagaggcctttccctcagacaagctacaaagtgcccaggatgccatccaccatggtccccttcagtacctcacgcatggtccccagcttctcctaggatcccagtggcgtttatcagtggccagctacctgccaggcccgggctggggcacggtctgcggccatgaggccaggccgcctcccgcacccctaccccgtggcagcagcatacctctgcatttctggaatgtgtgtgcatcaatgatgtttgtatatttgaggcatttaaaaatctattttcgttacgagggcaaatgaagaatgaatattgatcttaaaaaaagaaaagaagacaaaaaaaatacccaaagccatccgtgtctctgctgtatgtcattaacttttgccttcaatgtcaagtttatggggtggtaggtttgatgcccagccaagccctttcccaggggacctgttgggtgctctgcctgcctccctctggtggcttctgtttctccagttttccccctttgcctatctcagaaccataaatctttcaactgcggagggccttgaggtggggctgcctagccaagtcccttttgactgaggccagagatgtaaatgaggcacacagcaagttgctgtctacaagagtatgcacctggactctccagtgctcctttctttcttttttttttcttttttctttttctttttttttttttttttgagactgagttttgctctggttgcccaggctggggtacagtggtggaatctcggctcactgcaacctccgcctcccgggttcaagtgattctcttgcctcagcctcccgagtagctgggattacaggcatgcacc

SEQ ID NO: 6259 - protein, 1439 aa, Homo sapiens; identical to SEQ ID NO: 853

SEQ ID NO: 6260 - DNA, 5512 bp, Homo sapiens
gcaactgaagacggaggtgcccaaggtcagaaggaagcaccacacagagaggctgaagcagaggatgtggacagcccagcaagttcccatgagcctcttgcctggctcccccagcagggccgtcagctggacatgactgaagaggagccagatgggaccctcggaagtctggaggttgaggaggctggagagagctcctcaaggttggggtatgaggctggtctcagcttggaaggccatggaaacaccagccccatggctcttgggcatggtcaggccaggggctgggtggcttctggcgaacaagccagtggggacaaactttctgaacattccgaggtcaacccatccgttgaactcagcccggcaaggtcctggagcagtgggacagtgagcctcgaccaccctagtgacagccttgattctacctgggaaggagagaccgatggcccccagcccactgccctggcagaaaccttgccagagggccccagccaccacctcctaagcccagatggcagaactggaggcagtgttgctcgggcaacccccatggaattccaggactcctcagctcccccagcccagagtccgcagcatgccacagatagatggaggagagaaacgaccagattcttctgccctcagcccaaggaacacatctggaagcagacaaagacgtcacctaagccactcccttcccgattcattggctccatcagccccctgaatccccagcccaggccaacgcggcagggcaggccgctgcccagacagggagccactctggctggccgctcctcttctaatgcccccaagtatggccgggggcagttgaactacccactccctgatttctccaaggtagggccccgggtgagattccccaaagatgagagctaccgtccccccaagtccagaagccacaacaggaagcctcaggcccctgccaggcccctcatcttcaagtctccagctgagattgtgcaggaggtgctgttgagcagtggagaagcagccctggcaaaggacacgcctcctgcccaccctatcaccagggtaccccaagaatttcagacgcctgagcaagccactgagctggtccatcagctccaggaagactaccacaggctcctcaccaagtacgctgaggccgagaacaccattgaccagctacgcctcggggccaaggtgaacctgttctctgacccaccccagcccaaccacagcatccacacgggaatggtgccccaggggaccaaggtcttgtccttcaccatcccacagccccgctctgcagagtggtggccgggcccggccgaggacccccaggcctctgcggcctcagggtggccatcagctcgaggagacttgagcccctcctcgcttaccagcatgcccaccctggggtggcttccggagaaccgggacatctctgaggaccagtcctcagcagagcagacccaggcactggcttctcaggccagccagttcctggccaaggtggagtcctttgaaagactgatacaggcaggacgtctcatgccccaggaccaagtcaagggcttccagcggctgaaggctgcccacgcggccctagaggaggagtacctgaaggcttgtcgggagcaacaccctgcccagccgcttgccggctccaaggggacgcctggaagatttgatcctcgcagggagctggaggcagagatataccgtctgggaagctgcctggaagagctgaaggaacacatagaccagacccagcaagagcctgagccgcccgggtcagactcagctctggacagcaccccagccctgccctgcctccatcagccaacgcacctgcctgctccttctggacaagcccccatgccagccatcaagacctcctgccctgagcctgctaccaccactgccgccgccagcactggcccctgcccattgcacgtaaatgtggaggtgagctctggcaacagtgaggtggaggacaggccacaggaccccctggcccgactcaggcacaaggagctgcagatggagcaagtttaccatggcctcatggagcggtacctcagtgtgaagtctctcccagaagccatgagaatggaggaggaggaagaaggagaggaggaggaggaggaagaggggggaggtgactccctggaagttgatggggtggctgcaactccagggaaagcagaggccaccagggtcctcccaaggcagtgcccggtgcaggctgagaaaagtcatggggctcccctggaggaggccacggagaagatggtatctatgaagccaccaggtttccaggcatccctggctagagacgggcacatgtcaggcctgggcaaggctgaggcagcccctccaggccctggcgtgccaccccaccctccaggcaccaagtccgcagcatcccaccaaagtagtatgaccagcctggagggaagcggcatctctgagcgccttccacagaagcctttgcaccgaggcggtgggccccacctggaggagacctggatggcgtccccagagacagacagtggctttgtgggctcagaaacaagcagagtttcacccctcacccagactccagagcaccggctctcccacatcagcacagcaggaacattagcccagccctttgctgcatctgtgcccagggatggagcttcctaccccaaggccaggggttctctgattcccagaagagccacagagcccagcacaccccggagccaagcacagaggtacctctccagcccaagtgggcctctccggcagagggcacccaacttcagcctggagcggacactggcagccgagatggcggttcctggctcagagtttgaggggcacaaacggatttctgaacagccccttcccaacaagacaatcagcccacccccagcccccgcccctgccgctgcgcctctaccctgtggaccaacagagaccatccccagcttcctgctcaccagggcagggcgagaccaggccatctgtgagctgcaagaagaggtgtcccggcttcgtctgcggctggaagacagcctgcaccagccactccagggcagcccgacacgcccagcatctgcctttgaccgccccgcccggacccgcggccggccagcagactccccagccacctggggctcccattatggcagtaaatccacagagagattgcctggtgagcctagaggtgaagagcagattgtccctccaggaaggcagcgagccaggtcttcctcagtgcctcgggaggtgctccgactgtccctgagttcagaatctgagctgccctccctaccactgttctctgagaagagcaagaccaccaaggacagtccacaggcagctcgggatggaaagagaggggtgggcagtgctggatggccagacagggtcaccttccggggccaatacacaggccacgaataccatgttctgtcccctaaggcggtcccaaaaggcaatggcacagtctcctgtccccactgccggcccattaggacccaggatgcgggtggtgctgtcacaggggacccactgggaccgcctcccgctgatacccttcagtgtcccctgtgtggtcaagttgggtctcccccagaggcagatggtccaggctcagccacctctggggcagagaaggccaccacgaggagaaaagcatcttcaactcccagccccaagcagaggagcaagcaggcggggtcgtcgccacgcccaccccccggactgtggtatctggcaacagcgcccccagcaccagcccctccagcctttgcctacatctcctcggttcccatcatgccttatccacctgccgctgtgtactatgcgcctgcaggacctacctcagcccaaccagctgccaagtggccgcccacagcctctcccccaccagcccggagacaccggcactccatccagctcgacctgggcgacctagaggagctcaacaaggccctgagccgggccgtgcaggctgccgagagcgtccgctctaccaccaggcagatgagaagctcgctgtcagccgacctgcgccaggctcacagcctgcggggctcctgcctcttctgacttcactgggggcccagaggcagatgggtgggtgggtgggcaggtggcctgccaggccaggagtgggctggagctgctgaggcccagaaggcccgcatagttcctcaccaggagggtctccctccagcacaggtcccgcctgctcagtccctgtgctttccaagtggagggggtgtcagctcggtcaccaagagaagtgacttcccaggagcaccagtcccctcacagaggtgctgtgagcgaggcctccttcggtccaggcagaacctcaggcagtctctcctggtcctgcatgtgtgcaactccagctaataataggtattttatatacagatggacagatatttttttaaactggggagttttcctgatcttgggtcctctttagggggccagacaagaaaggcctacggtttctggagcaaacctgtcccccacctgtgaccagtcactctggggcaagcatcactgggaagggcatagccggagacctttctcctagtgactggtagtcagtggggcattttaggatgtcagggccccagggtgacatgtgtccagcttttctatggcagcagaggcctttccctcagacaagctacaaagtgcccaggatgccatccaccatggtccccttcagtacctcacgcatggtccccagcttctcctaggatcccagtggcgtttatcagtggccagctacctgccaggcccgggctggggcacggtctgcggccatgaggccaggccgcctcccgcacccctaccccgtggcagcagcatacctctgcatttctggaatgtgtgtgcatcaatgatgtttgtatatttgaggcatttaaaaatctattttcgttacgagggcaaatgaagaatgaatattgatcttaaaaaaagaaaagaagacaaaaaaaatacccaaagccatccgtgtctctgctgtatgtcattaacttttgccttcaatgtcaagtttatggggtggtaggtttgatgcccagccaagccctttcccaggggacctgttgggtgctctgcctgcctccctctggtggcttctgtttctccagttttccccctttgcctatctcagaaccataaatctttcaactgcggagggccttgaggtggggctgcctagccaagtcccttttgactgaggccagagatgtaaatgaggcacacagcaagttgctgtctacaagagtatgcacctggactctccagtgctcctttctttcttttttttttcttttttctttttctttttttttttttttttgagactgagttttgctctggttgcccaggctggggtacagtggtggaatctcggctcactgcaacctccgcctcccgggttcaagtgattctcttgcctcagcctcccgagtagctgggattacaggcatgcacc

SEQ ID NO: 6261 - protein, 1320 aa, Homo sapiens
MTEEEPDGTLGSLEVEEAGESSSRLGYEAGLSLEGHGNTSPMALGHGQARGWVASGEQASGDKLSEHSEVNPSVELSPARSWSSGTVSLDHPSDSLDSTWEGETDGPQPTALAETLPEGPSHHLLSPDGRTGGSVARATPMEFQDSSAPPAQSPQHATDRWRRETTRFFCPQPKEHIWKQTKTSPKPLPSRFIGSISPLNPQPRPTRQGRPLPRQGATLAGRSSSNAPKYGRGQLNYPLPDFSKVGPRVRFPKDESYRPPKSRSHNRKPQAPARPLIFKSPAEIVQEVLLSSGEAALAKDTPPAHPITRVPQEFQTPEQATELVHQLQEDYHRLLTKYAEAENTIDQLRLGAKVNLFSDPPQPNHSIHTGMVPQGTKVLSFTIPQPRSAEWWPGPAEDPQASAASGWPSARGDLSPSSLTSMPTLGWLPENRDISEDQSSAEQTQALASQASQFLAKVESFERLIQAGRLMPQDQVKGFQRLKAAHAALEEEYLKACREQHPAQPLAGSKGTPGRFDPRRELEAEIYRLGSCLEELKEHIDQTQQEPEPPGSDSALDSTPALPCLHQPTHLPAPSGQAPMPAIKTSCPEPATTTAAASTGPCPLHVNVEVSSGNSEVEDRPQDPLARLRHKELQMEQVYHGLMERYLSVKSLPEAMRMEEEEEGEEEEEEEGGGDSLEVDGVAATPGKAEATRVLPRQCPVQAEKSHGAPLEEATEKMVSMKPPGFQASLARDGHMSGLGKAEAAPPGPGVPPHPPGTKSAASHQSSMTSLEGSGISERLPQKPLHRGGGPHLEETWMASPETDSGFVGSETSRVSPLTQTPEHRLSHISTAGTLAQPFAASVPRDGASYPKARGSLIPRRATEPSTPRSQAQRYLSSPSGPLRQRAPNFSLERTLAAEMAVPGSEFEGHKRISEQPLPNKTISPPPAPAPAAAPLPCGPTETIPSFLLTRAGRDQAICELQEEVSRLRLRLEDSLHQPLQGSPTRPASAFDRPARTRGRPADSPATWGSHYGSKSTERLPGEPRGEEQIVPPGRQRARSSSVPREVLRLSLSSESELPSLPLFSEKSKTTKDSPQAARDGKRGVGSAGWPDRVTFRGQYTGHEYHVLSPKAVPKGNGTVSCPHCRPIRTQDAGGAVTGDPLGPPPADTLQCPLCGQVGSPPEADGPGSATSGAEKATTRRKASSTPSPKQRSKQAGSSPRPPPGLWYLATAPPAPAPPAFAYISSVPIMPYPPAAVYYAPAGPTSAQPAAKWPPTASPPPARRHRHSIQLDLGDLEELNKALSRAVQAAESVRSTTRQMRSSLSADLRQAHSLRGSCLF

SEQ ID NO: 6262 - DNA, 5493 bp, Homo sapiens
aaaccacccgcgctcggcggccgccagcagaggctgaagcagaggatgtggacagcccagcaagttcccatgagcctcttgcctggctcccccagcagggccgtcagctggacatgactgaagaggagccagatgggaccctcggaagtctggaggttgaggaggctggagagagctcctcaaggttggggtatgaggctggtctcagcttggaaggccatggaaacaccagccccatggctcttgggcatggtcaggccaggggctgggtggcttctggcgaacaagccagtggggacaaactttctgaacattccgaggtcaacccatccgttgaactcagcccggcaaggtcctggagcagtgggacagtgagcctcgaccaccctagtgacagccttgattctacctgggaaggagagaccgatggcccccagcccactgccctggcagaaaccttgccagagggccccagccaccacctcctaagcccagatggcagaactggaggcagtgttgctcgggcaacccccatggaattccaggactcctcagctcccccagcccagagtccgcagcatgccacagatagatggaggagagaaacgaccagattcttctgccctcagcccaaggaacacatctggaagcagacaaagacgtcacctaagccactcccttcccgattcattggctccatcagccccctgaatccccagcccaggccaacgcggcagggcaggccgctgcccagacagggagccactctggctggccgctcctcttctaatgcccccaagtatggccgggggcagttgaactacccactccctgatttctccaaggtagggccccgggtgagattccccaaagatgagagctaccgtccccccaagtccagaagccacaacaggaagcctcaggcccctgccaggcccctcatcttcaagtctccagctgagattgtgcaggaggtgctgttgagcagtggagaagcagccctggcaaaggacacgcctcctgcccaccctatcaccagggtaccccaagaatttcagacgcctgagcaagccactgagctggtccatcagctccaggaagactaccacaggctcctcaccaagtacgctgaggccgagaacaccattgaccagctacgcctcggggccaaggtgaacctgttctctgacccaccccagcccaaccacagcatccacacgggaatggtgccccaggggaccaaggtcttgtccttcaccatcccacagccccgctctgcagagtggtggccgggcccggccgaggacccccaggcctctgcggcctcagggtggccatcagctcgaggagacttgagcccctcctcgcttaccagcatgcccaccctggggtggcttccggagaaccgggacatctctgaggaccagtcctcagcagagcagacccaggcactggcttctcaggccagccagttcctggccaaggtggagtcctttgaaagactgatacaggcaggacgtctcatgccccaggaccaagtcaagggcttccagcggctgaaggctgcccacgcggccctagaggaggagtacctgaaggcttgtcgggagcaacaccctgcccagccgcttgccggctccaaggggacgcctggaagatttgatcctcgcagggagctggaggcagagatataccgtctgggaagctgcctggaagagctgaaggaacacatagaccagacccagcaagagcctgagccgcccgggtcagactcagctctggacagcaccccagccctgccctgcctccatcagccaacgcacctgcctgctccttctggacaagcccccatgccagccatcaagacctcctgccctgagcctgctaccaccactgccgccgccagcactggcccctgcccattgcacgtaaatgtggaggtgagctctggcaacagtgaggtggaggacaggccacaggaccccctggcccgactcaggcacaaggagctgcagatggagcaagtttaccatggcctcatggagcggtacctcagtgtgaagtctctcccagaagccatgagaatggaggaggaggaagaaggagaggaggaggaggaggaagaggggggaggtgactccctggaagttgatggggtggctgcaactccagggaaagcagaggccaccagggtcctcccaaggcagtgcccggtgcaggctgagaaaagtcatggggctcccctggaggaggccacggagaagatggtatctatgaagccaccaggtttccaggcatccctggctagagacgggcacatgtcaggcctgggcaaggctgaggcagcccctccaggccctggcgtgccaccccaccctccaggcaccaagtccgcagcatcccaccaaagtagtatgaccagcctggagggaagcggcatctctgagcgccttccacagaagcctttgcaccgaggcggtgggccccacctggaggagacctggatggcgtccccagagacagacagtggctttgtgggctcagaaacaagcagagtttcacccctcacccagactccagagcaccggctctcccacatcagcacagcaggaacattagcccagccctttgctgcatctgtgcccagggatggagcttcctaccccaaggccaggggttctctgattcccagaagagccacagagcccagcacaccccggagccaagcacagaggtacctctccagcccaagtgggcctctccggcagagggcacccaacttcagcctggagcggacactggcagccgagatggcggttcctggctcagagtttgaggggcacaaacggatttctgaacagccccttcccaacaagacaatcagcccacccccagcccccgcccctgccgctgcgcctctaccctgtggaccaacagagaccatccccagcttcctgctcaccagggcagggcgagaccaggccatctgtgagctgcaagaagaggtgtcccggcttcgtctgcggctggaagacagcctgcaccagccactccagggcagcccgacacgcccagcatctgcctttgaccgccccgcccggacccgcggccggccagcagactccccagccacctggggctcccattatggcagtaaatccacagagagattgcctggtgagcctagaggtgaagagcagattgtccctccaggaaggcagcgagccaggtcttcctcagtgcctcgggaggtgctccgactgtccctgagttcagaatctgagctgccctccctaccactgttctctgagaagagcaagaccaccaaggacagtccacaggcagctcgggatggaaagagaggggtgggcagtgctggatggccagacagggtcaccttccggggccaatacacaggccacgaataccatgttctgtcccctaaggcggtcccaaaaggcaatggcacagtctcctgtccccactgccggcccattaggacccaggatgcgggtggtgctgtcacaggggacccactgggaccgcctcccgctgatacccttcagtgtcccctgtgtggtcaagttgggtctcccccagaggcagatggtccaggctcagccacctctggggcagagaaggccaccacgaggagaaaagcatcttcaactcccagccccaagcagaggagcaagcaggcggggtcgtcgccacgcccaccccccggactgtggtatctggcaacagcgcccccagcaccagcccctccagcctttgcctacatctcctcggttcccatcatgccttatccacctgccgctgtgtactatgcgcctgcaggacctacctcagcccaaccagctgccaagtggccgcccacagcctctcccccaccagcccggagacaccggcactccatccagctcgacctgggcgacctagaggagctcaacaaggccctgagccgggccgtgcaggctgccgagagcgtccgctctaccaccaggcagatgagaagctcgctgtcagccgacctgcgccaggctcacagcctgcggggctcctgcctcttctgacttcactgggggcccagaggcagatgggtgggtgggtgggcaggtggcctgccaggccaggagtgggctggagctgctgaggcccagaaggcccgcatagttcctcaccaggagggtctccctccagcacaggtcccgcctgctcagtccctgtgctttccaagtggagggggtgtcagctcggtcaccaagagaagtgacttcccaggagcaccagtcccctcacagaggtgctgtgagcgaggcctccttcggtccaggcagaacctcaggcagtctctcctggtcctgcatgtgtgcaactccagctaataataggtattttatatacagatggacagatatttttttaaactggggagttttcctgatcttgggtcctctttagggggccagacaagaaaggcctacggtttctggagcaaacctgtcccccacctgtgaccagtcactctggggcaagcatcactgggaagggcatagccggagacctttctcctagtgactggtagtcagtggggcattttaggatgtcagggccccagggtgacatgtgtccagcttttctatggcagcagaggcctttccctcagacaagctacaaagtgcccaggatgccatccaccatggtccccttcagtacctcacgcatggtccccagcttctcctaggatcccagtggcgtttatcagtggccagctacctgccaggcccgggctggggcacggtctgcggccatgaggccaggccgcctcccgcacccctaccccgtggcagcagcatacctctgcatttctggaatgtgtgtgcatcaatgatgtttgtatatttgaggcatttaaaaatctattttcgttacgagggcaaatgaagaatgaatattgatcttaaaaaaagaaaagaagacaaaaaaaatacccaaagccatccgtgtctctgctgtatgtcattaacttttgccttcaatgtcaagtttatggggtggtaggtttgatgcccagccaagccctttcccaggggacctgttgggtgctctgcctgcctccctctggtggcttctgtttctccagttttccccctttgcctatctcagaaccataaatctttcaactgcggagggccttgaggtggggctgcctagccaagtcccttttgactgaggccagagatgtaaatgaggcacacagcaagttgctgtctacaagagtatgcacctggactctccagtgctcctttctttcttttttttttcttttttctttttctttttttttttttttttgagactgagttttgctctggttgcccaggctggggtacagtggtggaatctcggctcactgcaacctccgcctcccgggttcaagtgattctcttgcctcagcctcccgagtagctgggattacaggcatgcacc

SEQ ID NO: 6263 - protein, 1320 aa, Homo sapiens; identical to SEQ ID NO: 6261

SEQ ID NO: 6264 - DNA, 6076 bp, Homo sapiens
gattggaggcctttgtttgccgctcaactccaggaaaccacccgcgctcggcggccgccagcagtcctggaaggtgggaatgatctggagaccaggagtaagaagacctgagtttagatccccagcctggattcagttctgagtgcctcagttttcccttccacaaaatgaggaggggcaactgaagacggaggtgcccaaggtcagaaggaagcaccacacagagggcacaggcaggatggccgatgctgacaggaaccagcggtgactctggggcccctggcagcagctctgtctcctgaagatgaagtggcccaggtgaagcccaggccagccccaatggccagctcggagactgagatccgctgggctgagcctggcctggggaagggcccccagcggcggcgctgggcctgggccgaggacaagagggatgtggatagaagtagttcacaaagctgggaagaagagagactctttcccaatgccaccagccccgagctcctagaggacttccgcctggcccagcagcacctgccgcccctggagtgggacccacacccgcagcccgatgggcatcaggattccgagtcaggagagacttcgggagaagaggctgaagcagaggatgtggacagcccagcaagttcccatgagcctcttgcctggctcccccagcagggccgtcagctggacatgactgaagaggagccagatgggaccctcggaagtctggaggttgaggaggctggagagagctcctcaaggttggggtatgaggctggtctcagcttggaaggccatggaaacaccagccccatggctcttgggcatggtcaggccaggggctgggtggcttctggcgaacaagccagtggggacaaactttctgaacattccgaggtcaacccatccgttgaactcagcccggcaaggtcctggagcagtgggacagtgagcctcgaccaccctagtgacagccttgattctacctgggaaggagagaccgatggcccccagcccactgccctggcagaaaccttgccagagggccccagccaccacctcctaagcccagatggcagaactggaggcagtgttgctcgggcaacccccatggaattccaggactcctcagctcccccagcccagagtccgcagcatgccacagatagatggaggagagaaacgaccagattcttctgccctcagcccaaggaacacatctggaagcagacaaagacgtcacctaagccactcccttcccgattcattggctccatcagccccctgaatccccagcccaggccaacgcggcagggcaggccgctgcccagacagggagccactctggctggccgctcctcttctaatgcccccaagtatggccgggggcagttgaactacccactccctgatttctccaaggtagggccccgggtgagattccccaaagatgagagctaccgtccccccaagtccagaagccacaacaggaagcctcaggcccctgccaggcccctcatcttcaagtctccagctgagattgtgcaggaggtgctgttgagcagtggagaagcagccctggcaaaggacacgcctcctgcccaccctatcaccagggtaccccaagaatttcagacgcctgagcaagccactgagctggtccatcagctccaggaagactaccacaggctcctcaccaagtacgctgaggccgagaacaccattgaccagctacgcctcggggccaaggtgaacctgttctctgacccaccccagcccaaccacagcatccacacgggaatggtgccccaggggaccaaggtcttgtccttcaccatcccacagccccgctctgcagagtggtggccgggcccggccgaggacccccaggcctctgcggcctcagggtggccatcagctcgaggagacttgagcccctcctcgcttaccagcatgcccaccctggggtggcttccggagaaccgggacatctctgaggaccagtcctcagcagagcagacccaggcactggcttctcaggccagccagttcctggccaaggtggagtcctttgaaagactgatacaggcaggacgtctcatgccccaggaccaagtcaagggcttccagcggctgaaggctgcccacgcggccctagaggaggagtacctgaaggcttgtcgggagcaacaccctgcccagccgcttgccggctccaaggggacgcctggaagatttgatcctcgcagggagctggaggcagagatataccgtctgggaagctgcctggaagagctgaaggaacacatagaccagacccagcaagagcctgagccgcccgggtcagactcagctctggacagcaccccagccctgccctgcctccatcagccaacgcacctgcctgctccttctggacaagcccccatgccagccatcaagacctcctgccctgagcctgctaccaccactgccgccgccagcactggcccctgcccattgcacgtaaatgtggaggtgagctctggcaacagtgaggtggaggacaggccacaggaccccctggcccgactcaggcacaaggagctgcagatggagcaagtttaccatggcctcatggagcggtacctcagtgtgaagtctctcccagaagccatgagaatggaggaggaggaagaaggagaggaggaggaggaggaagaggggggaggtgactccctggaagttgatggggtggctgcaactccagggaaagcagaggccaccagggtcctcccaaggcagtgcccggtgcaggctgagaaaagtcatggggctcccctggaggaggccacggagaagatggtatctatgaagccaccaggtttccaggcatccctggctagagacgggcacatgtcaggcctgggcaaggctgaggcagcccctccaggccctggcgtgccaccccaccctccaggcaccaagtccgcagcatcccaccaaagtagtatgaccagcctggagggaagcggcatctctgagcgccttccacagaagcctttgcaccgaggcggtgggccccacctggaggagacctggatggcgtccccagagacagacagtggctttgtgggctcagaaacaagcagagtttcacccctcacccagactccagagcaccggctctcccacatcagcacagcaggaacattagcccagccctttgctgcatctgtgcccagggatggagcttcctaccccaaggccaggggttctctgattcccagaagagccacagagcccagcacaccccggagccaagcacagaggtacctctccagcccaagtgggcctctccggcagagggcacccaacttcagcctggagcggacactggcagccgagatggcggttcctggctcagagtttgaggggcacaaacggatttctgaacagccccttcccaacaagacaatcagcccacccccagcccccgcccctgccgctgcgcctctaccctgtggaccaacagagaccatccccagcttcctgctcaccagggcagggcgagaccaggccatctgtgagctgcaagaagaggtgtcccggcttcgtctgcggctggaagacagcctgcaccagccactccagggcagcccgacacgcccagcatctgcctttgaccgccccgcccggacccgcggccggccagcagactccccagccacctggggctcccattatggcagtaaatccacagagagattgcctggtgagcctagaggtgaagagcagattgtccctccaggaaggcagcgagccaggtcttcctcagtgcctcgggaggtgctccgactgtccctgagttcagaatctgagctgccctccctaccactgttctctgagaagagcaagaccaccaaggacagtccacaggcagctcgggatggaaagagaggggtgggcagtgctggatggccagacagggtcaccttccggggccaatacacaggccacgaataccatgttctgtcccctaaggcggtcccaaaaggcaatggcacagtctcctgtccccactgccggcccattaggacccaggatgcgggtggtgctgtcacaggggacccactgggaccgcctcccgctgatacccttcagtgtcccctgtgtggtcaagttgggtctcccccagaggcagatggtccaggctcagccacctctggggcagagaaggccaccacgaggagaaaagcatcttcaactcccagccccaagcagaggagcaagcaggcggggtcgtcgccacgcccaccccccggactgtggtatctggcaacagcgcccccagcaccagcccctccagcctttgcctacatctcctcggttcccatcatgccttatccacctgccgctgtgtactatgcgcctgcaggacctacctcagcccaaccagctgccaagtggccgcccacagcctctcccccaccagcccggagacaccggcactccatccagctcgacctgggcgacctagaggagctcaacaaggccctgagccgggccgtgcaggctgccgagagcgtccgctctaccaccaggcagatgagaagctcgctgtcagccgacctgcgccaggctcacagcctgcggggctcctgcctcttctgacttcactgggggcccagaggcagatgggtgggtgggtgggcaggtggcctgccaggccaggagtgggctggagctgctgaggcccagaaggcccgcatagttcctcaccaggagggtctccctccagcacaggtcccgcctgctcagtccctgtgctttccaagtggagggggtgtcagctcggtcaccaagagaagtgacttcccaggagcaccagtcccctcacagaggtgctgtgagcgaggcctccttcggtccaggcagaacctcaggcagtctctcctggtcctgcatgtgtgcaactccagctaataataggtattttatatacagatggacagatatttttttaaactggggagttttcctgatcttgggtcctctttagggggccagacaagaaaggcctacggtttctggagcaaacctgtcccccacctgtgaccagtcactctggggcaagcatcactgggaagggcatagccggagacctttctcctagtgactggtagtcagtggggcattttaggatgtcagggccccagggtgacatgtgtccagcttttctatggcagcagaggcctttccctcagacaagctacaaagtgcccaggatgccatccaccatggtccccttcagtacctcacgcatggtccccagcttctcctaggatcccagtggcgtttatcagtggccagctacctgccaggcccgggctggggcacggtctgcggccatgaggccaggccgcctcccgcacccctaccccgtggcagcagcatacctctgcatttctggaatgtgtgtgcatcaatgatgtttgtatatttgaggcatttaaaaatctattttcgttacgagggcaaatgaagaatgaatattgatcttaaaaaaagaaaagaagacaaaaaaaatacccaaagccatccgtgtctctgctgtatgtcattaacttttgccttcaatgtcaagtttatggggtggtaggtttgatgcccagccaagccctttcccaggggacctgttgggtgctctgcctgcctccctctggtggcttctgtttctccagttttccccctttgcctatctcagaaccataaatctttcaactgcggagggccttgaggtggggctgcctagccaagtcccttttgactgaggccagagatgtaaatgaggcacacagcaagttgctgtctacaagagtatgcacctggactctccagtgctcctttctttcttttttttttcttttttctttttctttttttttttttttttgagactgagttttgctctggttgcccaggctggggtacagtggtggaatctcggctcactgcaacctccgcctcccgggttcaagtgattctcttgcctcagcctcccgagtagctgggattacaggcatgcacc

SEQ ID NO: 6265 - protein, 1439 aa, Homo sapiens; identical to SEQ ID NO: 853

SEQ ID NO: 6266 - DNA, 2138 bp, Homo sapiens
ctggggcacagccaggaagaggcctccactccttctgacacagtcatctgagcgctcatgtctgctggaggcggcaccaggggatactcacccaggagtccaggggccaccagccaggccatctgtgagctgcaagaagaggtgtcccggcttcgtctgcggctggaagacagcctgcaccagccactccagggcagcccgacacgcccagcatctgcctttgaccgccccgcccggacccgcggccggccagcagactccccagccacctggggctcccattatggcagtaaatccacagagagattgcctggtgagcctagaggtgaagagcagattgtccctccaggaaggcagcgagccaggtcttcctcagtgcctcgggaggtgctccgactgtccctgagttcagaatctgagctgccctccctaccactgttctctgagaagagcaagaccaccaaggacagtccacaggcagctcgggatggaaagagaggggtgggcagtgctggatggccagacagggtcaccttccggggccaatacacaggccacgaataccatgttctgtcccctaaggcggtcccaaaaggcaatggcacagtctcctgtccccactgccggcccattaggacccaggatgcgggtggtgctgtcacaggggacccactgggaccgcctcccgctgatacccttcagtgtcccctgtgtggtcaagttgggtctcccccagaggcagatggtccaggctcagccacctctggggcagagaaggccaccacgaggagaaaagcatcttcaactcccagccccaagcagaggagcaagcaggcggggtcgtcgccacgcccaccccccggactgtggtatctggcaacagcgcccccagcaccagcccctccagcctttgcctacatctcctcggttcccatcatgccttatccacctgccgctgtgtactatgcgcctgcaggacctacctcagcccaaccagctgccaagtggccgcccacagcctctcccccaccagcccggagacaccggcactccatccagctcgacctgggcgacctagaggagctcaacaaggccctgagccgggccgtgcaggctgccgagagcgtccgctctaccaccaggcagatgagaagctcgctgtcagccgacctgcgccaggctcacagcctgcggggctcctgcctcttctgacttcactgggggcccagaggcagatgggtgggtgggtgggcaggtggcctgccaggccaggagtgggctggagctgctgaggcccagaaggcccgcatagttcctcaccaggagggtctccctccagcacaggtcccgcctgctcagtccctgtgctttccaagtggagggggtgtcagctcggtcaccaagagaagtgacttcccaggagcaccagtcccctcacagaggtgctgtgagcgaggcctccttcggtccaggcagaacctcaggcagtctctcctggtcctgcatgtgtgcaactccagctaataataggtattttatatacagatggacagatatttttttaaactggggagttttcctgatcttgggtcctctttagggggccagacaagaaaggcctacggtttctggagcaaacctgtcccccacctgtgaccagtcactctggggcaagcatcactgggaagggcatagccggagacctttctcctagtgactggtagtcagtggggcattttaggatgtcagggccccagggtgacatgtgtccagcttttctatggcagcagaggcctttccctcagacaagctacaaagtgcccaggatgccatccaccatggtccccttcagtacctcacgcatggtccccagcttctcctaggatcccagtggcgtttatcagtggccagctacctgccaggcccgggctggggcacggtctgcggccatgaggccaggccgcctcccgcacccctaccccgtggcagcagcatacctctgcatttctggaatgtgtgtgcatcaatgatgtttgtatatttgaggcatttaaaaatctattttcgttacgagggcaaatgaagaatgaatattgatcttaaaaaaagaaaagaagacaaaaaaaatacccaaagcc

SEQ ID NO: 6267 - protein, 384 aa, Homo sapiens
MSAGGGTRGYSPRSPGATSQAICELQEEVSRLRLRLEDSLHQPLQGSPTRPASAFDRPARTRGRPADSPATWGSHYGSKSTERLPGEPRGEEQIVPPGRQRARSSSVPREVLRLSLSSESELPSLPLFSEKSKTTKDSPQAARDGKRGVGSAGWPDRVTFRGQYTGHEYHVLSPKAVPKGNGTVSCPHCRPIRTQDAGGAVTGDPLGPPPADTLQCPLCGQVGSPPEADGPGSATSGAEKATTRRKASSTPSPKQRSKQAGSSPRPPPGLWYLATAPPAPAPPAFAYISSVPIMPYPPAAVYYAPAGPTSAQPAAKWPPTASPPPARRHRHSIQLDLGDLEELNKALSRAVQAAESVRSTTRQMRSSLSADLRQAHSLRGSCLF

SEQ ID NO: 6268 - DNA, 3158 bp, Homo sapiens
tgctgaatctctgtctgtccatctttctgaccccagcctgctaccaccactgccgccgccagcactggcccctgcccattgcacgtaaatgtggaggtgagctctggcaacagtgaggtggaggacaggccacaggaccccctggcccgactcaggcacaaggagctgcagatggagcaagtttaccatggcctcatggagcggtacctcagtgtgaagtctctcccagaagccatgagaatggaggaggaggaagaaggagaggaggaggaggaggaagaggggggaggtgactccctggaagttgatggggtggctgcaactccagggaaagcagaggccaccagggtcctcccaaggcagtgcccggtgcaggctgagaaaagtcatggggctcccctggaggaggccacggagaagatggtatctatgaagccaccaggtttccaggcatccctggctagagacgggcacatgtcaggcctgggcaaggctgaggcagcccctccaggccctggcgtgccaccccaccctccaggcaccaagtccgcagcatcccaccaaagtagtatgaccagcctggagggaagcggcatctctgagcgccttccacagaagcctttgcaccgaggcggtgggccccacctggaggagacctggatggcgtccccagagacagacagtggctttgtgggctcagaaacaagcagagtttcacccctcacccagactccagagcaccggctctcccacatcagcacagcaggaacattagcccagccctttgctgcatctgtgcccagggatggagcttcctaccccaaggccaggggttctctgattcccagaagagccacagagcccagcacaccccggagccaagcacagaggtacctctccagcccaagtgggcctctccggcagagggcacccaacttcagcctggagcggacactggcagccgagatggcggttcctggctcagagtttgaggggcacaaacggatttctgaacagccccttcccaacaagacaatcagcccacccccagcccccgcccctgccgctgcgcctctaccctgtggaccaacagagaccatccccagcttcctgctcaccagggcagggcgagaccaggccatctgtgagctgcaagaagaggtgtcccggcttcgtctgcggctggaagacagcctgcaccagccactccagggcagcccgacacgcccagcatctgcctttgaccgccccgcccggacccgcggccggccagcagactccccagccacctggggctcccattatggcagtaaatccacagagagattgcctggtgagcctagaggtgaagagcagattgtccctccaggaaggcagcgagccaggtcttcctcagtgcctcgggaggtgctccgactgtccctgagttcagaatctgagctgccctccctaccactgttctctgagaagagcaagaccaccaaggacagtccacaggcagctcgggatggaaagagaggggtgggcagtgctggatggccagacagggtcaccttccggggccaatacacaggccacgaataccatgttctgtcccctaaggcggtcccaaaaggcaatggcacagtctcctgtccccactgccggcccattaggacccaggatgcgggtggtgctgtcacaggggacccactgggaccgcctcccgctgatacccttcagtgtcccctgtgtggtcaagttgggtctcccccagaggcagatggtccaggctcagccacctctggggcagagaaggccaccacgaggagaaaagcatcttcaactcccagccccaagcagaggagcaagcaggcggggtcgtcgccacgcccaccccccggactgtggtatctggcaacagcgcccccagcaccagcccctccagcctttgcctacatctcctcggttcccatcatgccttatccacctgccgctgtgtactatgcgcctgcaggacctacctcagcccaaccagctgccaagtggccgcccacagcctctcccccaccagcccggagacaccggcactccatccagctcgacctgggcgacctagaggagctcaacaaggccctgagccgggccgtgcaggctgccgagagcgtccgctctaccaccaggcagatgagaagctcgctgtcagccgacctgcgccaggctcacagcctgcggggctcctgcctcttctgacttcactgggggcccagaggcagatgggtgggtgggtgggcaggtggcctgccaggccaggagtgggctggagctgctgaggcccagaaggcccgcatagttcctcaccaggagggtctccctccagcacaggtcccgcctgctcagtccctgtgctttccaagtggagggggtgtcagctcggtcaccaagagaagtgacttcccaggagcaccagtcccctcacagaggtgctgtgagcgaggcctccttcggtccaggcagaacctcaggcagtctctcctggtcctgcatgtgtgcaactccagctaataataggtattttatatacagatggacagatatttttttaaactggggagttttcctgatcttgggtcctctttagggggccagacaagaaaggcctacggtttctggagcaaacctgtcccccacctgtgaccagtcactctggggcaagcatcactgggaagggcatagccggagacctttctcctagtgactggtagtcagtggggcattttaggatgtcagggccccagggtgacatgtgtccagcttttctatggcagcagaggcctttccctcagacaagctacaaagtgcccaggatgccatccaccatggtccccttcagtacctcacgcatggtccccagcttctcctaggatcccagtggcgtttatcagtggccagctacctgccaggcccgggctggggcacggtctgcggccatgaggccaggccgcctcccgcacccctaccccgtggcagcagcatacctctgcatttctggaatgtgtgtgcatcaatgatgtttgtatatttgaggcatttaaaaatctattttcgttacgagggcaaatgaagaatgaatattgatcttaaaaaaagaaaagaagacaaaaaaaatacccaaagcc

SEQ ID NO: 6269 - protein, 686 aa, Homo sapiens; identical to SEQ ID NO: 6249

SEQ ID NO: 6270 - DNA, 2284 bp, Homo sapiens
tgctgaatctctgtctgtccatctttctgaccccagcctgctaccaccactgccgccgccagcactggcccctgcccattgcacgtaaatgtggagcggttcctggctcagagtttgaggggcacaaacggatttctgaacagccccttcccaacaagacaatcagcccacccccagcccccgcccctgccgctgcgcctctaccctgtggaccaacagagaccatccccagcttcctgctcaccagggcagggcgagaccaggccatctgtgagctgcaagaagaggtgtcccggcttcgtctgcggctggaagacagcctgcaccagccactccagggcagcccgacacgcccagcatctgcctttgaccgccccgcccggacccgcggccggccagcagactccccagccacctggggctcccattatggcagtaaatccacagagagattgcctggtgagcctagaggtgaagagcagattgtccctccaggaaggcagcgagccaggtcttcctcagtgcctcgggaggtgctccgactgtccctgagttcagaatctgagctgccctccctaccactgttctctgagaagagcaagaccaccaaggacagtccacaggcagctcgggatggaaagagaggggtgggcagtgctggatggccagacagggtcaccttccggggccaatacacaggccacgaataccatgttctgtcccctaaggcggtcccaaaaggcaatggcacagtctcctgtccccactgccggcccattaggacccaggatgcgggtggtgctgtcacaggggacccactgggaccgcctcccgctgatacccttcagtgtcccctgtgtggtcaagttgggtctcccccagaggcagatggtccaggctcagccacctctggggcagagaaggccaccacgaggagaaaagcatcttcaactcccagccccaagcagaggagcaagcaggcggggtcgtcgccacgcccaccccccggactgtggtatctggcaacagcgcccccagcaccagcccctccagcctttgcctacatctcctcggttcccatcatgccttatccacctgccgctgtgtactatgcgcctgcaggacctacctcagcccaaccagctgccaagtggccgcccacagcctctcccccaccagcccggagacaccggcactccatccagctcgacctgggcgacctagaggagctcaacaaggccctgagccgggccgtgcaggctgccgagagcgtccgctctaccaccaggcagatgagaagctcgctgtcagccgacctgcgccaggctcacagcctgcggggctcctgcctcttctgacttcactgggggcccagaggcagatgggtgggtgggtgggcaggtggcctgccaggccaggagtgggctggagctgctgaggcccagaaggcccgcatagttcctcaccaggagggtctccctccagcacaggtcccgcctgctcagtccctgtgctttccaagtggagggggtgtcagctcggtcaccaagagaagtgacttcccaggagcaccagtcccctcacagaggtgctgtgagcgaggcctccttcggtccaggcagaacctcaggcagtctctcctggtcctgcatgtgtgcaactccagctaataataggtattttatatacagatggacagatatttttttaaactggggagttttcctgatcttgggtcctctttagggggccagacaagaaaggcctacggtttctggagcaaacctgtcccccacctgtgaccagtcactctggggcaagcatcactgggaagggcatagccggagacctttctcctagtgactggtagtcagtggggcattttaggatgtcagggccccagggtgacatgtgtccagcttttctatggcagcagaggcctttccctcagacaagctacaaagtgcccaggatgccatccaccatggtccccttcagtacctcacgcatggtccccagcttctcctaggatcccagtggcgtttatcagtggccagctacctgccaggcccgggctggggcacggtctgcggccatgaggccaggccgcctcccgcacccctaccccgtggcagcagcatacctctgcatttctggaatgtgtgtgcatcaatgatgtttgtatatttgaggcatttaaaaatctattttcgttacgagggcaaatgaagaatgaatattgatcttaaaaaaagaaaagaagacaaaaaaaatacccaaagcc

SEQ ID NO: 6271 - protein, 196 aa, Homo sapiens [sequence omitted]

SEQ ID NO: 6272 - DNA, 4855 bp, Homo sapiens
gaggctggtctcagcttggaaggccatggaaacaccagccccatggctcttgggcatggtcaggccaggggctgggtggcttctggcgaacaagccagtggggacaaactttctgaacattccgaggtcaacccatccgttgaactcagcccggcaaggtcctggagcagtgggacagtgagcctcgaccaccctagtgacagccttgattctacctgggaaggagagaccgatggcccccagcccactgccctggcagaaaccttgccagagggccccagccaccacctcctaagcccagatggcagaactggaggcagtgttgctcgggcaacccccatggaattccaggactcctcagctcccccagcccagagtccgcagcatgccacagatagatggaggagagaaacgaccagattcttctgccctcagcccaaggaacacatctggaagcagacaaagacgtcacctaagccactcccttcccgattcattggctccatcagccccctgaatccccagcccaggccaacgcggcagggcaggccgctgcccagacagggagccactctggctggccgctcctcttctaatgcccccaagtatggccgggggcagttgaactacccactccctgatttctccaaggtagggccccgggtgagattccccaaagatgagagctaccgtccccccaagtccagaagccacaacaggaagcctcaggcccctgccaggcccctcatcttcaagtctccagctgagattgtgcaggaggtgctgttgagcagtggagaagcagccctggcaaaggacacgcctcctgcccaccctatcaccagggtaccccaagaatttcagacgcctgagcaagccactgagctggtccatcagctccaggaagactaccacaggctcctcaccaagtacgctgaggccgagaacaccattgaccagctacgcctcggggccaaggtgaacctgttctctgacccaccccagcccaaccacagcatccacacgggaatggtgccccaggggaccaaggtcttgtccttcaccatcccacagccccgctctgcagagtggtggccgggcccggccgaggacccccaggcctctgcggcctcagcctgggggcagccctggccctgccacttggcatcttggtgaccctggggtggccatcagctcgaggagacttgagcccctcctcgcttaccagcatgcccaccctggggtggcttccggagaaccgggacatctctgaggaccagtcctcagcagagcagacccaggcactggcttctcaggccagccagttcctggccaaggtggagtcctttgaaagactgatacaggcaggacgtctcatgccccaggaccaagtcaagggcttccagcggctgaaggctgcccacgcggccctagaggaggagtacctgaaggcttgtcgggagcaacaccctgcccagccgcttgccggctccaaggggacgcctggaagatttgatcctcgcagggagctggaggcagagatataccgtctgggaagctgcctggaagagctgaaggaacacatagaccagacccagcaagagcctgagccgcccgggtcagactcagctctggacagcaccccagccctgccctgcctccatcagccaacgcacctgcctgctccttctggacaagcccccatgccagccatcaagacctcctgccctgagcctgctaccaccactgccgccgccagcactggcccctgcccattgcacgtaaatgtggaggtgagctctggcaacagtgaggtggaggacaggccacaggaccccctggcccgactcaggcacaaggagctgcagatggagcaagtttaccatggcctcatggagcggtacctcagtgtgaagtctctcccagaagccatgagaatggaggaggaggaagaaggagaggaggaggaggaggaagaggggggaggtgactccctggaagttgatggggtggctgcaactccagggaaagcagaggccaccagggtcctcccaaggcagtgcccggtgcaggctgagaaaagtcatggggctcccctggaggaggccacggagaagatggtatctatgaagccaccaggtttccaggcatccctggctagagacgggcacatgtcaggcctgggcaaggctgaggcagcccctccaggccctggcgtgccaccccaccctccaggcaccaagtccgcagcatcccaccaaagtagtatgaccagcctggagggaagcggcatctctgagcgccttccacagaagcctttgcaccgaggcggtgggccccacctggaggagacctggatggcgtccccagagacagacagtggctttgtgggctcagaaacaagcagagtttcacccctcacccagactccagagcaccggctctcccacatcagcacagcaggaacattagcccagccctttgctgcatctgtgcccagggatggagcttcctaccccaaggccaggggttctctgattcccagaagagccacagagcccagcacaccccggagccaagcacagaggtacctctccagcccaagtgggcctctccggcagagggcacccaacttcagcctggagcggacactggcagccgagatggcggttcctggctcagagtttgaggggcacaaacggatttctgaacagccccttcccaacaagacaatcagcccacccccagcccccgcccctgccgctgcgcctctaccctgtggaccaacagagaccatccccagcttcctgctcaccagggcagggcgagaccaggccatctgtgagctgcaagaagaggtgtcccggcttcgtctgcggctggaagacagcctgcaccagccactccagggcagcccgacacgcccagcatctgcctttgaccgccccgcccggacccgcggccggccagcagactccccagccacctggggctcccattatggcagtaaatccacagagagattgcctggtgagcctagaggtgaagagcagattgtccctccaggaaggcagcgagccaggtcttcctcagtgcctcgggaggtgctccgactgtccctgagttcagaatctgagctgccctccctaccactgttctctgagaagagcaagaccaccaaggacagtccacaggcagctcgggatggaaagagaggggtgggcagtgctggatggccagacagggtcaccttccggggccaatacacaggccacgaataccatgttctgtcccctaaggcggtcccaaaaggcaatggcacagtctcctgtccccactgccggcccattaggacccaggatgcgggtggtgctgtcacaggggacccactgggaccgcctcccgctgatacccttcagtgtcccctgtgtggtcaagttgggtctcccccagaggcagatggtccaggctcagccacctctggggcagagaaggccaccacgaggagaaaagcatcttcaactcccagccccaagcagaggagcaagcaggcggggtcgtcgccacgcccaccccccggactgtggtatctggcaacagcgcccccagcaccagcccctccagcctttgcctacatctcctcggttcccatcatgccttatccacctgccgctgtgtactatgcgcctgcaggacctacctcagcccaaccagctgccaagtggccgcccacagcctctcccccaccagcccggagacaccggcactccatccagctcgacctgggcgacctagaggagctcaacaaggccctgagccgggccgtgcaggctgccgagagcgtccgctctaccaccaggcagatgagaagctcgctgtcagccgacctgcgccaggctcacagcctgcggggctcctgcctcttctgacttcactgggggcccagaggcagatgggtgggtgggtgggcaggtggcctgccaggccaggagtgggctggagctgctgaggcccagaaggcccgcatagttcctcaccaggagggtctccctccagcacaggtcccgcctgctcagtccctgtgctttccaagtggagggggtgtcagctcggtcaccaagagaagtgacttcccaggagcaccagtcccctcacagaggtgctgtgagcgaggcctccttcggtccaggcagaacctcaggcagtctctcctggtcctgcatgtgtgcaactccagctaataataggtattttatatacagatggacagatatttttttaaactggggagttttcctgatcttgggtcctctttagggggccagacaagaaaggcctacggtttctggagcaaacctgtcccccacctgtgaccagtcactctggggcaagcatcactgggaagggcatagccggagacctttctcctagtgactggtagtcagtggggcattttaggatgtcagggccccagggtgacatgtgtccagcttttctatggcagcagaggcctttccctcagacaagctacaaagtgcccaggatgccatccaccatggtccccttcagtacctcacgcatggtccccagcttctcctaggatcccagtggcgtttatcagtggccagctacctgccaggcccgggctggggcacggtctgcggccatgaggccaggccgcctcccgcacccctaccccgtggcagcagcatacctctgcatttctggaatgtgtgtgcatcaatgatgtttgtatatttgaggcatttaaaaatctattttcgttacgagggcaaatgaagaatgaatattgatcttaaaaaaagaaaagaagacaaaaaaaatacccaaagcc

SEQ ID NO: 6273 - protein, 899 aa, Homo sapiens; identical to SEQ ID NO: 6255

SEQ ID NO: 6274 - DNA, 5075 bp, Homo sapiens
gtgatgaggaaatggaagccagagagttgaagtgacttagggtaagttacaaggtgggtgcagagctggtatatgctaagaagtgaatggcctgtctttccagaggctgaagcagaggatgtggacagcccagcaagttcccatgagcctcttgcctggctcccccagcagggccgtcagctggacatgactgaagaggagccagatgggaccctcggaagtctggaggttgaggaggctggagagagctcctcaaggttggggtatgaggctggtctcagcttggaaggccatggaaacaccagccccatggctcttgggcatggtcaggccaggggctgggtggcttctggcgaacaagccagtggggacaaactttctgaacattccgaggtcaacccatccgttgaactcagcccggcaaggtcctggagcagtgggacagtgagcctcgaccaccctagtgacagccttgattctacctgggaaggagagaccgatggcccccagcccactgccctggcagaaaccttgccagagggccccagccaccacctcctaagcccagatggcagaactggaggcagtgttgctcgggcaacccccatggaattccaggactcctcagctcccccagcccagagtccgcagcatgccacagatagatggaggagagaaacgaccagattcttctgccctcagcccaaggaacacatctggaagcagacaaagacgtcacctaagccactcccttcccgattcattggctccatcagccccctgaatccccagcccaggccaacgcggcagggcaggccgctgcccagacagggagccactctggctggccgctcctcttctaatgcccccaagtatggccgggggcagttgaactacccactccctgatttctccaaggtagggccccgggtgagattccccaaagatgagagctaccgtccccccaagtccagaagccacaacaggaagcctcaggcccctgccaggcccctcatcttcaagtctccagctgagattgtgcaggaggtgctgttgagcagtggagaagcagccctggcaaaggacacgcctcctgcccaccctatcaccagggtaccccaagaatttcagacgcctgagcaagccactgagctggtccatcagctccaggaagactaccacaggctcctcaccaagtacgctgaggccgagaacaccattgaccagctacgcctcggggccaaggtgaacctgttctctgacccaccccagcccaaccacagcatccacacgggaatggtgccccaggggaccaaggtcttgtccttcaccatcccacagccccgctctgcagagtggtggccgggcccggccgaggacccccaggcctctgcggcctcagggtggccatcagctcgaggagacttgagcccctcctcgcttaccagcatgcccaccctggggtggcttccggagaaccgggacatctctgaggaccagtcctcagcagagcagacccaggcactggcttctcaggccagccagttcctggccaaggtggagtcctttgaaagactgatacaggcaggacgtctcatgccccaggaccaagtcaagggcttccagcggctgaaggctgcccacgcggccctagaggaggagtacctgaaggcttgtcgggagcaacaccctgcccagccgcttgccggctccaaggggacgcctggaagatttgatcctcgcagggagctggaggcagagatataccgtctgggaagctgcctggaagagctgaaggaacacatagaccagacccagcaagagcctgagccgcccgggtcagactcagctctggacagcaccccagccctgccctgcctccatcagccaacgcacctgcctgctccttctggacaagcccccatgccagccatcaagacctcctgccctgagcctgctaccaccactgccgccgccagcactggcccctgcccattgcacgtaaatgtggaggtgagctctggcaacagtgaggtggaggacaggccacaggaccccctggcccgactcaggcacaaggagctgcagatggagcaagtttaccatggcctcatggagcggtacctcagtgtgaagtctctcccagaagccatgagaatggaggaggaggaagaaggagaggaggaggaggaggaagaggggggaggtgactccctggaagttgatggggtggctgcaactccagggaaagcagaggccaccagggtcctcccaaggcagtgcccggtgcaggctgagaaaagtcatggggctcccctggaggaggccacggagaagatggtatctatgaagccaccaggtttccaggcatccctggctagagacgggcacatgtcaggcctgggcaaggctgaggcagcccctccaggccctggcgtgccaccccaccctccaggcaccaagtccgcagcatcccaccaaagtagtatgaccagcctggagggaagcggcatctctgagcgccttccacagaagcctttgcaccgaggcggtgggccccacctggaggagacctggatggcgtccccagagacagacagtggctttgtgggctcagaaacaagcagagtttcacccctcacccagactccagagcaccggctctcccacatcagcacagcaggaacattagcccagccctttgctgcatctgtgcccagggatggagcttcctaccccaaggccaggggttctctgattcccagaagagccacagagcccagcacaccccggagccaagcacagaggtacctctccagcccaagtgggcctctccggcagagggcacccaacttcagcctggagcggacactggcagccgagatggcggttcctggctcagagtttgaggggcacaaacggatttctgaacagccccttcccaacaagacaatcagcccacccccagcccccgcccctgccgctgcgcctctaccctgtggaccaacagagaccatccccagcttcctgctcaccagggcagggcgagaccaggccatctgtgagctgcaagaagaggtgtcccggcttcgtctgcggctggaagacagcctgcaccagccactccagggcagcccgacacgcccagcatctgcctttgaccgccccgcccggacccgcggccggccagcagactccccagccacctggggctcccattatggcagtaaatccacagagagattgcctggtgagcctagaggtgaagagcagattgtccctccaggaaggcagcgagccaggtcttcctcagtgcctcgggaggtgctccgactgtccctgagttcagaatctgagctgccctccctaccactgttctctgagaagagcaagaccaccaaggacagtccacaggcagctcgggatggaaagagaggggtgggcagtgctggatggccagacagggtcaccttccggggccaatacacaggccacgaataccatgttctgtcccctaaggcggtcccaaaaggcaatggcacagtctcctgtccccactgccggcccattaggacccaggatgcgggtggtgctgtcacaggggacccactgggaccgcctcccgctgatacccttcagtgtcccctgtgtggtcaagttgggtctcccccagaggcagatggtccaggctcagccacctctggggcagagaaggccaccacgaggagaaaagcatcttcaactcccagccccaagcagaggagcaagcaggcggggtcgtcgccacgcccaccccccggactgtggtatctggcaacagcgcccccagcaccagcccctccagcctttgcctacatctcctcggttcccatcatgccttatccacctgccgctgtgtactatgcgcctgcaggacctacctcagcccaaccagctgccaagtggccgcccacagcctctcccccaccagcccggagacaccggcactccatccagctcgacctgggcgacctagaggagctcaacaaggccctgagccgggccgtgcaggctgccgagagcgtccgctctaccaccaggcagatgagaagctcgctgtcagccgacctgcgccaggctcacagcctgcggggctcctgcctcttctgacttcactgggggcccagaggcagatgggtgggtgggtgggcaggtggcctgccaggccaggagtgggctggagctgctgaggcccagaaggcccgcatagttcctcaccaggagggtctccctccagcacaggtcccgcctgctcagtccctgtgctttccaagtggagggggtgtcagctcggtcaccaagagaagtgacttcccaggagcaccagtcccctcacagaggtgctgtgagcgaggcctccttcggtccaggcagaacctcaggcagtctctcctggtcctgcatgtgtgcaactccagctaataataggtattttatatacagatggacagatatttttttaaactggggagttttcctgatcttgggtcctctttagggggccagacaagaaaggcctacggtttctggagcaaacctgtcccccacctgtgaccagtcactctggggcaagcatcactgggaagggcatagccggagacctttctcctagtgactggtagtcagtggggcattttaggatgtcagggccccagggtgacatgtgtccagcttttctatggcagcagaggcctttccctcagacaagctacaaagtgcccaggatgccatccaccatggtccccttcagtacctcacgcatggtccccagcttctcctaggatcccagtggcgtttatcagtggccagctacctgccaggcccgggctggggcacggtctgcggccatgaggccaggccgcctcccgcacccctaccccgtggcagcagcatacctctgcatttctggaatgtgtgtgcatcaatgatgtttgtatatttgaggcatttaaaaatctattttcgttacgagggcaaatgaagaatgaatattgatcttaaaaaaagaaaagaagacaaaaaaaatacccaaagcc

SEQ ID NO: 6275 - protein, 1358 aa, Homo sapiens; identical to SEQ ID NO: 6257

SEQ ID NO: 6276 - DNA, 5521 bp, Homo sapiens
gggagcgatgctggtctgtgagcagcagcttgggctggcagaacggcctggaggtgggccagggcgcaatggagacagggggctccctgggtttggaacaaagaattcacaggcaggtcccctgaaactgggtcggcaggacggtggtggagcccgagagagggcacaggcaggatggccgatgctgacaggaaccagcggtgactctggggcccctggcagcagctctgtctcctgaagatgaagtggcccaggtgaagcccaggccagccccaatggccagctcggagactgagatccgctgggctgagcctggcctggggaagggcccccagcggcggcgctgggcctgggccgaggacaagagggatgtggatagaagtagttcacaaagctgggaagaagagagactctttcccaatgccaccagccccgagctcctagaggacttccgcctggcccagcagcacctgccgcccctggagtgggacccacacccgcagcccgatgggcatcaggattccgagtcaggagagacttcgggagaagaggctgaagcagaggatgtggacagcccagcaagttcccatgagcctcttgcctggctcccccagcagggccgtcagctggacatgactgaagaggagccagatgggaccctcggaagtctggaggttgaggaggctggagagagctcctcaaggttggggtatgaggctggtctcagcttggaaggccatggaaacaccagccccatggctcttgggcatggtcaggccaggggctgggtggcttctggcgaacaagccagtggggacaaactttctgaacattccgaggtcaacccatccgttgaactcagcccggcaaggtcctggagcagtgggacagtgagcctcgaccaccctagtgacagccttgattctacctgggaaggagagaccgatggcccccagcccactgccctggcagaaaccttgccagagggccccagccaccacctcctaagcccagatggcagaactggaggcagtgttgctcgggcaacccccatggaattccaggactcctcagctcccccagcccagagtccgcagcatgccacagatagatggaggagagaaacgaccagattcttctgccctcagcccaaggaacacatctggaagcagacaaagacgtcacctaagccactcccttcccgattcattggctccatcagccccctgaatccccagcccaggccaacgcggcagggcaggccgctgcccagacagggagccactctggctggccgctcctcttctaatgcccccaagtatggccgggggcagttgaactacccactccctgatttctccaaggtagggccccgggtgagattccccaaagatgagagctaccgtccccccaagtccagaagccacaacaggaagcctcaggcccctgccaggcccctcatcttcaagtctccagctgagattgtgcaggaggtgctgttgagcagtggagaagcagccctggcaaaggacacgcctcctgcccaccctatcaccagggtaccccaagaatttcagacgcctgagcaagccactgagctggtccatcagctccaggaagactaccacaggctcctcaccaagtacgctgaggccgagaacaccattgaccagctacgcctcggggccaaggtgaacctgttctctgacccaccccagcccaaccacagcatccacacgggaatggtgccccaggggaccaaggtcttgtccttcaccatcccacagccccgctctgcagagtggtggccgggcccggccgaggacccccaggcctctgcggcctcagggtggccatcagctcgaggagacttgagcccctcctcgcttaccagcatgcccaccctggggtggcttccggagaaccgggacatctctgaggaccagtcctcagcagagcagacccaggcactggcttctcaggccagccagttcctggccaaggtggagtcctttgaaagactgatacaggcaggacgtctcatgccccaggaccaagtcaagggcttccagcggctgaaggctgcccacgcggccctagaggaggagtacctgaaggcttgtcgggagcaacaccctgcccagccgcttgccggctccaaggggacgcctggaagatttgatcctcgcagggagctggaggcagagatataccgtctgggaagctgcctggaagagctgaaggaacacatagaccagacccagcaagagcctgagccgcccgggtcagactcagctctggacagcaccccagccctgccctgcctccatcagccaacgcacctgcctgctccttctggacaagcccccatgccagccatcaagacctcctgccctgagcctgctaccaccactgccgccgccagcactggcccctgcccattgcacgtaaatgtggaggtgagctctggcaacagtgaggtggaggacaggccacaggaccccctggcccgactcaggcacaaggagctgcagatggagcaagtttaccatggcctcatggagcggtacctcagtgtgaagtctctcccagaagccatgagaatggaggaggaggaagaaggagaggaggaggaggaggaagaggggggaggtgactccctggaagttgatggggtggctgcaactccagggaaagcagaggccaccagggtcctcccaaggcagtgcccggtgcaggctgagaaaagtcatggggctcccctggaggaggccacggagaagatggtatctatgaagccaccaggtttccaggcatccctggctagagacgggcacatgtcaggcctgggcaaggctgaggcagcccctccaggccctggcgtgccaccccaccctccaggcaccaagtccgcagcatcccaccaaagtagtatgaccagcctggagggaagcggcatctctgagcgccttccacagaagcctttgcaccgaggcggtgggccccacctggaggagacctggatggcgtccccagagacagacagtggctttgtgggctcagaaacaagcagagtttcacccctcacccagactccagagcaccggctctcccacatcagcacagcaggaacattagcccagccctttgctgcatctgtgcccagggatggagcttcctaccccaaggccaggggttctctgattcccagaagagccacagagcccagcacaccccggagccaagcacagaggtacctctccagcccaagtgggcctctccggcagagggcacccaacttcagcctggagcggacactggcagccgagatggcggttcctggctcagagtttgaggggcacaaacggatttctgaacagccccttcccaacaagacaatcagcccacccccagcccccgcccctgccgctgcgcctctaccctgtggaccaacagagaccatccccagcttcctgctcaccagggcagggcgagaccaggccatctgtgagctgcaagaagaggtgtcccggcttcgtctgcggctggaagacagcctgcaccagccactccagggcagcccgacacgcccagcatctgcctttgaccgccccgcccggacccgcggccggccagcagactccccagccacctggggctcccattatggcagtaaatccacagagagattgcctggtgagcctagaggtgaagagcagattgtccctccaggaaggcagcgagccaggtcttcctcagtgcctcgggaggtgctccgactgtccctgagttcagaatctgagctgccctccctaccactgttctctgagaagagcaagaccaccaaggacagtccacaggcagctcgggatggaaagagaggggtgggcagtgctggatggccagacagggtcaccttccggggccaatacacaggccacgaataccatgttctgtcccctaaggcggtcccaaaaggcaatggcacagtctcctgtccccactgccggcccattaggacccaggatgcgggtggtgctgtcacaggggacccactgggaccgcctcccgctgatacccttcagtgtcccctgtgtggtcaagttgggtctcccccagaggcagatggtccaggctcagccacctctggggcagagaaggccaccacgaggagaaaagcatcttcaactcccagccccaagcagaggagcaagcaggcggggtcgtcgccacgcccaccccccggactgtggtatctggcaacagcgcccccagcaccagcccctccagcctttgcctacatctcctcggttcccatcatgccttatccacctgccgctgtgtactatgcgcctgcaggacctacctcagcccaaccagctgccaagtggccgcccacagcctctcccccaccagcccggagacaccggcactccatccagctcgacctgggcgacctagaggagctcaacaaggccctgagccgggccgtgcaggctgccgagagcgtccgctctaccaccaggcagatgagaagctcgctgtcagccgacctgcgccaggctcacagcctgcggggctcctgcctcttctgacttcactgggggcccagaggcagatgggtgggtgggtgggcaggtggcctgccaggccaggagtgggctggagctgctgaggcccagaaggcccgcatagttcctcaccaggagggtctccctccagcacaggtcccgcctgctcagtccctgtgctttccaagtggagggggtgtcagctcggtcaccaagagaagtgacttcccaggagcaccagtcccctcacagaggtgctgtgagcgaggcctccttcggtccaggcagaacctcaggcagtctctcctggtcctgcatgtgtgcaactccagctaataataggtattttatatacagatggacagatatttttttaaactggggagttttcctgatcttgggtcctctttagggggccagacaagaaaggcctacggtttctggagcaaacctgtcccccacctgtgaccagtcactctggggcaagcatcactgggaagggcatagccggagacctttctcctagtgactggtagtcagtggggcattttaggatgtcagggccccagggtgacatgtgtccagcttttctatggcagcagaggcctttccctcagacaagctacaaagtgcccaggatgccatccaccatggtccccttcagtacctcacgcatggtccccagcttctcctaggatcccagtggcgtttatcagtggccagctacctgccaggcccgggctggggcacggtctgcggccatgaggccaggccgcctcccgcacccctaccccgtggcagcagcatacctctgcatttctggaatgtgtgtgcatcaatgatgtttgtatatttgaggcatttaaaaatctattttcgttacgagggcaaatgaagaatgaatattgatcttaaaaaaagaaaagaagacaaaaaaaatacccaaagcc

SEQ ID NO: 6277 - protein, 1439 aa, Homo sapiens; identical to SEQ ID NO: 853

SEQ ID NO: 6278 - DNA, 5021 bp, Homo sapiens
gcaactgaagacggaggtgcccaaggtcagaaggaagcaccacacagagaggctgaagcagaggatgtggacagcccagcaagttcccatgagcctcttgcctggctcccccagcagggccgtcagctggacatgactgaagaggagccagatgggaccctcggaagtctggaggttgaggaggctggagagagctcctcaaggttggggtatgaggctggtctcagcttggaaggccatggaaacaccagccccatggctcttgggcatggtcaggccaggggctgggtggcttctggcgaacaagccagtggggacaaactttctgaacattccgaggtcaacccatccgttgaactcagcccggcaaggtcctggagcagtgggacagtgagcctcgaccaccctagtgacagccttgattctacctgggaaggagagaccgatggcccccagcccactgccctggcagaaaccttgccagagggccccagccaccacctcctaagcccagatggcagaactggaggcagtgttgctcgggcaacccccatggaattccaggactcctcagctcccccagcccagagtccgcagcatgccacagatagatggaggagagaaacgaccagattcttctgccctcagcccaaggaacacatctggaagcagacaaagacgtcacctaagccactcccttcccgattcattggctccatcagccccctgaatccccagcccaggccaacgcggcagggcaggccgctgcccagacagggagccactctggctggccgctcctcttctaatgcccccaagtatggccgggggcagttgaactacccactccctgatttctccaaggtagggccccgggtgagattccccaaagatgagagctaccgtccccccaagtccagaagccacaacaggaagcctcaggcccctgccaggcccctcatcttcaagtctccagctgagattgtgcaggaggtgctgttgagcagtggagaagcagccctggcaaaggacacgcctcctgcccaccctatcaccagggtaccccaagaatttcagacgcctgagcaagccactgagctggtccatcagctccaggaagactaccacaggctcctcaccaagtacgctgaggccgagaacaccattgaccagctacgcctcggggccaaggtgaacctgttctctgacccaccccagcccaaccacagcatccacacgggaatggtgccccaggggaccaaggtcttgtccttcaccatcccacagccccgctctgcagagtggtggccgggcccggccgaggacccccaggcctctgcggcctcagggtggccatcagctcgaggagacttgagcccctcctcgcttaccagcatgcccaccctggggtggcttccggagaaccgggacatctctgaggaccagtcctcagcagagcagacccaggcactggcttctcaggccagccagttcctggccaaggtggagtcctttgaaagactgatacaggcaggacgtctcatgccccaggaccaagtcaagggcttccagcggctgaaggctgcccacgcggccctagaggaggagtacctgaaggcttgtcgggagcaacaccctgcccagccgcttgccggctccaaggggacgcctggaagatttgatcctcgcagggagctggaggcagagatataccgtctgggaagctgcctggaagagctgaaggaacacatagaccagacccagcaagagcctgagccgcccgggtcagactcagctctggacagcaccccagccctgccctgcctccatcagccaacgcacctgcctgctccttctggacaagcccccatgccagccatcaagacctcctgccctgagcctgctaccaccactgccgccgccagcactggcccctgcccattgcacgtaaatgtggaggtgagctctggcaacagtgaggtggaggacaggccacaggaccccctggcccgactcaggcacaaggagctgcagatggagcaagtttaccatggcctcatggagcggtacctcagtgtgaagtctctcccagaagccatgagaatggaggaggaggaagaaggagaggaggaggaggaggaagaggggggaggtgactccctggaagttgatggggtggctgcaactccagggaaagcagaggccaccagggtcctcccaaggcagtgcccggtgcaggctgagaaaagtcatggggctcccctggaggaggccacggagaagatggtatctatgaagccaccaggtttccaggcatccctggctagagacgggcacatgtcaggcctgggcaaggctgaggcagcccctccaggccctggcgtgccaccccaccctccaggcaccaagtccgcagcatcccaccaaagtagtatgaccagcctggagggaagcggcatctctgagcgccttccacagaagcctttgcaccgaggcggtgggccccacctggaggagacctggatggcgtccccagagacagacagtggctttgtgggctcagaaacaagcagagtttcacccctcacccagactccagagcaccggctctcccacatcagcacagcaggaacattagcccagccctttgctgcatctgtgcccagggatggagcttcctaccccaaggccaggggttctctgattcccagaagagccacagagcccagcacaccccggagccaagcacagaggtacctctccagcccaagtgggcctctccggcagagggcacccaacttcagcctggagcggacactggcagccgagatggcggttcctggctcagagtttgaggggcacaaacggatttctgaacagccccttcccaacaagacaatcagcccacccccagcccccgcccctgccgctgcgcctctaccctgtggaccaacagagaccatccccagcttcctgctcaccagggcagggcgagaccaggccatctgtgagctgcaagaagaggtgtcccggcttcgtctgcggctggaagacagcctgcaccagccactccagggcagcccgacacgcccagcatctgcctttgaccgccccgcccggacccgcggccggccagcagactccccagccacctggggctcccattatggcagtaaatccacagagagattgcctggtgagcctagaggtgaagagcagattgtccctccaggaaggcagcgagccaggtcttcctcagtgcctcgggaggtgctccgactgtccctgagttcagaatctgagctgccctccctaccactgttctctgagaagagcaagaccaccaaggacagtccacaggcagctcgggatggaaagagaggggtgggcagtgctggatggccagacagggtcaccttccggggccaatacacaggccacgaataccatgttctgtcccctaaggcggtcccaaaaggcaatggcacagtctcctgtccccactgccggcccattaggacccaggatgcgggtggtgctgtcacaggggacccactgggaccgcctcccgctgatacccttcagtgtcccctgtgtggtcaagttgggtctcccccagaggcagatggtccaggctcagccacctctggggcagagaaggccaccacgaggagaaaagcatcttcaactcccagccccaagcagaggagcaagcaggcggggtcgtcgccacgcccaccccccggactgtggtatctggcaacagcgcccccagcaccagcccctccagcctttgcctacatctcctcggttcccatcatgccttatccacctgccgctgtgtactatgcgcctgcaggacctacctcagcccaaccagctgccaagtggccgcccacagcctctcccccaccagcccggagacaccggcactccatccagctcgacctgggcgacctagaggagctcaacaaggccctgagccgggccgtgcaggctgccgagagcgtccgctctaccaccaggcagatgagaagctcgctgtcagccgacctgcgccaggctcacagcctgcggggctcctgcctcttctgacttcactgggggcccagaggcagatgggtgggtgggtgggcaggtggcctgccaggccaggagtgggctggagctgctgaggcccagaaggcccgcatagttcctcaccaggagggtctccctccagcacaggtcccgcctgctcagtccctgtgctttccaagtggagggggtgtcagctcggtcaccaagagaagtgacttcccaggagcaccagtcccctcacagaggtgctgtgagcgaggcctccttcggtccaggcagaacctcaggcagtctctcctggtcctgcatgtgtgcaactccagctaataataggtattttatatacagatggacagatatttttttaaactggggagttttcctgatcttgggtcctctttagggggccagacaagaaaggcctacggtttctggagcaaacctgtcccccacctgtgaccagtcactctggggcaagcatcactgggaagggcatagccggagacctttctcctagtgactggtagtcagtggggcattttaggatgtcagggccccagggtgacatgtgtccagcttttctatggcagcagaggcctttccctcagacaagctacaaagtgcccaggatgccatccaccatggtccccttcagtacctcacgcatggtccccagcttctcctaggatcccagtggcgtttatcagtggccagctacctgccaggcccgggctggggcacggtctgcggccatgaggccaggccgcctcccgcacccctaccccgtggcagcagcatacctctgcatttctggaatgtgtgtgcatcaatgatgtttgtatatttgaggcatttaaaaatctattttcgttacgagggcaaatgaagaatgaatattgatcttaaaaaaagaaaagaagacaaaaaaaatacccaaagcc

SEQ ID NO: 6279 - protein, 1320 aa, Homo sapiens; identical to SEQ ID NO: 6261

SEQ ID NO: 6280 - DNA, 5002 bp, Homo sapiens
aaaccacccgcgctcggcggccgccagcagaggctgaagcagaggatgtggacagcccagcaagttcccatgagcctcttgcctggctcccccagcagggccgtcagctggacatgactgaagaggagccagatgggaccctcggaagtctggaggttgaggaggctggagagagctcctcaaggttggggtatgaggctggtctcagcttggaaggccatggaaacaccagccccatggctcttgggcatggtcaggccaggggctgggtggcttctggcgaacaagccagtggggacaaactttctgaacattccgaggtcaacccatccgttgaactcagcccggcaaggtcctggagcagtgggacagtgagcctcgaccaccctagtgacagccttgattctacctgggaaggagagaccgatggcccccagcccactgccctggcagaaaccttgccagagggccccagccaccacctcctaagcccagatggcagaactggaggcagtgttgctcgggcaacccccatggaattccaggactcctcagctcccccagcccagagtccgcagcatgccacagatagatggaggagagaaacgaccagattcttctgccctcagcccaaggaacacatctggaagcagacaaagacgtcacctaagccactcccttcccgattcattggctccatcagccccctgaatccccagcccaggccaacgcggcagggcaggccgctgcccagacagggagccactctggctggccgctcctcttctaatgcccccaagtatggccgggggcagttgaactacccactccctgatttctccaaggtagggccccgggtgagattccccaaagatgagagctaccgtccccccaagtccagaagccacaacaggaagcctcaggcccctgccaggcccctcatcttcaagtctccagctgagattgtgcaggaggtgctgttgagcagtggagaagcagccctggcaaaggacacgcctcctgcccaccctatcaccagggtaccccaagaatttcagacgcctgagcaagccactgagctggtccatcagctccaggaagactaccacaggctcctcaccaagtacgctgaggccgagaacaccattgaccagctacgcctcggggccaaggtgaacctgttctctgacccaccccagcccaaccacagcatccacacgggaatggtgccccaggggaccaaggtcttgtccttcaccatcccacagccccgctctgcagagtggtggccgggcccggccgaggacccccaggcctctgcggcctcagggtggccatcagctcgaggagacttgagcccctcctcgcttaccagcatgcccaccctggggtggcttccggagaaccgggacatctctgaggaccagtcctcagcagagcagacccaggcactggcttctcaggccagccagttcctggccaaggtggagtcctttgaaagactgatacaggcaggacgtctcatgccccaggaccaagtcaagggcttccagcggctgaaggctgcccacgcggccctagaggaggagtacctgaaggcttgtcgggagcaacaccctgcccagccgcttgccggctccaaggggacgcctggaagatttgatcctcgcagggagctggaggcagagatataccgtctgggaagctgcctggaagagctgaaggaacacatagaccagacccagcaagagcctgagccgcccgggtcagactcagctctggacagcaccccagccctgccctgcctccatcagccaacgcacctgcctgctccttctggacaagcccccatgccagccatcaagacctcctgccctgagcctgctaccaccactgccgccgccagcactggcccctgcccattgcacgtaaatgtggaggtgagctctggcaacagtgaggtggaggacaggccacaggaccccctggcccgactcaggcacaaggagctgcagatggagcaagtttaccatggcctcatggagcggtacctcagtgtgaagtctctcccagaagccatgagaatggaggaggaggaagaaggagaggaggaggaggaggaagaggggggaggtgactccctggaagttgatggggtggctgcaactccagggaaagcagaggccaccagggtcctcccaaggcagtgcccggtgcaggctgagaaaagtcatggggctcccctggaggaggccacggagaagatggtatctatgaagccaccaggtttccaggcatccctggctagagacgggcacatgtcaggcctgggcaaggctgaggcagcccctccaggccctggcgtgccaccccaccctccaggcaccaagtccgcagcatcccaccaaagtagtatgaccagcctggagggaagcggcatctctgagcgccttccacagaagcctttgcaccgaggcggtgggccccacctggaggagacctggatggcgtccccagagacagacagtggctttgtgggctcagaaacaagcagagtttcacccctcacccagactccagagcaccggctctcccacatcagcacagcaggaacattagcccagccctttgctgcatctgtgcccagggatggagcttcctaccccaaggccaggggttctctgattcccagaagagccacagagcccagcacaccccggagccaagcacagaggtacctctccagcccaagtgggcctctccggcagagggcacccaacttcagcctggagcggacactggcagccgagatggcggttcctggctcagagtttgaggggcacaaacggatttctgaacagccccttcccaacaagacaatcagcccacccccagcccccgcccctgccgctgcgcctctaccctgtggaccaacagagaccatccccagcttcctgctcaccagggcagggcgagaccaggccatctgtgagctgcaagaagaggtgtcccggcttcgtctgcggctggaagacagcctgcaccagccactccagggcagcccgacacgcccagcatctgcctttgaccgccccgcccggacccgcggccggccagcagactccccagccacctggggctcccattatggcagtaaatccacagagagattgcctggtgagcctagaggtgaagagcagattgtccctccaggaaggcagcgagccaggtcttcctcagtgcctcgggaggtgctccgactgtccctgagttcagaatctgagctgccctccctaccactgttctctgagaagagcaagaccaccaaggacagtccacaggcagctcgggatggaaagagaggggtgggcagtgctggatggccagacagggtcaccttccggggccaatacacaggccacgaataccatgttctgtcccctaaggcggtcccaaaaggcaatggcacagtctcctgtccccactgccggcccattaggacccaggatgcgggtggtgctgtcacaggggacccactgggaccgcctcccgctgatacccttcagtgtcccctgtgtggtcaagttgggtctcccccagaggcagatggtccaggctcagccacctctggggcagagaaggccaccacgaggagaaaagcatcttcaactcccagccccaagcagaggagcaagcaggcggggtcgtcgccacgcccaccccccggactgtggtatctggcaacagcgcccccagcaccagcccctccagcctttgcctacatctcctcggttcccatcatgccttatccacctgccgctgtgtactatgcgcctgcaggacctacctcagcccaaccagctgccaagtggccgcccacagcctctcccccaccagcccggagacaccggcactccatccagctcgacctgggcgacctagaggagctcaacaaggccctgagccgggccgtgcaggctgccgagagcgtccgctctaccaccaggcagatgagaagctcgctgtcagccgacctgcgccaggctcacagcctgcggggctcctgcctcttctgacttcactgggggcccagaggcagatgggtgggtgggtgggcaggtggcctgccaggccaggagtgggctggagctgctgaggcccagaaggcccgcatagttcctcaccaggagggtctccctccagcacaggtcccgcctgctcagtccctgtgctttccaagtggagggggtgtcagctcggtcaccaagagaagtgacttcccaggagcaccagtcccctcacagaggtgctgtgagcgaggcctccttcggtccaggcagaacctcaggcagtctctcctggtcctgcatgtgtgcaactccagctaataataggtattttatatacagatggacagatatttttttaaactggggagttttcctgatcttgggtcctctttagggggccagacaagaaaggcctacggtttctggagcaaacctgtcccccacctgtgaccagtcactctggggcaagcatcactgggaagggcatagccggagacctttctcctagtgactggtagtcagtggggcattttaggatgtcagggccccagggtgacatgtgtccagcttttctatggcagcagaggcctttccctcagacaagctacaaagtgcccaggatgccatccaccatggtccccttcagtacctcacgcatggtccccagcttctcctaggatcccagtggcgtttatcagtggccagctacctgccaggcccgggctggggcacggtctgcggccatgaggccaggccgcctcccgcacccctaccccgtggcagcagcatacctctgcatttctggaatgtgtgtgcatcaatgatgtttgtatatttgaggcatttaaaaatctattttcgttacgagggcaaatgaagaatgaatattgatcttaaaaaaagaaaagaagacaaaaaaaatacccaaagcc

SEQ ID NO: 6281 - protein, 1320 aa, Homo sapiens; identical to SEQ ID NO: 6261

SEQ ID NO: 6282 - DNA, 5585 bp, Homo sapiens
gattggaggcctttgtttgccgctcaactccaggaaaccacccgcgctcggcggccgccagcagtcctggaaggtgggaatgatctggagaccaggagtaagaagacctgagtttagatccccagcctggattcagttctgagtgcctcagttttcccttccacaaaatgaggaggggcaactgaagacggaggtgcccaaggtcagaaggaagcaccacacagagggcacaggcaggatggccgatgctgacaggaaccagcggtgactctggggcccctggcagcagctctgtctcctgaagatgaagtggcccaggtgaagcccaggccagccccaatggccagctcggagactgagatccgctgggctgagcctggcctggggaagggcccccagcggcggcgctgggcctgggccgaggacaagagggatgtggatagaagtagttcacaaagctgggaagaagagagactctttcccaatgccaccagccccgagctcctagaggacttccgcctggcccagcagcacctgccgcccctggagtgggacccacacccgcagcccgatgggcatcaggattccgagtcaggagagacttcgggagaagaggctgaagcagaggatgtggacagcccagcaagttcccatgagcctcttgcctggctcccccagcagggccgtcagctggacatgactgaagaggagccagatgggaccctcggaagtctggaggttgaggaggctggagagagctcctcaaggttggggtatgaggctggtctcagcttggaaggccatggaaacaccagccccatggctcttgggcatggtcaggccaggggctgggtggcttctggcgaacaagccagtggggacaaactttctgaacattccgaggtcaacccatccgttgaactcagcccggcaaggtcctggagcagtgggacagtgagcctcgaccaccctagtgacagccttgattctacctgggaaggagagaccgatggcccccagcccactgccctggcagaaaccttgccagagggccccagccaccacctcctaagcccagatggcagaactggaggcagtgttgctcgggcaacccccatggaattccaggactcctcagctcccccagcccagagtccgcagcatgccacagatagatggaggagagaaacgaccagattcttctgccctcagcccaaggaacacatctggaagcagacaaagacgtcacctaagccactcccttcccgattcattggctccatcagccccctgaatccccagcccaggccaacgcggcagggcaggccgctgcccagacagggagccactctggctggccgctcctcttctaatgcccccaagtatggccgggggcagttgaactacccactccctgatttctccaaggtagggccccgggtgagattccccaaagatgagagctaccgtccccccaagtccagaagccacaacaggaagcctcaggcccctgccaggcccctcatcttcaagtctccagctgagattgtgcaggaggtgctgttgagcagtggagaagcagccctggcaaaggacacgcctcctgcccaccctatcaccagggtaccccaagaatttcagacgcctgagcaagccactgagctggtccatcagctccaggaagactaccacaggctcctcaccaagtacgctgaggccgagaacaccattgaccagctacgcctcggggccaaggtgaacctgttctctgacccaccccagcccaaccacagcatccacacgggaatggtgccccaggggaccaaggtcttgtccttcaccatcccacagccccgctctgcagagtggtggccgggcccggccgaggacccccaggcctctgcggcctcagggtggccatcagctcgaggagacttgagcccctcctcgcttaccagcatgcccaccctggggtggcttccggagaaccgggacatctctgaggaccagtcctcagcagagcagacccaggcactggcttctcaggccagccagttcctggccaaggtggagtcctttgaaagactgatacaggcaggacgtctcatgccccaggaccaagtcaagggcttccagcggctgaaggctgcccacgcggccctagaggaggagtacctgaaggcttgtcgggagcaacaccctgcccagccgcttgccggctccaaggggacgcctggaagatttgatcctcgcagggagctggaggcagagatataccgtctgggaagctgcctggaagagctgaaggaacacatagaccagacccagcaagagcctgagccgcccgggtcagactcagctctggacagcaccccagccctgccctgcctccatcagccaacgcacctgcctgctccttctggacaagcccccatgccagccatcaagacctcctgccctgagcctgctaccaccactgccgccgccagcactggcccctgcccattgcacgtaaatgtggaggtgagctctggcaacagtgaggtggaggacaggccacaggaccccctggcccgactcaggcacaaggagctgcagatggagcaagtttaccatggcctcatggagcggtacctcagtgtgaagtctctcccagaagccatgagaatggaggaggaggaagaaggagaggaggaggaggaggaagaggggggaggtgactccctggaagttgatggggtggctgcaactccagggaaagcagaggccaccagggtcctcccaaggcagtgcccggtgcaggctgagaaaagtcatggggctcccctggaggaggccacggagaagatggtatctatgaagccaccaggtttccaggcatccctggctagagacgggcacatgtcaggcctgggcaaggctgaggcagcccctccaggccctggcgtgccaccccaccctccaggcaccaagtccgcagcatcccaccaaagtagtatgaccagcctggagggaagcggcatctctgagcgccttccacagaagcctttgcaccgaggcggtgggccccacctggaggagacctggatggcgtccccagagacagacagtggctttgtgggctcagaaacaagcagagtttcacccctcacccagactccagagcaccggctctcccacatcagcacagcaggaacattagcccagccctttgctgcatctgtgcccagggatggagcttcctaccccaaggccaggggttctctgattcccagaagagccacagagcccagcacaccccggagccaagcacagaggtacctctccagcccaagtgggcctctccggcagagggcacccaacttcagcctggagcggacactggcagccgagatggcggttcctggctcagagtttgaggggcacaaacggatttctgaacagccccttcccaacaagacaatcagcccacccccagcccccgcccctgccgctgcgcctctaccctgtggaccaacagagaccatccccagcttcctgctcaccagggcagggcgagaccaggccatctgtgagctgcaagaagaggtgtcccggcttcgtctgcggctggaagacagcctgcaccagccactccagggcagcccgacacgcccagcatctgcctttgaccgccccgcccggacccgcggccggccagcagactccccagccacctggggctcccattatggcagtaaatccacagagagattgcctggtgagcctagaggtgaagagcagattgtccctccaggaaggcagcgagccaggtcttcctcagtgcctcgggaggtgctccgactgtccctgagttcagaatctgagctgccctccctaccactgttctctgagaagagcaagaccaccaaggacagtccacaggcagctcgggatggaaagagaggggtgggcagtgctggatggccagacagggtcaccttccggggccaatacacaggccacgaataccatgttctgtcccctaaggcggtcccaaaaggcaatggcacagtctcctgtccccactgccggcccattaggacccaggatgcgggtggtgctgtcacaggggacccactgggaccgcctcccgctgatacccttcagtgtcccctgtgtggtcaagttgggtctcccccagaggcagatggtccaggctcagccacctctggggcagagaaggccaccacgaggagaaaagcatcttcaactcccagccccaagcagaggagcaagcaggcggggtcgtcgccacgcccaccccccggactgtggtatctggcaacagcgcccccagcaccagcccctccagcctttgcctacatctcctcggttcccatcatgccttatccacctgccgctgtgtactatgcgcctgcaggacctacctcagcccaaccagctgccaagtggccgcccacagcctctcccccaccagcccggagacaccggcactccatccagctcgacctgggcgacctagaggagctcaacaaggccctgagccgggccgtgcaggctgccgagagcgtccgctctaccaccaggcagatgagaagctcgctgtcagccgacctgcgccaggctcacagcctgcggggctcctgcctcttctgacttcactgggggcccagaggcagatgggtgggtgggtgggcaggtggcctgccaggccaggagtgggctggagctgctgaggcccagaaggcccgcatagttcctcaccaggagggtctccctccagcacaggtcccgcctgctcagtccctgtgctttccaagtggagggggtgtcagctcggtcaccaagagaagtgacttcccaggagcaccagtcccctcacagaggtgctgtgagcgaggcctccttcggtccaggcagaacctcaggcagtctctcctggtcctgcatgtgtgcaactccagctaataataggtattttatatacagatggacagatatttttttaaactggggagttttcctgatcttgggtcctctttagggggccagacaagaaaggcctacggtttctggagcaaacctgtcccccacctgtgaccagtcactctggggcaagcatcactgggaagggcatagccggagacctttctcctagtgactggtagtcagtggggcattttaggatgtcagggccccagggtgacatgtgtccagcttttctatggcagcagaggcctttccctcagacaagctacaaagtgcccaggatgccatccaccatggtccccttcagtacctcacgcatggtccccagcttctcctaggatcccagtggcgtttatcagtggccagctacctgccaggcccgggctggggcacggtctgcggccatgaggccaggccgcctcccgcacccctaccccgtggcagcagcatacctctgcatttctggaatgtgtgtgcatcaatgatgtttgtatatttgaggcatttaaaaatctattttcgttacgagggcaaatgaagaatgaatattgatcttaaaaaaagaaaagaagacaaaaaaaatacccaaagcc

SEQ ID NO: 6283 - protein, 1439 aa, Homo sapiens; identical to SEQ ID NO: 853

SEQ ID NO: 6284 - DNA, 3334 bp, Homo sapiens
ggctgggcgcttcctgccgaggcgaggcggcctcaaccacggcaggggcggggagaggtggggagcgatgctggtctgtgagcagcagcttgggctggcagaacggcctggaggtgggccagggcgcaatggagacagggggctccctgggtttggaacaaagaattcacaggcaggtcccctgaaactgggtcggcaggacggtggtggagcccgagagagggcacaggcaggatggccgatgctgacaggaaccagcggtgactctggggcccctggcagcagctctgtctcctgaagatgaagtggcccaggtgaagcccaggccagccccaatggccagctcggagactgagatccgctgggctgagcctggcctggggaagggcccccagcggcggcgctgggcctgggccgaggacaagagggatgtggatagaagtagttcacaaagctgggaagaagagagactctttcccaatgccaccagccccgagctcctagaggacttccgcctggcccagcagcacctgccgcccctggagtgggacccacacccgcagcccgatgggcatcaggattccgagtcaggagagacttcgggagaagaggctgaagcagaggatgtggacagcccagcaagttcccatgagcctcttgcctggctcccccagcagggccgtcagctggacatgactgaagaggagccagatgggaccctcggaagtctggaggttgaggaggctggagagagctcctcaaggttggggtatgaggctggtctcagcttggaaggccatggaaacaccagccccatggctcttgggcatggtcaggccaggggctgggtggcttctggcgaacaagccagtggggacaaactttctgaacattccgaggtcaacccatccgttgaactcagcccggcaaggtcctggagcagtgggacagtgagcctcgaccaccctagtgacagccttgattctacctgggaaggagagaccgatggcccccagcccactgccctggcagaaaccttgccagagggccccagccaccacctcctaagcccagatggcagaactggaggcagtgttgctcgggcaacccccatggaattccaggactcctcagctcccccagcccagagtccgcagcatgccacagatagatggaggagagaaacgaccagattcttctgccctcagcccaaggaacacatctggaagcagacaaagacgtcacctaagccactcccttcccgattcattggctccatcagccccctgaatccccagcccaggccaacgcggcagggcaggccgctgcccagacagggagccactctggctggccgctcctcttctaatgcccccaagtatggccgggggcagttgaactacccactccctgatttctccaaggtagggccccgggtgagattccccaaagatgagagctaccgtccccccaagtccagaagccacaacaggaagcctcaggcccctgccaggcccctcatcttcaagtctccagctgagattgtgcaggaggtgctgttgagcagtggagaagcagccctggcaaaggacacgcctcctgcccaccctatcaccagggtaccccaagaatttcagacgcctgagcaagccactgagctggtccatcagctccaggaagactaccacaggctcctcaccaagtacgctgaggccgagaacaccattgaccagctacgcctcggggccaaggtgaacctgttctctgacccaccccagcccaaccacagcatccacacgggaatggtgccccaggggaccaaggtcttgtccttcaccatcccacagccccgctctgcagagtggtggccgggcccggccgaggacccccaggcctctgcggcctcagggtggccatcagctcgaggagacttgagcccctcctcgcttaccagcatgcccaccctggggtggcttccggagaaccgggacatctctgaggaccagtcctcagcagagcagacccaggcactggcttctcaggccagccagttcctggccaaggtggagtcctttgaaagactgatacaggcaggacgtctcatgccccaggaccaagtcaagggcttccagcggctgaaggctgcccacgcggccctagaggaggagtacctgaaggcttgtcgggagcaacaccctgcccagccgcttgccggctccaaggggacgcctggaagatttgatcctcgcagggagctggaggcagagatataccgtctgggaagctgcctggaagagctgaaggaacacatagaccagacccagcaagagcctgagccgcccgggtcagactcagctctggacagcaccccagccctgccctgcctccatcagccaacgcacctgcctgctccttctggacaagcccccatgccagccatcaagacctcctgccctgagcctgctaccaccactgccgccgccagcactggcccctgcccattgcacgtaaatgtggaggtgagctctggcaacagtgaggtggaggacaggccacaggaccccctggcccgactcaggcacaaggagctgcagatggagcaagtttaccatggcctcatggagcggtacctcagtgtgaagtctctcccagaagccatgagaatggaggaggaggaagaaggagaggaggaggaggaggaagaggggggaggtgactccctggaagttgatggggtggctgcaactccagggaaagcagaggccaccagggtcctcccaaggcagtgcccggtgcaggctgagaaaagtcatggggctcccctggagtaagtcactgagcctttcctgcagaatgtttgtttccaccctaaaaccacagggatgatcactgtcagagtgaataagacagcgcttcacagtttagacatggcttacctgtcctgcctcttcaagtgtggaatgtataccactgatagcccttgaaatgattttgggtagtgtgggacatgattttcagtaggacacatgcagtattaaagaacattattctcagctgggcacagtggctcatgcctgtaatcccagcattgagggaggccaaggcaggtggatcacttgagtccaggagttcaagactagcctgagcaaaacggcaaagccccatctcaacaagaaatacaaaaattagccaggcatggtggtacacgcctatagccctagctatttgggaggctgaagcaggtgaatctcttgagcccaggaggcggaggttgcagtgagctgagatcgggccactgcactccagcctgggtgatagtgtgagaccctgtctc

SEQ ID NO: 6285 - protein, 831 aa, Homo sapiens
MASSETEIRWAEPGLGKGPQRRRWAWAEDKRDVDRSSSQSWEEERLFPNATSPELLEDFRLAQQHLPPLEWDPHPQPDGHQDSESGETSGEEAEAEDVDSPASSHEPLAWLPQQGRQLDMTEEEPDGTLGSLEVEEAGESSSRLGYEAGLSLEGHGNTSPMALGHGQARGWVASGEQASGDKLSEHSEVNPSVELSPARSWSSGTVSLDHPSDSLDSTWEGETDGPQPTALAETLPEGPSHHLLSPDGRTGGSVARATPMEFQDSSAPPAQSPQHATDRWRRETTRFFCPQPKEHIWKQTKTSPKPLPSRFIGSISPLNPQPRPTRQGRPLPRQGATLAGRSSSNAPKYGRGQLNYPLPDFSKVGPRVRFPKDESYRPPKSRSHNRKPQAPARPLIFKSPAEIVQEVLLSSGEAALAKDTPPAHPITRVPQEFQTPEQATELVHQLQEDYHRLLTKYAEAENTIDQLRLGAKVNLFSDPPQPNHSIHTGMVPQGTKVLSFTIPQPRSAEWWPGPAEDPQASAASGWPSARGDLSPSSLTSMPTLGWLPENRDISEDQSSAEQTQALASQASQFLAKVESFERLIQAGRLMPQDQVKGFQRLKAAHAALEEEYLKACREQHPAQPLAGSKGTPGRFDPRRELEAEIYRLGSCLEELKEHIDQTQQEPEPPGSDSALDSTPALPCLHQPTHLPAPSGQAPMPAIKTSCPEPATTTAAASTGPCPLHVNVEVSSGNSEVEDRPQDPLARLRHKELQMEQVYHGLMERYLSVKSLPEAMRMEEEEEGEEEEEEEGGGDSLEVDGVAATPGKAEATRVLPRQCPVQAEKSHGAPLE

SEQ ID NO: 6286 - DNA, 2178 bp, Homo sapiens
tccctgggtttggaacaaagaattcacaggcaggtcccctgaaactgggtcggcaggacggtggtggagcccgagagagcccagatggcagaactggaggcagtgttgctcgggcaacccccatggaattccaggactcctcagctcccccagcccagagtccgcagcatgccacagatagatggaggagagaaacgaccagattcttctgccctcagcccaaggaacacatctggaagcagacaaagacgtcacctaagccactcccttcccgattcattggctccatcagccccctgaatccccagcccaggccaacgcggcagggcaggccgctgcccagacagggagccactctggctggccgctcctcttctaatgcccccaagtatggccgggggcagttgaactacccactccctgatttctccaaggtagggccccgggtgagattccccaaagatgagagctaccgtccccccaagtccagaagccacaacaggaagcctcaggcccctgccaggcccctcatcttcaagtctccagctgagattgtgcaggaggtgctgttgagcagtggagaagcagccctggcaaaggacacgcctcctgcccaccctatcaccagggtaccccaagaatttcagacgcctgagcaagccactgagctggtccatcagctccaggaagactaccacaggctcctcaccaagtacgctgaggccgagaacaccattgaccagctacgcctcggggccaaggtgaacctgttctctgacccaccccagcccaaccacagcatccacacgggaatggtgccccaggggaccaaggtcttgtccttcaccatcccacagccccgctctgcagagtggtggccgggcccggccgaggacccccaggcctctgcggcctcagggtggccatcagctcgaggagacttgagcccctcctcgcttaccagcatgcccaccctggggtggcttccggagaaccgggacatctctgaggaccagtcctcagcagagcagacccaggcactggcttctcaggccagccagttcctggccaaggtggagtcctttgaaagactgatacaggcaggacgtctcatgccccaggaccaagtcaagggcttccagcggctgaaggctgcccacgcggccctagaggaggagtacctgaaggcttgtcgggagcaacaccctgcccagccgcttgccggctccaaggggacgcctggaagatttgatcctcgcagggagctggaggcagagatataccgtctgggaagctgcctggaagagctgaaggaacacatagaccagacccagcaagagcctgagccgcccgggtcagactcagctctggacagcaccccagccctgccctgcctccatcagccaacgcacctgcctgctccttctggacaagcccccatgccagccatcaagacctcctgccctgagcctgctaccaccactgccgccgccagcactggcccctgcccattgcacgtaaatgtggaggtgagctctggcaacagtgaggtggaggacaggccacaggaccccctggcccgactcaggcacaaggagctgcagatggagcaagtttaccatggcctcatggagcggtacctcagtgtgaagtctctcccagaagccatgagaatggaggaggaggaagaaggagaggaggaggaggaggaagaggggggaggtgactccctggaagttgatggggtggctgcaactccagggaaagcagaggccaccagggtcctcccaaggcagtgcccggtgcaggctgagaaaagtcatggggctcccctggagtaagtcactgagcctttcctgcagaatgtttgtttccaccctaaaaccacagggatgatcactgtcagagtgaataagacagcgcttcacagtttagacatggcttacctgtcctgcctcttcaagtgtggaatgtataccactgatagcccttgaaatgattttgggtagtgtgggacatgattttcagtaggacacatgcagtattaaagaacattattctcagctgggcacagtggctcatgcctgtaatcccagcattgagggaggccaaggcaggtggatcacttgagtccaggagttcaagactagcctgagcaaaacggcaaagccccatctc

SEQ ID NO: 6287 - protein, 572 aa, Homo sapiens
MEFQDSSAPPAQSPQHATDRWRRETTRFFCPQPKEHIWKQTKTSPKPLPSRFIGSISPLNPQPRPTRQGRPLPRQGATLAGRSSSNAPKYGRGQLNYPLPDFSKVGPRVRFPKDESYRPPKSRSHNRKPQAPARPLIFKSPAEIVQEVLLSSGEAALAKDTPPAHPITRVPQEFQTPEQATELVHQLQEDYHRLLTKYAEAENTIDQLRLGAKVNLFSDPPQPNHSIHTGMVPQGTKVLSFTIPQPRSAEWWPGPAEDPQASAASGWPSARGDLSPSSLTSMPTLGWLPENRDISEDQSSAEQTQALASQASQFLAKVESFERLIQAGRLMPQDQVKGFQRLKAAHAALEEEYLKACREQHPAQPLAGSKGTPGRFDPRRELEAEIYRLGSCLEELKEHIDQTQQEPEPPGSDSALDSTPALPCLHQPTHLPAPSGQAPMPAIKTSCPEPATTTAAASTGPCPLHVNVEVSSGNSEVEDRPQDPLARLRHKELQMEQVYHGLMERYLSVKSLPEAMRMEEEEEGEEEEEEEGGGDSLEVDGVAATPGKAEATRVLPRQCPVQAEKSHGAPLE

SEQ ID NO: 6288 - DNA, 2356 bp, Homo sapiens
tccctgggtttggaacaaagaattcacaggcaggtcccctgaaactgggtcggcaggacggtggtggagcccgagagaggacaagagggatgtggatagaagtagttcacaaagctgggaagaagagagactctttcccaatgccaccagccccgagctcctagaggacttccgcctggcccagcagcacctgccgcccctggagtgggacccacacccgcagcccgatgggcatcaggattccgagtcaggagagacttcgggagaagaactggaggcagtgttgctcgggcaacccccatggaattccaggactcctcagctcccccagcccagagtccgcagcatgccacagatagatggaggagagaaacgaccagattcttctgccctcagcccaaggaacacatctggaagcagacaaagacgtcacctaagccactcccttcccgattcattggctccatcagccccctgaatccccagcccaggccaacgcggcagggcaggccgctgcccagacagggagccactctggctggccgctcctcttctaatgcccccaagtatggccgggggcagttgaactacccactccctgatttctccaaggtagggccccgggtgagattccccaaagatgagagctaccgtccccccaagtccagaagccacaacaggaagcctcaggcccctgccaggcccctcatcttcaagtctccagctgagattgtgcaggaggtgctgttgagcagtggagaagcagccctggcaaaggacacgcctcctgcccaccctatcaccagggtaccccaagaatttcagacgcctgagcaagccactgagctggtccatcagctccaggaagactaccacaggctcctcaccaagtacgctgaggccgagaacaccattgaccagctacgcctcggggccaaggtgaacctgttctctgacccaccccagcccaaccacagcatccacacgggaatggtgccccaggggaccaaggtcttgtccttcaccatcccacagccccgctctgcagagtggtggccgggcccggccgaggacccccaggcctctgcggcctcagggtggccatcagctcgaggagacttgagcccctcctcgcttaccagcatgcccaccctggggtggcttccggagaaccgggacatctctgaggaccagtcctcagcagagcagacccaggcactggcttctcaggccagccagttcctggccaaggtggagtcctttgaaagactgatacaggcaggacgtctcatgccccaggaccaagtcaagggcttccagcggctgaaggctgcccacgcggccctagaggaggagtacctgaaggcttgtcgggagcaacaccctgcccagccgcttgccggctccaaggggacgcctggaagatttgatcctcgcagggagctggaggcagagatataccgtctgggaagctgcctggaagagctgaaggaacacatagaccagacccagcaagagcctgagccgcccgggtcagactcagctctggacagcaccccagccctgccctgcctccatcagccaacgcacctgcctgctccttctggacaagcccccatgccagccatcaagacctcctgccctgagcctgctaccaccactgccgccgccagcactggcccctgcccattgcacgtaaatgtggaggtgagctctggcaacagtgaggtggaggacaggccacaggaccccctggcccgactcaggcacaaggagctgcagatggagcaagtttaccatggcctcatggagcggtacctcagtgtgaagtctctcccagaagccatgagaatggaggaggaggaagaaggagaggaggaggaggaggaagaggggggaggtgactccctggaagttgatggggtggctgcaactccagggaaagcagaggccaccagggtcctcccaaggcagtgcccggtgcaggctgagaaaagtcatggggctcccctggagtaagtcactgagcctttcctgcagaatgtttgtttccaccctaaaaccacagggatgatcactgtcagagtgaataagacagcgcttcacagtttagacatggcttacctgtcctgcctcttcaagtgtggaatgtataccactgatagcccttgaaatgattttgggtagtgtgggacatgattttcagtaggacacatgcagtattaaagaacattattctcagctgggcacagtggctcatgcctgtaatcccagcattgagggaggccaaggcaggtggatcacttgagtccaggagttcaagactagcctgagcaaaacggcaaagccccatctc

SEQ ID NO: 6289 - protein, 572 aa, Homo sapiens; identical to SEQ ID NO: 6287

SEQ ID NO: 6290 - DNA, 400 bp, Homo sapiens
aggctaattggggtggggaggcctggagtagaggctggctggggtggagaggcctgggatagaagcctggtggggtggggaggcctggggtggaggaagccctgggatagaggctggtggggtggggaggcctggggtggaggctggctgaggtggagagccctgggatagaggctggtggggtggggaggcctggggtggaggctggcttgggcaggaagccctggggtagaggctggctgcggtagggaggcctggggtttgggccaggaactccctgctggtggagggagggtgtacctggagccctgagatacacccaagccctttgctcaaaaagaccagtgattgtactcgtgtttcaaggatgatctgtttgcttcttttcaacttctgctat

SEQ ID NO: 6291 - protein, 56 aa, Homo sapiens
RLIGVGRPGVEAGWGGEAWDRSLVGWGGLGWRKPWDRGWWGGEAWGGGWLRWRALG

SEQ ID NO: 6292 - DNA, 2033 bp, Homo sapiens
aggaaaccacccgcgctcggcggccgccagcagggcacaggcaggatggccgatgctgacaggaaccagcggtgactctggggcccctggcagcagctctgtctcctgaagatgaagtggcccaggtgaagcccaggccagccccaatggccagctcggagactgagatccgctgggctgagcctggcctggggaagggcccccagcggcggcgctgggcctgggccgaggacaagagggatgtggatagaagtagttcacaaagctgggaagaagagagactctttcccaatgccaccagccccgagctcctagaggacttccgcctggcccagcagcacctgccgcccctggagtgggacccacacccgcagcccgatgggcatcaggattccgagtcaggagagacttcgggagaagaggctgaagcagaggatgtggacagcccagcaagttcccatgagcctcttgcctggctcccccagcagggccgtcagctggacatgactgaagaggagccagatgggaccctcggaagtctggaggttgaggaggctggagagagctcctcaaggttggggtatgaggctggtctcagcttggaaggccatggaaacaccagccccatggctcttgggcatggtcaggccaggggctgggtggcttctggcgaacaagccagtggggacaaactttctgaacattccgaggtcaacccatccgttgaactcagcccggcaaggtcctggagcagtgggacagtgagcctcgaccaccctagtgacagccttgattctacctgggaaggagagaccgatggcccccagcccactgccctggcagaaaccttgccagagggccccagccaccacctcctaagcccagatggcagaactggaggcagtgttgctcgggcaacccccatggaattccaggactcctcagctcccccagcccagagtccgcagcatgccacagatagatggaggagagaaacgaccagattcttctgccctcagcccaaggaacacatctggaagcagacaaagacgtcacctaagccactcccttcccgattcattggctccatcagccccctgaatccccagcccaggccaacgcggcagggcaggccgctgcccagacagggagccactctggctggccgctcctcttctaatgcccccaagtatggccgggggcagttgaactacccactccctgatttctccaaggtagggccccgggtgagattccccaaagatgagagctaccgtccccccaagtccagaagccacaacaggaagcctcaggcccctgccaggcccctcatcttcaagtctccagctgagattgtgcaggaggtgctgttgagcagtggagaagcagccctggcaaaggacacgcctcctgcccaccctatcaccagggtaccccaagaatttcagacgcctgagcaagccactgagctggtccatcagctccaggttagtgggactcatggctgtggatgtgtcaccaaggcccctgttggcttggggtggaggctaattggggtggggaggcctggagtagaggctggctggggtggagaggcctgggatagagcctggctggggtgggaagccctaggacggaggctggtggggtggggaggcctggggtggaggctggctagggtgggaagccctgggatggaggccagtggggtggggaggcctggggtggggagccctggggtagagcctggtggggtggggaggcctggggtggaggctggctggggtaggaagccctgggatagaggctggtggggtggggaggcctggggtggaggctggctggggtaggaagccctgggatagaggctggctgcggtagggaggcctggggtttgggccaggaactccctgctggtggagggagggtgtacctggagccctgagatacacccaagccctttgctcaaaaagaccagtgattgtactcgtgtttcaaggatgatctgtttgcttcttttcaacttctgctat

SEQ ID NO: 6293 - protein, 567 aa, Homo sapiens
MASSETEIRWAEPGLGKGPQRRRWAWAEDKRDVDRSSSQSWEEERLFPNATSPELLEDFRLAQQHLPPLEWDPHPQPDGHQDSESGETSGEEAEAEDVDSPASSHEPLAWLPQQGRQLDMTEEEPDGTLGSLEVEEAGESSSRLGYEAGLSLEGHGNTSPMALGHGQARGWVASGEQASGDKLSEHSEVNPSVELSPARSWSSGTVSLDHPSDSLDSTWEGETDGPQPTALAETLPEGPSHHLLSPDGRTGGSVARATPMEFQDSSAPPAQSPQHATDRWRRETTRFFCPQPKEHIWKQTKTSPKPLPSRFIGSISPLNPQPRPTRQGRPLPRQGATLAGRSSSNAPKYGRGQLNYPLPDFSKVGPRVRFPKDESYRPPKSRSHNRKPQAPARPLIFKSPAEIVQEVLLSSGEAALAKDTPPAHPITRVPQEFQTPEQATELVHQLQVSGTHGCGCVTKAPVGLGWRLIGVGRPGVEAGWGGEAWDRAWLGWEALGRRLVGWGGLGWRLARVGSPGMEASGVGRPGVGSPGVEPGGVGRPGVEAGWGRKPWDRGWWGGEAWGGGWLG

SEQ ID NO: 6294 - DNA, 927 bp, Homo sapiens
gtggatagaagtagttcacaaagctgggaagaagagagactctttcccaatgccaccagccccgagctcctagaggacttccgcctggcccagcagcacctgccgcccctggagtgggacccacacccgcagcccgatgggcatcaggattccgagtcaggagagacttcgggagaagaggctgaagcagaggatgtggacagcccagcaagttcccatgagcctcttgcctggctcccccagcagggccgtcagctggacatgactgaagaggagccagatgggaccctcggaagtctggaggttgaggaggctggagagagctcctcaaggttggggtatgaggctggtctcagcttggaaggccatggaaacaccagccccatggctcttgggcatggtcaggccaggggctgggtggcttctggcgaacaagccagtggggacaaactttctgaacattccgaggtcaacccatccgttgaactcagcccggcaaggtcctggagcagtgggacagtgagcctcgaccaccctagtgacagccttgattctacctgggaaggagagaccgatggcccccagcccactgccctggcagaaaccttgccagagggccccagccaccacctcctaagcccagatggcagaactggaggcagtgttgctcgggcaacccccatggaattccaggactcctcagctcccccagcccagagtccgcagcatgccacagatagatggaggagagaaacgaccagattcttctgccctcagcccaaggaacacatctggaagcagacaaagacgtcacctaagccactcccttcccgattcattggctccatcagccccctgaatccccagcccaggccaacgcggcagggcaggccgctgcccagacagggagccactctggctggccgc

SEQ ID NO: 6295 - protein, 42 aa, Homo sapiens
MGIRIPSQERLREKRLKQRMWTAQQVPMSLLPGSPSRAVSWT

SEQ ID NO: 6296 - DNA, 2891 bp, Homo sapiens
gcaggtgttttgaactccagctgagggcctgctggctgctgggaaactcctaggcagcagaggcccacgactacttcctcctgagtgccgttcagtggcctgtgtccaggctctgaagggctccaagaagctggtgctgtctgtgtactcagcagggcgcatccctgggggctacgtcaccaaccacatctacacctgggtggacccgcagggccgcagcatctccccaccctcgggcctgccccagccccacggtggtgccctgaggcagcaggagggtgaccggaggagcaccctgcacctcctgcaaggaggggatgagaaaaaggtgaacctggtgctgggggacggccggtccctgggcctcacgatccgtgggggagctgagtacggccttggcatttacatcactggcgtggacccaggctctgaagcagaaggcagcgggctcaaggttggggaccagattctagaagtgaatgggcggagctttctcaacatcctacacgacgaggctgtcaggctgcttaagtcatctcggcacctcatcctgacagtgaaggacgtcgggaggctgccccgtgcccgcaccactgtggacgagaccaagtggatcgccagttcccggatcagggagaccatggcgaactcggcagggtttcttggcgatctcacaacagaaggaataaacaagccaggattttacaagggcccagccggctcccaggtgaccctgagcagcctggggaaccagacacgagtgctgctggaggagcaggctcggcacctgctgaacgagcaggaacacgccaccatggcctactacctggatgagtaccgtggtggcagcgtctctgtggaggccctcgtcatggccctgttcaagctgctcaacacccacgccaagttctcactcctctctgaggtgagaggcaccatttccccgcaagacctagaacgcttcgaccacctggtgctgaggcgtgagattgagtccatgaaggcgcggcagcccccaggccccggggctggggacacctactccatggtctcctacagtgacacgggttcatccacaggcagccacggcacctccaccaccgtcagctcggccaggaacactctggacctggaggaaactggcgaggctgtccagggcaatatcaacgccctcccagatgtgtccgtggatgatgtcagatccacctcccaggggctgtcaagcttcaagccactgcctcgcccaccacctctggcccaaggcaacgacctcccactaggccagccaaggaagctggggagagaggacctccagccaccttcctccatgccttcctgctcgggcactgtcttctcggctccacagaaccgcagcccgccagcgggcaccgcacccaccccagggacctcctctgcacaggacttgccctcttcccccatctatgcctccgtctcccctgccaaccccagctccaagaggccgctggacgcccatctggccctggtcaaccaacaccccatcggccccttcccacgggtccagtcacccccgcacctgaaaagcccctctgcagaggccacagtggctgggggctgccttctgcccccatcaccctctggccacccagaccagacaggcacaaaccagcactttgtcatggtggaggtccaccgccccgacagcgagccagacgtcaatgaagtgagggcgctgccccagacgcgcacagcctctacgctctcccacctctcggacagcgggcagactctaagcgaggacagtggtgtggatgctggcgaggcagaggccagcgccccaggccgaggaaggcagtcggtgtccaccaagagcaggagtagcaaggagctgcctcggaacgagaggcccacagatggggccaacaaaccgcctggacttctggagcccacgtccactctggtccgtgtgaagaaaagtgcggccaccctgggcatcgccatcgagggtggcgccaacacccgccagcccctgcctaggattgtcactattcagagaggcggctcagctcacaactgtgggcagctcaaggtgggccacgtgattctggaagtgaatgggctgacgcttcggggcaaggagcaccgggaggccgcccgcattatcgccgaggccttcaagactaaggaccgtgactacattgactttctggtcactgagttcaatgtgatgctctagaggccaaggcctgagggcctcccaccactgcccagcccctggtcccagtccctttccaccgttggcttcatcaagctccttgcggggttggggctgcatggccagggtggcaggaagacatcccccctccatcccagcccactggaccagaactgggagaggaagagagcaggacaaggcagacagaaggtcaggtcaggaactggtgctgtactgggtacacagtaggcgcccaggacaagtgggttgcaagacaggaagaaaggaaaaggaagggcagagtgctggtttctccaggttgggttgggggcactgctgtcccccctccagctaggacccagcccatccccagatgcctgagcctttgtccaaagtgaggtcactcgagaattcatggacacggcccccagtcagggggcatcttgcaagacctttagtgccacaaataagcatcgagcacctccccattcacacccccattcctcctggctccttatcccccatggtgtttattatttatttccctccccatgcccctggggaccccaaggccccagcttccctctgcacccccagcctatcccagaggccttgcaggtgaccagcagtgtcattgtatttatatacagagcttatgactttaatttttcaataaagaaatctgaacaaggttaga

SEQ ID NO: 6297 - protein, 524 aa, Homo sapiens
MANSAGFLGDLTTEGINKPGFYKGPAGSQVTLSSLGNQTRVLLEEQARHLLNEQEHATMAYYLDEYRGGSVSVEALVMALFKLLNTHAKFSLLSEVRGTISPQDLERFDHLVLRREIESMKARQPPGPGAGDTYSMVSYSDTGSSTGSHGTSTTVSSARNTLDLEETGEAVQGNINALPDVSVDDVRSTSQGLSSFKPLPRPPPLAQGNDLPLGQPRKLGREDLQPPSSMPSCSGTVFSAPQNRSPPAGTAPTPGTSSAQDLPSSPIYASVSPANPSSKRPLDAHLALVNQHPIGPFPRVQSPPHLKSPSAEATVAGGCLLPPSPSGHPDQTGTNQHFVMVEVHRPDSEPDVNEVRALPQTRTASTLSHLSDSGQTLSEDSGVDAGEAEASAPGRGRQSVSTKSRSSKELPRNERPTDGANKPPGLLEPTSTLVRVKKSAATLGIAIEGGANTRQPLPRIVTIQRGGSAHNCGQLKVGHVILEVNGLTLRGKEHREAARIIAEAFKTKDRDYIDFLVTEFNVML

SEQ ID NO: 6298 - DNA, 4108 bp, Homo sapiens
cgggctggcaacgagacggcgtcggaactcgctggaagactcggcccgggtggctcaacagttcgcaaagtccgggcttgcggccgggcggcgcagaggcgcggaggctccccgggcggctgcatcccggggctgccccggacatgccccgcaccccttgtcggacgcccgcgccgcttcaccggctgccactccccggagtgctctgggactagagcgccctccgccccaacttctgactttggggtcccccagccctagaggaacgggcgcccggctgggggagccccgggcatggtgtgacggggcagtcaggtcagctttgcggcgcccccaaactccagccacccgtcgtctccgtgccctccagaatgtagctgctgaccccgcgccccccggactccagcagcagtctccgccacctccgggctccagcagccaactcttgtgtctctcaggaacccgccgacgtctccgcgtcccccggattccaggttcgcgacccccgccgtcttcgcgcctccgggactctagcagcggtctccgcgaccccctaggatccagccactgtacccgtgctccccaaacccaggctccagccgtcgtctccgcgctcccggggatccagctgtcgcgccagtacccgcgaggacagcggcaccgcccacaccccgcgcgctcagagcccggccgggcctcggcgtggagatgaacgcgccgctggacggcctgtcggtgagctcgtcctccaccggctcgctgggctcggcggccggggcgggcggcggcgggggcgcggggctgcggttactgtctgccaacgtgcgccagctgcaccaagcgctgaccgcgctgctgagcgaggcggagcgggagcagttcacccactgcctgaacgcttaccacgcgcgccgcaacgtcttcgacctggtgcgcaccctgcgcgtgctgctggacagtccggtcaagcggcgcctgctgcccatgcttcgtctggtcatcccgcgctccgaccagctgctcttcgaccaatacacggccgagggcctctacctgcccgccaccaccccctacaggcagcccgcctggggcggccccgacagcgcggggccaggggaggtgcgcctggtgagtttgcggcgtgccaaggcccacgagggcttgggcttcagcatccgtgggggctcggagcacggcgtgggcatctacgtgtctctggtggaaccaggctctctagctgagaaggaaggactgcgggtcggggaccagattctgcgcgtcaacgacaaatccctggcccgggtgacccacgcggaggccgtcaaggctctgaagggctccaagaagctggtgctgtctgtgtactcagcagggcgcatccctgggggctacgtcaccaaccacatctacacctgggtggacccgcagggccgcagcatctccccaccctcgggcctgccccagccccacggtggtgccctgaggcagcaggagggtgaccggaggagcaccctgcacctcctgcaaggaggggatgagaaaaaggtgaacctggtgctgggggacggccggtccctgggcctcacgatccgtgggggagctgagtacggccttggcatttacatcactggcgtggacccaggctctgaagcagaaggcagcgggctcaaggttggggaccagattctagaagtgaatgggcggagctttctcaacatcctacacgacgaggctgtcaggctgcttaagtcatctcggcacctcatcctgacagtgaaggacgtcgggaggctgccccgtgcccgcaccactgtggacgagaccaagtggatcgccagttcccggatcagggagaccatggcgaactcggcagggtttcttggcgatctcacaacagaaggaataaacaagccaggattttacaagggcccagccggctcccaggtgaccctgagcagcctggggaaccagacacgagtgctgctggaggagcaggctcggcacctgctgaacgagcaggaacacgccaccatggcctactacctggatgagtaccgtggtggcagcgtctctgtggaggccctcgtcatggccctgttcaagctgctcaacacccacgccaagttctcactcctctctgaggtgagaggcaccatttccccgcaagacctagaacgcttcgaccacctggtgctgaggcgtgagattgagtccatgaaggcgcggcagcccccaggccccggggctggggacacctactccatggtctcctacagtgacacgggttcatccacaggcagccacggcacctccaccaccgtcagctcggccaggaacactctggacctggaggaaactggcgaggctgtccagggcaatatcaacgccctcccagatgtgtccgtggatgatgtcagatccacctcccaggggctgtcaagcttcaagccactgcctcgcccaccacctctggcccaaggcaacgacctcccactaggccagccaaggaagctggggagagaggacctccagccaccttcctccatgccttcctgctcgggcactgtcttctcggctccacagaaccgcagcccgccagcgggcaccgcacccaccccagggacctcctctgcacaggacttgccctcttcccccatctatgcctccgtctcccctgccaaccccagctccaagaggccgctggacgcccatctggccctggtcaaccaacaccccatcggccccttcccacgggtccagtcacccccgcacctgaaaagcccctctgcagaggccacagtggctgggggctgccttctgcccccatcaccctctggccacccagaccagacaggcacaaaccagcactttgtcatggtggaggtccaccgccccgacagcgagccagacgtcaatgaagtgagggcgctgccccagacgcgcacagcctctacgctctcccacctctcggacagcgggcagactctaagcgaggacagtggtgtggatgctggcgaggcagaggccagcgccccaggccgaggaaggcagtcggtgtccaccaagagcaggagtagcaaggagctgcctcggaacgagaggcccacagatggggccaacaaaccgcctggacttctggagcccacgtccactctggtccgtgtgaagaaaagtgcggccaccctgggcatcgccatcgagggtggcgccaacacccgccagcccctgcctaggattgtcactattcagagaggcggctcagctcacaactgtgggcagctcaaggtgggccacgtgattctggaagtgaatgggctgacgcttcggggcaaggagcaccgggaggccgcccgcattatcgccgaggccttcaagactaaggaccgtgactacattgactttctggtcactgagttcaatgtgatgctctagaggccaaggcctgagggcctcccaccactgcccagcccctggtcccagtccctttccaccgttggcttcatcaagctccttgcggggttggggctgcatggccagggtggcaggaagacatcccccctccatcccagcccactggaccagaactgggagaggaagagagcaggacaaggcagacagaaggtcaggtcaggaactggtgctgtactgggtacacagtaggcgcccaggacaagtgggttgcaagacaggaagaaaggaaaaggaagggcagagtgctggtttctccaggttgggttgggggcactgctgtcccccctccagctaggacccagcccatccccagatgcctgagcctttgtccaaagtgaggtcactcgagaattcatggacacggcccccagtcagggggcatcttgcaagacctttagtgccacaaataagcatcgagcacctccccattcacacccccattcctcctggctccttatcccccatggtgtttattatttatttccctccccatgcccctggggaccccaaggccccagcttccctctgcacccccagcctatcccagaggccttgcaggtgaccagcagtgtcattgtatttatatacagagcttatgactttaatttttcaataaagaaatctgaacaaggttaga

SEQ ID NO: 6299 - protein, 907 aa, Homo sapiens
MNAPLDGLSVSSSSTGSLGSAAGAGGGGGAGLRLLSANVRQLHQALTALLSEAEREQFTHCLNAYHARRNVFDLVRTLRVLLDSPVKRRLLPMLRLVIPRSDQLLFDQYTAEGLYLPATTPYRQPAWGGPDSAGPGEVRLVSLRRAKAHEGLGFSIRGGSEHGVGIYVSLVEPGSLAEKEGLRVGDQILRVNDKSLARVTHAEAVKALKGSKKLVLSVYSAGRIPGGYVTNHIYTWVDPQGRSISPPSGLPQPHGGALRQQEGDRRSTLHLLQGGDEKKVNLVLGDGRSLGLTIRGGAEYGLGIYITGVDPGSEAEGSGLKVGDQILEVNGRSFLNILHDEAVRLLKSSRHLILTVKDVGRLPRARTTVDETKWIASSRIRETMANSAGFLGDLTTEGINKPGFYKGPAGSQVTLSSLGNQTRVLLEEQARHLLNEQEHATMAYYLDEYRGGSVSVEALVMALFKLLNTHAKFSLLSEVRGTISPQDLERFDHLVLRREIESMKARQPPGPGAGDTYSMVSYSDTGSSTGSHGTSTTVSSARNTLDLEETGEAVQGNINALPDVSVDDVRSTSQGLSSFKPLPRPPPLAQGNDLPLGQPRKLGREDLQPPSSMPSCSGTVFSAPQNRSPPAGTAPTPGTSSAQDLPSSPIYASVSPANPSSKRPLDAHLALVNQHPIGPFPRVQSPPHLKSPSAEATVAGGCLLPPSPSGHPDQTGTNQHFVMVEVHRPDSEPDVNEVRALPQTRTASTLSHLSDSGQTLSEDSGVDAGEAEASAPGRGRQSVSTKSRSSKELPRNERPTDGANKPPGLLEPTSTLVRVKKSAATLGIAIEGGANTRQPLPRIVTIQRGGSAHNCGQLKVGHVILEVNGLTLRGKEHREAARIIAEAFKTKDRDYIDFLVTEFNVML

SEQ ID NO: 6300 - DNA, 623 bp, Homo sapiens
agactcggcccgggtggctcaacagttcgcaaagtccgggcttgcggccgggcggcgcagaggcgcggaggctccccgggcggctgcatcccggggctgccccggacatgccccgcaccccttgtcggacgcccgcgccgcttcaccggctgccactccccggagtgctctgggactagagcgccctccgccccaacttctgactttggggtcccccagccctagaggaacgggcgcccggctgggggagccccgggcatggtgtgacggggcagtcaggtcagctttgcggcgcccccaaactccagccacccgtcgtctccgtgccctcttcccccatctatgcctccgtctcccctgccaaccccagctccaagaggccgctggacgcccatctggccctggtcaaccaacaccccatcggccccttcccacgggtccagtcacccccgcacctgaaaagcccctctgcagaggccacagtggctgggggctgccttctgcccccatcaccctctggccacccagaccagacaggcacaaaccagcactttgtcatggtggaggtccaccgccccgacagcgagccagacgtcaatgaagtgagggcgctgccccagacg

SEQ ID NO: 6301 - protein, 38 aa, Homo sapiens
MPPSPLPTPAPRGRWTPIWPWSTNTPSAPSHGSSHPRT

SEQ ID NO: 6302 - DNA, 1777 bp, Homo sapiens
cgggctggcaacgagacggcgtcggaactcgctggaagactcggcccgggtggctcaacagttcgcaaagtccgggcttgcggccgggcggcgcagaggcgcggaggctccccgggcggctgcatcccggggctgccccggacatgccccgcaccccttgtcggacgcccgcgccgcttcaccggctgccactccccggagtgctctgggactagagcgccctccgccccaacttctgactttggggtcccccagccctagaggaacgggcgcccggctgggggagccccgggcatggtgtgacggggcagtcaggtcagctttgcggcgcccccaaactccagccacccgtcgtctccgtgccctccagaatgtagctgctgaccccgcgccccccggactccagcagcagtctccgccacctccgggctccagcagccaactcttgtgtctctcaggaacccgccgacgtctccgcgtcccccggattccaggttcgcgacccccgccgtcttcgcgcctccgggactctagcagcggtctccgcgaccccctaggatccagccactgtacccgtgctccccaaacccaggctccagccgtcgtctccgcgctcccggggatccagctgtcgcgccagtacccgcgaggacagcggcaccgcccacaccccgcgcgctcagagcccggccgggcctcggcgtggagatgaacgcgccgctggacggcctgtcggtgagctcgtcctccaccggctcgctgggctcggcggccggggcgggcggcggcgggggcgcggggctgcggttactgtctgccaacgtgcgccagctgcaccaagcgctgaccgcgctgctgagcgaggcggagcgggagcagttcacccactgcctgaacgcttaccacgcgcgccgcaacgtcttcgacctggtgcgcaccctgcgcgtgctgctggacagtccggtcaagcggcgcctgctgcccatgcttcgtctggtcatcccgcgctccgaccagctgctcttcgaccaatacacggccgagggcctctacctgcccgccaccaccccctacaggcagcccgcctggggcggccccgacagcgcggggccaggggaggtgcgcctggtgagtttgcggcgtgccaaggcccacgagggcttgggcttcagcatccgtgggggctcggagcacggcgtgggcatctacgtgtctctggtggaaccaggctctctagctgagaaggaaggactgcgggtcggggaccagattctgcgcgtcaacgacaaatccctggcccgggtgacccacgcggaggccgtcaaggctctgaagggctccaagaagctggtgctgtctgtgtactcagcagggcgcatccctgggggctacgtcaccaaccacatctacacctgggtggacccgcagggccgcagcatctccccaccctcgggcctgccccagccccacggtggtgccctgaggcagcaggagggtgaccggaggagcaccctgcacctcctgcaaggaggggatgagaaaaaggtgagtggggtggggaaaggaggccagcctctcagacaccgtattctccctccgaacccagaacagcagagctgcttggaggccgcaagaagaggctggttctgtccaggctctgtcttccctcaagtctgtactgaagggtggtgttttttctttgcttttctttttgacctgtgtagtgtatgttataatacaggctaagctgccacaataaaagagcttaaatactgtg

SEQ ID NO: 6303 - protein, 345 aa, Homo sapiens
MNAPLDGLSVSSSSTGSLGSAAGAGGGGGAGLRLLSANVRQLHQALTALLSEAEREQFTHCLNAYHARRNVFDLVRTLRVLLDSPVKRRLLPMLRLVIPRSDQLLFDQYTAEGLYLPATTPYRQPAWGGPDSAGPGEVRLVSLRRAKAHEGLGFSIRGGSEHGVGIYVSLVEPGSLAEKEGLRVGDQILRVNDKSLARVTHAEAVKALKGSKKLVLSVYSAGRIPGGYVTNHIYTWVDPQGRSISPPSGLPQPHGGALRQQEGDRRSTLHLLQGGDEKKVSGVGKGGQPLRHRILPPNPEQQSCLEAARRGWFCPGSVFPQVCTEGWCFFFAFLFDLCSVCYNTG

SEQ ID NO: 6304 - DNA, 791 bp, Homo sapiens
gcccggccgggcctcggcgtggagatgaacgcgccgctggacggcctgtcggtgagctcgtcctccaccggctcgctgggctcggcggccggggcgggcggcggcgggggcgcggggctgcggttactgtctgccaacgtgcgccagctgcaccaagcgctgaccgcgctgctgagcgaggcggagcgggagcagttcacccactgcctgaacgcttaccacgcgcgccgcaacgtcttcgacctggtgcgcaccctgcgcgtgctgctggacagtccggtcaagcggcgcctgctgcccatgcttcgtctggtcatcccgcgctccgaccagctgctcttcgaccaatacacggccgagggcctctacctgcccgccaccaccccctacaggcagcccgcctggggcggccccgacagcgcggggccaggggaggtgcgcctggtgagtttgcggcgtgccaaggcccacgagggcttgggcttcagcatccgtgggggctcggagcacggcgtgggcatctacgtgtctctggtggaaccaggctctctagctgagaaggaaggactgcgggtcggggaccagattctgcgcgtcaacgacaaatccctggcccgggtgacccacgcggaggccgtcaaggttgtgtatcctgaagcaagtcacttgccctctcaggacctcttgttctccacttggaaaatggggccactggaccaaataagcggtccctaacctttttggaaatgagactcctgcctgaatgtaaaaaataaattccctagcccctg

SEQ ID NO: 6305 - protein, 236 aa, Homo sapiens
MNAPLDGLSVSSSSTGSLGSAAGAGGGGGAGLRLLSANVRQLHQALTALLSEAEREQFTHCLNAYHARRNVFDLVRTLRVLLDSPVKRRLLPMLRLVIPRSDQLLFDQYTAEGLYLPATTPYRQPAWGGPDSAGPGEVRLVSLRRAKAHEGLGFSIRGGSEHGVGIYVSLVEPGSLAEKEGLRVGDQILRVNDKSLARVTHAEAVKVVYPEASHLPSQDLLFSTWKMGPLDQISGP

SEQ ID NO: 6306 - DNA, 1084 bp, Homo sapiens
aacgagacggcgtcggaactcgctggaagactcggcccgggtggctcaacagttcgcaaagtccgggcttgcggccgggcggcgcagaggcgcggaggctccccgggcggctgcatcccggggctgccccggacatgccccgcaccccttgtcggacgcccgcgccgcttcaccggctgccactccccggagtgctctgggactagagcgccctccgccccaacttctgactttggggtcccccagccctagaggaacgggcgcccggctgggggagccccgggcatggtgtgacggggcagtcaggaacccgccgacgtctccgcgtcccccggattccaggttcgcgacccccgccgtcttcgcgcctccgggactctagcagcggtctccgcgaccccctaggatccagccactgtacccgtgctccccaaacccaggctccagccgtcgtctccgcgctcccggggatccagctgtcgcgccagtacccgcgaggacagcggcaccgcccacaccccgcgcgctcagagcccggccgggcctcggcgtggagatgaacgcgccgctggacggcctgtcggtgagctcgtcctccaccggctcgctgggctcggcggccggggcgggcggcggcgggggcgcggggctgcggttactgtctgccaacgtgcgccagctgcaccaagcgctgaccgcgctgctgagcgaggcggagcgggagcagttcacccactgcctgaacgcttaccacgcgcgccgcaacgtcttcgacctggtgcgcaccctgcgcgtgctgctggacagtccggtcaagcggcgcctgctgcccatgcttcgtctggtcatcccgcgctccgaccagctgctcttcgaccaatacacggccgagggcctctacctgcccgccaccaccccctacaggcagcccgcctggggcggccccgacagcgcggggccaggggaggtgcgcctggtgagtttgcggcgtgccaaggcccacgagggcttgggcttcagcatccgtgggggctcggagcacggcgtgggcatctacgtgtctctggtggaaccaggctctcta

SEQ ID NO: 6307 - protein, 175 aa, Homo sapiens
MNAPLDGLSVSSSSTGSLGSAAGAGGGGGAGLRLLSANVRQLHQALTALLSEAEREQFTHCLNAYHARRNVFDLVRTLRVLLDSPVKRRLLPMLRLVIPRSDQLLFDQYTAEGLYLPATTPYRQPAWGGPDSAGPGEVRLVSLRRAKAHEGLGFSIRGGSEHGVGIYVSLVEPGS

SEQ ID NO: 6308 - DNA, 1138 bp, Homo sapiens
cgggctggcaacgagacggcgtcggaactcgctggaagactcggcccgggtggctcaacagttcgcaaagtccgggcttgcggccgggcggcgcagaggcgcggaggctccccgggcggctgcatcccggggctgccccggacatgccccgcaccccttgtcggacgcccgcgccgcttcaccggctgccactccccggagtgctctgggactagagcgccctccgccccaacttctgactttggggtcccccagccctagaggaacgggcgcccggctgggggagccccgggcatggtgtgacggggcagtcaggtcagctttgcggcgcccccaaactccagccacccgtcgtctccgtgccctccagaatgtagctgctgaccccgcgccccccggactccagcagcagtctccgccacctccgggctccagcagccaactcttgtgtctctcaggaacccgccgacgtctccgcgtcccccggattccaggctccagccgtcgtctccgcgctcccggggatccagctgtcgcgccagtacccgcgaggacagcggcaccgcccacaccccgcgcgctcagagcccggccgggcctcggcgtggagatgaacgcgccgctggacggcctgtcggtgagctcgtcctccaccggctcgctgggctcggcggccggggcgggcggcggcgggggcgcggggctgcggttactgtctgccaacgtgcgccagctgcaccaagcgctgaccgcgctgctgagcgaggcggagcgggagcagttcacccactgcctgaacgcttaccacgcgcgccgcaacgtcttcgacctggtgcgcaccctgcgcgtgctgctggacagtccggtcaagcggcgcctgctgcccatgcttcgtctggtcatcccgcgctccgaccagctgctcttcgaccaatacacggccgagggcctctacctgcccgccaccaccccctacaggcagcccgcctggggcggccccgacagcgcggggccaggggaggtgcgcctggtgagtttgcggcgtgccaaggcccacgagggcttgggcttcagcatccgtgggggctcggagcacggcgtgggcatctacgtgtctctggtggaaccaggctctcta

SEQ ID NO: 6309 - protein, 175 aa, Homo sapiens; identical to SEQ ID NO: 6307

SEQ ID NO: 6310 - DNA, 556 bp, Homo sapiens
aacgagacggcgtcggaactcgctggaagactcggcccgggtggctcaacagttcgcaaagtccgggcttgcggccgggcggcgcagaggcgcggaggctccccgggcggctgcatcccggggctgccccggacatgccccgcaccccttgtcggacgcccgcgccgcttcaccggctgccactccccggagtgctctgggactagagcgccctccgccccaacttctgactttggggtcccccagccctagaggaacgggcgcccggctgggggagccccgggcatggtgtgacggggcagtcaggtcagctttgcggcgcccccaaactccagccacccgtcgtctccgtgccctccagaatgtagctgctgaccccgcgccccccggactccagcagcagtccccgccgtcttcgcgcctccgggactctagcagcggtctccgcgaccccctaggatccagccactgtacccgtgctccccaaacccaggctccagccgtcgtctccgcgctcccggggatccagctgtcgcgccagtacccgcgaggacag

SEQ ID NO: 6311 - protein, 184 aa, Homo sapiens
TRRRRNSLEDSARVAQQFAKSGLAAGRRRGAEAPRAAASRGCPGHAPHPLSDARAASPAATPRSALGLERPPPQLLTLGSPSPRGTGARLGEPRAWCDGAVRSALRRPQTPATRRLRALQNVAADPAPPGLQQQSPPSSRLRDSSSGLRDPLGSSHCTRAPQTQAPAVVSALPGIQLSRQYPRG

SEQ ID NO: 6312 - DNA, 8884 bp, Homo sapiens
cgcaaaaaataaataaattagagcatcttttggggggagggaattcagcggatcagtcttaagaggagcttttttttggagcgagaaatcatataaaataaaatgaaataaaacaaggaggaaggcaaccagctgttaggggaaaaataaggcagataaaggagcggggagagaaattaattgccaaccaggaggagttgggctgtatttttcaaaggtggggagagtggagcacacaccttgaggaggaaagcgagaaagaaaagaaaaaagcaagtggaaaggggggctcgcccaagaagggtgaagaagcgaagaaagtcgaggcgccgaggctcccaaagctggcagctccgggtggcggtgcaggggcgaagggggggcggggggaaccgtcggacatgcggctctggagttgggtgctgcacctggggctgctgagcgccgcgctgggctgcgggctggccgagcgtccccgccgggcccggagagacccgcgggccggccgacccccgcgccccgccgccggcccggccacctgcgccacccgggcggcccgcggccgccgcgcctcgccgccgccgccgccgccgccgggcggtgcctgggaagccgtgcgcgtcccccggcggcggcagcagcgggaggcgaggggcgccaccgaggagccgagcccgccgagccgggcgctctatttcagcgggcgaggcgagcagctgcgcctccgggccgacctcgagctgccccgggacgcgttcacgctgcaagtgtggctgcgagcggaggggggccagaggtctccggcagtgatcacagggctgtatgacaaatgttcttatatctcacgtgaccgaggatgggtcgtgggcattcacaccatcagtgaccaagacaacaaagacccacgctactttttctccttgaagacagaccgagcccggcaagtgaccaccatcaatgcccaccgcagctacctcccaggccagtgggtatacctagctgccacctatgatgggcagttcatgaagctctatgtgaatggtgcccaggtggccacctctggggaacaagtgggtggcatattcagcccactgacccagaagtgcaaagtgctcatgttagggggcagtgccctgaatcacaactaccggggctacatcgagcacttcagtctgtggaaggtggccaggactcagcgggagatactgtctgacatggaaacccatggcgcccacactgctctacctcagctcctcctccaggagaactgggacaatgtgaagcatgcctggtcccccatgaaggatggcagcagccccaaagtggaattcagcaatgcccacggctttctgctggacacgagtctggagcctcctctgtgcggacagacattgtgtgacaacacagaggtcattgccagctacaatcagctctcaagtttccgccagcccaaggtggtgcgctaccgcgtggtcaacctctatgaagatgatcataagaacccgacggtgacgcgcgagcaggtggacttccagcaccatcagctggctgaggccttcaagcaatacaacatctcctgggagctggacgtgctggaggtgagcaactcctcccttcgccgccgcctcatcctggccaactgtgacatcagcaagattggggatgagaactgtgaccccgagtgcaaccacacgctgacgggccacgacggcggggattgccgccacctgcgccaccctgccttcgtgaagaagcagcacaacggggtgtgtgacatggactgcaactatgaacggttcaactttgatggtggagagtgctgtgaccctgaaatcaccaatgtcactcagacttgctttgaccccgactctccacacagagcctacttggatgttaatgagctgaagaacattcttaaattggatggatcaacacatctcaatattttctttgcaaaatcctcagaggaggagttggcaggagtagcaacttggccatgggacaaggaggccctgatgcacttaggtggcattgtcttgaacccatctttctatggcatgcctgggcacacccacaccatgatccatgagattggtcacagcctgggcctctatcacgtcttccgaggcatctcagaaatccagtcctgcagtgacccctgcatggagacagagccctccttcgagactggagacctctgcaatgataccaacccagcccctaaacacaagtcctgtggtgacccagggccaggaaatgacacctgtggctttcatagcttcttcaacactccttacaacaacttcatgagctatgcagatgacgactgtacggactccttcacgcccaatcaagtcgccagaatgcactgttacctggacctggtctaccagggctggcagccctccaggaaaccagcgcctgttgccctcgccccccaagttctgggccacacaacggactctgtgacactggagtggttcccacctatagatggccatttctttgaaagagaattgggatcagcatgtcatctttgcctggaagggagaatcctggtgcagtatgcttccaacgcttcctccccaatgccctgcagcccatcaggacactggagccctcgtgaagcagaaggtcatcctgatgttgaacagccctgtaagtccagtgtccgcacctggagcccaaattcagctgtcaacccacacacggttcctccagcctgccctgagcctcaaggctgctacctcgagctggagttcctctaccccttggtccctgagtctctgaccatttgggtgacctttgtctccactgactgggactctagtggagctgtcaatgacatcaaactgttggctgtcagtgggaagaacatctccctgggtcctcagaatgtcttctgtgatgtcccactgaccatcagactctgggacgtgggcgaggaggtgtatggcatccaaatctacacgctggatgagcacctggagatcgatgctgccatgttgacctccactgcagacaccccactctgtctacagtgtaagcccctgaagtataaggtggtccgggaccctcctctccagatggatgtggcctccatcctacatctcaataggaaattcgtagacatggatctaaatcttggcagtgtgtaccagtattgggtcataactatttcaggaactgaagagagtgagccatcacctgctgtcacatacatccatggaagtgggtactgtggcgatggcattatacaaaaagaccaaggtgaacaatgcgacgacatgaataagatcaatggtgatggctgctcccttttctgccgacaagaagtctccttcaattgtattgatgaacccagccggtgctatttccatgatggtgatggggtatgtgaggagtttgaacaaaaaaccagcattaaggactgtggtgtctacacgccccagggattcctggatcagtgggcatccaatgcttcagtatctcatcaagaccagcaatgcccaggctgggtcatcatcggacagccagcagcatcccaggtgtgtcgaaccaaggtgatagatctcagtgaaggcatttcccagcatgcctggtacccttgcaccatcagctacccatattcccagctggctcagaccactttttggctccgggcgtatttttctcaaccaatggttgccgcagctgtcattgtccacctggtgacggatgggacatattatggggaccaaaagcaggagaccatcagcgtgcagctgcttgataccaaagatcagagccacgatctaggcctccatgtcctgagctgcaggaacaatcccctgattatccctgtggtccatgacctcagccagcccttctaccacagccaggcggtacgtgtgagcttcagttcgcccctggtcgccatctcgggggtggccctccgttccttcgacaactttgaccccgtcaccctgagcagctgccagagaggggagacctacagccctgccgagcagagctgcgtgcacttcgcatgtgagaaaactgactgtccagagctggctgtggagaatgcttctctcaattgctccagcagcgaccgctaccacggtgcccagtgtactgtgagctgccggacaggctacgtgctccagatacggcgggatgatgagctgatcaagagccagacgggacccagcgtcacagtgacctgtacagagggcaagtggaataagcaggtggcctgtgagccagtcgactgcagcatcccagatcaccatcaagtctatgctgcctccttctcctgccctgagggcaccacctttggcagtcaatgttccttccagtgccgtcaccctgcacaattgaaaggcaacaacagcctcctgacctgcatggaggatgggctgtggtccttcccagaggccctgtgtgagctcatgtgcctcgctccaccccctgtgcccaatgcagacctccagaccgcccggtgccgagagaataagcacaaggtgggctccttctgcaaatacaaatgcaagcctggataccatgtgcctggatcctctcggaagtcaaagaaacgggccttcaagactcagtgtacccaggatggcagctggcaggagggagcttgtgttcctgtgacctgtgacccacctccaccaaaattccatgggctctaccagtgtactaatggcttccagttcaacagtgagtgtaggatcaagtgtgaagacagtgatgcctcccagggacttgggagcaatgtcattcattgccggaaagatggcacctggaacggctccttccatgtctgccaggagatgcaaggccagtgctcggttccaaacgagctcaacagcaacctcaaactgcagtgccctgatggctatgccatagggtcggagtgtgccacctcgtgcctggaccacaacagcgagtccatcatcctgccaatgaacgtgaccgtgcgtgacatcccccactggctgaaccccacacgggtagagagagttgtctgcactgctggtctcaagtggtatcctcaccctgctctgattcactgtgtcaaaggctgtgagcccttcatgggagacaattattgtgatgccatcaacaaccgagccttttgcaactatgacggtggggattgctgcacctccacagtgaagaccaaaaaggtcaccccattccctatgtcctgtgatctacaaggtgactgtgcttgtcgggacccccaggcccaagaacacagccggaaagacctccggggatacagccatggctaaggaaggacaagaagttgtcaaagaattcccaacgccaggacccacatccctttggtattgatttcacagtcagctgctcaacggaatggcctctccacaccagggatccttagcacccaaccggtctgcctttaattttacccaggaaggactcacattggggcgaatgaaccaagtttcgccatgctggatgatgaaatggattcccatcccaaagtctgagatggattgcatatacagtgtgcagtcccagagcctcctaaaattctagccatttgtcacacaaccacagcaagaaacgtgttctatatctagagtgtgcccatctgtgtttagtacacatgcatgcatacacacccatacaaacatctgtgtgagggcagttctggagatgagcagagagagaccggaataaactcaatcttttctttcccaagctcctagccaacactatccttgggagaaagaaatttgcagaaactgctaagaccaagtgtggagatgtcaagctagttcacactctgaggctcagaatatgtaggacatgcacaattgtgcagtcctttgggattggaagtgaaacagtctgtgatcccctaccttctagggaactaggacctaggaagaggtaaagattatcaggtatgcaaagcgccccaattcttctgctgccatgggggattttaccccaactccagggttcgaggccaatctgagaatggcttaggattgcaatgtcaaggtattatatcagccccttgcttgaggcttgaggtcataatatccctctaggacttacctgttcccccagatcttgccttgggaccacatttgctgctacttttcctgctgctctatcctatacattgaataatccaagatggtagaactaggttaggaaaaattccacacaaccaaacagtctgccttaaaagtgacccacatttttccatagctcctcactttttagcccttctgcaagagaaaaaccctcatgggtccacatggtgagaagttaagtttcctgtaagtgggcctctcaccctggaaaggagttgagggacatcagatgctggaaccctcactgaaagtccagaatgtctaagccagtgttagattttgtaaacaagtggaacagtgttaaatttctatgatgttggagccatccagagactactggaattgtcgagacttttggattattatccttatccttatcctaatcttcctagcccttcaggctagagtaggctttgatcctgagaaccttgctgttgctctgaggagatataattctgggagaaagaatcttttataagaacagtacagattgttctcaagagggccatcagaaggaagccaaagagttcacagcctcagcaccaacaactcaacatggtcatcatgttttctatatggtttttccagctagcagtactcccttccatacctgtgactgggcagtgcttttctctctcccatgtctagcctccaaaagttaagtgaaaattagtcaactgcacgtggaagcccccaccactttggggatctctttatttcttttcagccagggacctgtccactccctttgaattaatatgggaagaaattaatacaggatgaactggagagaagggttgagtgtggcatactttctgaaacctggagctgggaattgcggagaagggaaggtctagactagttacatcacatagggattactgtaaatcaagtcatctcaagtctagtgaagacagccaacagaaacaaaacctagcatagggatagaaaataccatgcacgtgtgcagccccacctaattcctgcatccaaggcaggtgttgttaatctatcatagcacttaaaaaaaaaaaaaaaaagagaccaaaaataactttaggaaccaccatattatatcactcccaatagcactgacctggtgatcaaaaacacttgagaagacatctattggccatctctggccaattacactaagaaacatatcaaggtgcttttggcacaggtgcccacaaatacggatgcagtgctgagatagtttatgagacttgtaccatttcacaaactctgaaattgggttccatattggcaaggctgccacagttgttaagaataatcctctatgtttcttcctcacaaaaccatatctcatttatatccagaccattacttcactataattacaaggacaaattattagcaagaaataagaatagtattagaagaattgatcctattttgaacccctctccagtatcttcacactcttgtcaactctccaggcctctctcttgccctgagttatcagcctgtgtggtgttaactaccttagaaggtacaagctaagaaatgtaacagtatcaaccctcccagttgcttaattatacccataggtaatacaaaaagctctgaagacccaaagatgacattactaatgatgtgatttcaggagccacagaagaaccttaccagcttccctcaaatcagtccttatcctctttctatcttcactcccatcatcatctattttcacactatccagctaagcaaagattcctggaggctgacttgtatcttcagactcacagagtgaattcagctcttctgaatcaagacccacccagtctctttcattcagacctgttgctaacaaatttatatttgccaaggatattaggcaaaagaggctacttgattggtggccaacctcgtgcccacatggaaggtatctttaatagggtcttttcaaaccttagtggaggagggtcagctcaatttgggcaatgcatttgttcccagtttcattttcttcctgggaattaactcgtcatttcattccttcagtcatcttctgtgtaggtgaccggagcactgagaggcagctctgatgcactattgtgtgtcagcagctcaaaggccctaaaacactgaaggttctgcatctgaagtattagattgttagcagcaaaatatgaaagatgaggtggacagtcctctaagccctatttagggaagcttttccaagccacaatcttaactacctacccaaaggatttgcattacccccagattctgtgccaacaaccttttaaggaaatacagtccttgggaaatgagttttgatggtgaattggggtgttaaggaagggaaagattgtcatagatggtagggctttgaaaatgcagggtatcagctgccactcctggcttcaacacattgagtcactgcctagacggttctcttggtcttattcccatcctggccaatgcttaaatactatttgttgaaaataattctttgagacagatttcagctacctcccttccaggttcgatttaacttggttgtaattgtcaatttgttgttataggtcttacctgtgtgaaagaaagaaaaagaaagaaagaaagaaagagaaaggaaattataaggtcaagttaacagttttgaggttttgtgtttttttctggaactacttcaagtgagaaaataaaaaaaaatggtgacaaagctgtacagatagagataatagaagacaaagagattaaaaggaaataaaaatgcatgattaaaaactaag

SEQ ID NO: 6313 - protein, 1627 aa, Homo sapiens; identical to SEQ ID NO: 857

SEQ ID NO: 6314 - DNA, 10991 bp, Homo sapiens
cgcaaaaaataaataaattagagcatcttttggggggagggaattcagcggatcagtcttaagaggagcttttttttggagcgagaaatcatataaaataaaatgaaataaaacaaggaggaaggcaaccagctgttaggggaaaaataaggcagataaaggagcggggagagaaattaattgccaaccaggaggagttgggctgtatttttcaaaggtggggagagtggagcacacaccttgaggaggaaagcgagaaagaaaagaaaaaagcaagtggaaaggggggctcgcccaagaagggtgaagaagcgaagaaagtcgaggcgccgaggctcccaaagctggcagctccgggtggcggtgcaggggcgaagggggggcggggggaaccgtcggacatgcggctctggagttgggtgctgcacctggggctgctgagcgccgcgctgggctgcgggctggccgagcgtccccgccgggcccggagagacccgcgggccggccgacccccgcgccccgccgccggcccggccacctgcgccacccgggcggcccgcggccgccgcgcctcgccgccgccgccgccgccgccgggcggtgcctgggaagccgtgcgcgtcccccggcggcggcagcagcgggaggcgaggggcgccaccgaggagccgagcccgccgagccgggcgctctatttcagcgggcgaggcgagcagctgcgcctccgggccgacctcgagctgccccgggacgcgttcacgctgcaagtgtggctgcgagcggaggggggccagaggtctccggcagtgatcacagggctgtatgacaaatgttcttatatctcacgtgaccgaggatgggtcgtgggcattcacaccatcagtgaccaagacaacaaagacccacgctactttttctccttgaagacagaccgagcccggcaagtgaccaccatcaatgcccaccgcagctacctcccaggccagtgggtatacctagctgccacctatgatgggcagttcatgaagctctatgtgaatggtgcccaggtggccacctctggggaacaagtgggtggcatattcagcccactgacccagaagtgcaaagtgctcatgttagggggcagtgccctgaatcacaactaccggggctacatcgagcacttcagtctgtggaaggtggccaggactcagcgggagatactgtctgacatggaaacccatggcgcccacactgctctacctcagctcctcctccaggagaactgggacaatgtgaagcatgcctggtcccccatgaaggatggcagcagccccaaagtggaattcagcaatgcccacggctttctgctggacacgagtctggagcctcctctgtgcggacagacattgtgtgacaacacagaggtcattgccagctacaatcagctctcaagtttccgccagcccaaggtggtgcgctaccgcgtggtcaacctctatgaagatgatcataagaacccgacggtgacgcgcgagcaggtggacttccagcaccatcagctggctgaggccttcaagcaatacaacatctcctgggagctggacgtgctggaggtgagcaactcctcccttcgccgccgcctcatcctggccaactgtgacatcagcaagattggggatgagaactgtgaccccgagtgcaaccacacgctgacgggccacgacggcggggattgccgccacctgcgccaccctgccttcgtgaagaagcagcacaacggggtgtgtgacatggactgcaactatgaacggttcaactttgatggtggagagtgctgtgaccctgaaatcaccaatgtcactcagacttgctttgaccccgactctccacacagagcctacttggatgttaatgagctgaagaacattcttaaattggatggatcaacacatctcaatattttctttgcaaaatcctcagaggaggagttggcaggagtagcaacttggccatgggacaaggaggccctgatgcacttaggtggcattgtcttgaacccatctttctatggcatgcctgggcacacccacaccatgatccatgagattggtcacagcctgggcctctatcacgtcttccgaggcatctcagaaatccagtcctgcagtgacccctgcatggagacagagccctccttcgagactggagacctctgcaatgataccaacccagcccctaaacacaagtcctgtggtgacccagggccaggaaatgacacctgtggctttcatagcttcttcaacactccttacaacaacttcatgagctatgcagatgacgactgtacggactccttcacgcccaatcaagtcgccagaatgcactgttacctggacctggtctaccagggctggcagccctccaggaaaccagcgcctgttgccctcgccccccaagttctgggccacacaacggactctgtgacactggagtggttcccacctatagatggccatttctttgaaagagaattgggatcagcatgtcatctttgcctggaagggagaatcctggtgcagtatgcttccaacgcttcctccccaatgccctgcagcccatcaggacactggagccctcgtgaagcagaaggtcatcctgatgttgaacagccctgtaagtccagtgtccgcacctggagcccaaattcagctgtcaacccacacacggttcctccagcctgccctgagcctcaaggctgctacctcgagctggagttcctctaccccttggtccctgagtctctgaccatttgggtgacctttgtctccactgactgggactctagtggagctgtcaatgacatcaaactgttggctgtcagtgggaagaacatctccctgggtcctcagaatgtcttctgtgatgtcccactgaccatcagactctgggacgtgggcgaggaggtgtatggcatccaaatctacacgctggatgagcacctggagatcgatgctgccatgttgacctccactgcagacaccccactctgtctacagtgtaagcccctgaagtataaggtggtccgggaccctcctctccagatggatgtggcctccatcctacatctcaataggaaattcgtagacatggatctaaatcttggcagtgtgtaccagtattgggtcataactatttcaggaactgaagagagtgagccatcacctgctgtcacatacatccatggaagtgggtactgtggcgatggcattatacaaaaagaccaaggtgaacaatgcgacgacatgaataagatcaatggtgatggctgctcccttttctgccgacaagaagtctccttcaattgtattgatgaacccagccggtgctatttccatgatggtgatggggtatgtgaggagtttgaacaaaaaaccagcattaaggactgtggtgtctacacgccccagggattcctggatcagtgggcatccaatgcttcagtatctcatcaagaccagcaatgcccaggctgggtcatcatcggacagccagcagcatcccaggtgtgtcgaaccaaggtgatagatctcagtgaaggcatttcccagcatgcctggtacccttgcaccatcagctacccatattcccagctggctcagaccactttttggctccgggcgtatttttctcaaccaatggttgccgcagctgtcattgtccacctggtgacggatgggacatattatggggaccaaaagcaggagaccatcagcgtgcagctgcttgataccaaagatcagagccacgatctaggcctccatgtcctgagctgcaggaacaatcccctgattatccctgtggtccatgacctcagccagcccttctaccacagccaggcggtacgtgtgagcttcagttcgcccctggtcgccatctcgggggtggccctccgttccttcgacaactttgaccccgtcaccctgagcagctgccagagaggggagacctacagccctgccgagcagagctgcgtgcacttcgcatgtgagaaaactgactgtccagagctggctgtggagaatgcttctctcaattgctccagcagcgaccgctaccacggtgcccagtgtactgtgagctgccggacaggctacgtgctccagatacggcgggatgatgagctgatcaagagccagacgggacccagcgtcacagtgacctgtacagagggcaagtggaataagcaggtggcctgtgagccagtcgactgcagcatcccagatcaccatcaagtctatgctgcctccttctcctgccctgagggcaccacctttggcagtcaatgttccttccagtgccgtcaccctgcacaattgaaaggcaacaacagcctcctgacctgcatggaggatgggctgtggtccttcccagaggccctgtgtgagctcatgtgcctcgctccaccccctgtgcccaatgcagacctccagaccgcccggtgccgagagaataagcacaaggtgggctccttctgcaaatacaaatgcaagcctggataccatgtgcctggatcctctcggaagtcaaagaaacgggccttcaagactcagtgtacccaggatggcagctggcaggagggagcttgtgttcctgtgacctgtgacccacctccaccaaaattccatgggctctaccagtgtactaatggcttccagttcaacagtgagtgtaggatcaagtgtgaagacagtgatgcctcccagggacttgggagcaatgtcattcattgccggaaagatggcacctggaacggctccttccatgtctgccaggagatgcaaggccagtgctcggttccaaacgagctcaacagcaacctcaaactgcagtgccctgatggctatgccatagggtcggagtgtgccacctcgtgcctggaccacaacagcgagtccatcatcctgccaatgaacgtgaccgtgcgtgacatcccccactggctgaaccccacacgggtagagagagttgtctgcactgctggtctcaagtggtatcctcaccctgctctgattcactgtgtcaaaggctgtgagcccttcatgggagacaattattgtgatgccatcaacaaccgagccttttgcaactatgacggtggggattgctgcacctccacagtgaagaccaaaaaggtcaccccattccctatgtcctgtgatctacaaggtgactgtgcttgtcgggacccccaggcccaagaacacagccggaaagacctccggggatacagccatggctaaggaaggacaagaagttgtcaaagaattcccaacgccaggacccacatccctttggtattgatttcacagtcagctgctcaacggaatggcctctccacaccagggatccttagcacccaaccggtctgcctttaattttacccaggaaggactcacattggggcgaatgaaccaagtttcgccatgctggatgatgaaatggattcccatcccaaagtctgagatggattgcatatacagtgtgcagtcccagagcctcctaaaattctagccatttgtcacacaaccacagcaagaaacgtgttctatatctagagtgtgcccatctgtgtttagtacacatgcatgcatacacacccatacaaacatctgtgtgagggcagttctggagatgagcagagagagaccggaataaactcaatcttttctttcccaagctcctagccaacactatccttgggagaaagaaatttgcagaaactgctaagaccaagtgtggagatgtcaagctagttcacactctgaggctcagaatatgtaggacatgcacaattgtgcagtcctttgggattggaagtgaaacagtctgtgatcccctaccttctagggaactaggacctaggaagaggtaaagattatcaggtatgcaaagcgccccaattcttctgctgccatgggggattttaccccaactccagggttcgaggccaatctgagaatggcttaggattgcaatgtcaaggtattatatcagccccttgcttgaggcttgaggtcataatatccctctaggacttacctgttcccccagatcttgccttgggaccacatttgctgctacttttcctgctgctctatcctatacattgaataatccaagatggtagaactaggttaggaaaaattccacacaaccaaacagtctgccttaaaagtgacccacatttttccatagctcctcactttttagcccttctgcaagagaaaaaccctcatgggtccacatggtgagaagttaagtttcctgtaagtgggcctctcaccctggaaaggagttgagggacatcagatgctggaaccctcactgaaagtccagaatgtctaagccagtgttagattttgtaaacaagtggaacagtgttaaatttctatgatgttggagccatccagagactactggaattgtcgagacttttggattattatccttatccttatcctaatcttcctagcccttcaggctagagtaggctttgatcctgagaaccttgctgttgctctgaggagatataattctgggagaaagaatcttttataagaacagtacagattgttctcaagagggccatcagaaggaagccaaagagttcacagcctcagcaccaacaactcaacatggtcatcatgttttctatatggtttttccagctagcagtactcccttccatacctgtgactgggcagtgcttttctctctcccatgtctagcctccaaaagttaagtgaaaattagtcaactgcacgtggaagcccccaccactttggggatctctttatttcttttcagccagggacctgtccactccctttgaattaatatgggaagaaattaatacaggatgaactggagagaagggttgagtgtggcatactttctgaaacctggagctgggaattgcggagaagggaaggtctagactagttacatcacatagggattactgtaaatcaagtcatctcaagtctagtgaagacagccaacagaaacaaaacctagcatagggatagaaaataccatgcacgtgtgcagccccacctaattcctgcatccaaggcaggtgttgttaatctatcatagcacttaaaaaaaaaaaaaaaaagagaccaaaaataactttaggaaccaccatattatatcactcccaatagcactgacctggtgatcaaaaacacttgagaagacatctattggccatctctggccaattacactaagaaacatatcaaggtgcttttggcacaggtgcccacaaatacggatgcagtgctgagatagtttatgagacttgtaccatttcacaaactctgaaattgggttccatattggcaaggctgccacagttgttaagaataatcctctatgtttcttcctcacaaaaccatatctcatttatatccagaccattacttcactataattacaaggacaaattattagcaagaaataagaatagtattagaagaattgatcctattttgaacccctctccagtatcttcacactcttgtcaactctccaggcctctctcttgccctgagttatcagcctgtgtggtgttaactaccttagaaggtacaagctaagaaatgtaacagtatcaaccctcccagttgcttaattatacccataggtaatacaaaaagctctgaagacccaaagatgacattactaatgatgtgatttcaggagccacagaagaaccttaccagcttccctcaaatcagtccttatcctctttctatcttcactcccatcatcatctattttcacactatccagctaagcaaagattcctggaggctgacttgtatcttcagactcacagagtgaattcagctcttctgaatcaagacccacccagtctctttcattcagacctgttgctaacaaatttatatttgccaaggatattaggcaaaagaggctacttgattggtggccaacctcgtgcccacatggaaggtatctttaatagggtcttttcaaaccttagtggaggagggtcagctcaatttgggcaatgcatttgttcccagtttcattttcttcctgggaattaactcgtcatttcattccttcagtcatcttctgtgtaggtgaccggagcactgagaggcagctctgatgcactattgtgtgtcagcagctcaaaggccctaaaacactgaaggttctgcatctgaagtattagattgttagcagcaaaatatgaaagatgaggtggacagtcctctaagccctatttagggaagcttttccaagccacaatcttaactacctacccaaaggatttgcattacccccagattctgtgccaacaaccttttaaggaaatacagtccttgggaaatgagttttgatggtgaattggggtgttaaggaagggaaagattgtcatagatggtagggctttgaaaatgcagggtatcagctgccactcctggcttcaacacattgagtcactgcctagacggttctcttggtcttattcccatcctggccaatgcttaaatactatttgttgaaaataattctttgagacagatttcagctacctcccttccaggttcgatttaacttggttgtaattgtcaatttgttgttataggtcttacctgtgtgaaagaaagaaaaagaaagaaagaaagaaagagaaaggaaattataaggtcaagttaacagttttgaggttttgtgtttttttctggaactacttcaagtgagaaaataaaaaaaaatggtgacaaagctgtacagatagagataatagaagacaaagagattaaaaggaaataaaaatgcatgattaaaaactaagaataaaaaacctatttttatgtttcctaaaggaaattgtttattctacagcctcagtaggtagacacaaacataaagatttccctagaagacatagagtgggatttgataacactgtctgttattttctgtacattgtggtaggtccaggaaatatgacattttcccccttgatgtgttattgttgttgttgggtggggtgggcattttgtttatttgtttggtggcaatcagtggtagtagggagtgggagggcttatattggtttttccagctattaaggggacatattgtgtcgttgtgcttttcacgttataaaatgtttatatttaccagtacagcactgggctttataaagactgcactcagaaccacactgcacagtccagttttttaaaaagctgctacatgacagacaggtaatcccactgagtgagttttgagaaacaaatcaaacgaagtaaacaagaaacataaaaaccaaatagcaaatgaataaaagcctgttcttgtaacttattcaacttttgccaaattcctaccaatcacttgctttttaaaagaaatgtataatagccaaaagagaaattatgtccctgttgtacagaagttagaatttttgactccaggcagcagtttgctcagtgatcttgaacaagttatccaattgcctctacatttgcatcagtttctctagctgcaaaatggggataatactatatacctacctcacagtgggagggcaggagattttgaggccctgaggttttaggtgggctgtgagggccaacgcttgacacaaagtccatgggttattattcaagaatgcacaggcccatcggccttttagaaagacaagacagggagtgcttgtttgatatttcaaggaataaagccggagctcctgaattgtagtccaccttaaaagagagacctgtattggagaatattttatttttttggcaaatttgatcttaccctttaccagttctataatttggttaaaagctgattatgtcctacaatgtcaaagtcagctaactgtcgtctacttaagacttctggtcatttccaacttatagaggaagggagtctctaaaatctcttcttcagaaggcacctcacttctcagacttaaaattccacatcaagtgttccattaaaagaagataaggcattctgagtgcaaacaaatgggggcttcttaaactacacaccagcagtcagtgaggaaaactttgaacaattattgagttgctttcttgggtctctataatcaataacctgtctgcagatatctatctatataaagatattatatataaatataaatttacatatatatgcacatgtatatatagttgtacatatatgtgtgtatatatatacttaaatgtaatatttacaaaataaaactgtgatctcgtctagagaaaatgtattcatattacaaactgctcttccatatttatgtaccatattatacctttttattattgttataattattatgggtatttctaattaatatgatgttgaaacctgtttggcaccttctggaagctaccaaaaaaatgacactccattgaagtgcttaaaagctgttctcataagaattcttctggcctattgtaaaaaagaaaaaaaaaaagaaaaagaagaaagacacaaagaaaataatctaaacaccaaaaactaaacacaattccaatcctttttctgtacctcacgcgcataaatttgctgctcctatttttttttctgtttatgtgtttttatggatctaagttaaatcttttggcaatatataaaaatgtaaatagtaaactttatttattaagaatgtcatcttttttaatttatatttacacaattgttcatctaatttattttttctatacagttttaaatactcagacatattttgctgttcatgatatttttatcctgttctcatggatttgttttcccatactgttttctctgatctcaattacaggttggatctcacaaataataatgtcagagacagaaatattttgccactgttgattactatactttaaagttctatattatgaaaatatataatagcttgtacgcttcag

SEQ ID NO: 6315 - protein, 1627 aa, Homo sapiens; identical to SEQ ID NO: 857

SEQ ID NO: 6316 - DNA, 1854 bp, Homo sapiens
attcaagccacagtgtcttctatctccaagctggtgagacacactgcagtcctctacagaacagaagagagacagtgcacaagattgctcttgggagcttgatgatgattgacaaggtgtactctggtccttgcctgcctctgcaggcttctctcttctcgaacgcactctagtctaagctccagacacaaattgtcgttgccctgagtggaccatgttccctctcacctccccacgtttgcagaagctttcttcaaatccccagagctgccttttctgtgactagtccccatttgtcctttattcacagtttaacctctcaaaaacctgcctggaaacccacccccagaagggctaatggaccctcactaggtcttcctataccatcatccgcttccccagttaaaattgtacttagcgtatttgtgaaatgaataactggatgactttctccatgctgggcattgtgctaaatgtttcaagtacataaggcattcaaatctagaagagccccgtgtttggtcctattattatccccattttacagacaatgaaattgaggtttcaagagggtaagtcattcccatgctgtccagttaatctattttgaatggatgtggatattcaggagaatctgatgagatgggctgatctgattctctctcggatgccctatgatttggcactacttgggggctcaggggcctgatggagctgtgatcacaacctggctcttcactaattagctggtgtcaatgaccagcacactttagccctgagtccgtttcctctttggcaaattggcaaaataatgactaccttcccaactgttatgaggacaaaaaaatgagaagctgttgagaaagcacgtagcaccacatccagcatttaaaaaacaaattttttaaagtaaaagatgaggagtttccctttccttaaaggaagtaatctgtctctgctaccttgtgccacagttaaactgcacaggctcaataacttatgttttggttaaacgtttttaatttttttagagtgaaatccgagtttttgttggcaagtgattgaacacgctgggcccagcctgcaggcccacagtccattaggaaatttacgaggcgagatggggaccttcagctcaagtactcccttcagacgcagtacttacaaagccatcaatttccttaacaaagagcattggcttaaatgccccttaaagcagtgttatttacacagctatccacttccttttgaattctctgcctggggggtggcagacctgcagttctttccagctacgagttaattaggctctctccccaaatggaagcaagccgcagactgagatttggtattaaaaagcagctcaatttggggccatccgagagtcttatggggtgatccaaataccaccaaaatcactggttccacccacccattcttctaaaattctaaagcctttggaccttaccaaagagtaatgacctctgtcagtatagagatagagaaggaaaggcagcatttgagcccgtctctacttagtgaaagaagcctcaaaaaagtactgctggctaagatagcatactttctacctcttggtgtatcgatatagtaacattaacattttaaagaagcccccaccccttttgtgggggaactaggatttggatacaagcagcccagttcaggggtctgagcatgaaaccaccaccccaagccacctgacccaagataacctgcccgagatgacagctaagggggaaagtctcctattcaaacaggattgtctgactctaaagaccagcaaagctcaactacactttcttgcctgaaaaataaaactgtctcttaagaaat

SEQ ID NO: 6317 - protein, 60 aa, Homo sapiens
MGTFSSSTPFRRSTYKAINFLNKEHWLKCPLKQCYLHSYPLPFEFSAWGVADLQFFPATS

SEQ ID NO: 6318 - DNA, 742 bp, Homo sapiens
gtaatctcttgctgcagaggaggaacacgggatccccagccagatggtccgtgggtgacttcacagcacatgtgctacctccaagagttcttcattcccatggtccacatgaagaaaatggaccccaaaggaacaaaagcaacaaagataaaaattccttctcctcccatgggggtgggaggtgaagaacgaagcaagcaaacactcatagagaaatgtgcagggttctctgaggaacaaggaccttccagagtgatgcttttccctagtggcagccttggccagggcaacagacatctgcacaaacgcagggtgttgaagcagctgttctgagatgcagtgcctgagaatctgggatccacaatgtgaacttctcaacaacccctgcacctgccacttccctgaatcttccactaagcaccagaagacacatgcattttaaatcaaaggaatggctcccatgcagaaaccagagtgttaaaatggatccctcccaccctgaactctgactggtttggttcacctcaaagaccatcctcctgctatatggtttcgataagtctaaaaagatgagccattcaagccacagtgtcttctatctccaagctggtgagacacactgcagtcctctacagaacagaagagagacagtgcacaagattgctcttgggtaagttttctttttcttatgtaatgaatgggttactcttcagcccttagaataaaaatactataataactt

SEQ ID NO: 6319 - protein, 87 aa, Homo sapiens
MCYLQEFFIPMVHMKKMDPKGTKATKIKIPSPPMGVGGEERSKQTLIEKCAGFSEEQGPSRVMLFPSGSLGQGNRHLHKRRVLKQLF

SEQ ID NO: 6320 - DNA, 681 bp, Homo sapiens
catggggaacaaaatagagagcttcacaggtgagaaatcactgagaccaatatttcttgtgaatacggagaatatgatccaaaagcaaaagtcctccagtgagaatttatgcagacttaaaaaatttaagacattgagttacaaaaagattagtatgtcatatctcactctgggaaagagaaatgtcattttaaaaatctctggttggagtttcttaagaggaggcagaaggccctttctggtctcattctacaggtaacatacccagtctaatttatcaaagtaaggatgggaaggaatagagagtggggaggaatagagagtagagacgaggggacttgaaagacaaacaaaaacaaatgaacacatttgtgtgtacaaaaataaaaacaaaatcttgtgcacagccaaactctaactcacctcaaaaccccatcctttgggtctggcttgagaaagtttactttcagacttagagaaatgagtatgtggttttagggacaaaattcaataccgccaaagcagcaggctcagcaagctcaactggctattgcttcctaagtgcattacagcccaggagagtgaacgctgtttacattttttacatgtttcttgggtacagaacatgaaactaaattacacagcaaaggccatgctggctgaatgctggtgaccccactt

SEQ ID NO: 6321 - protein, 85 aa, Homo sapiens
MGNKIESFTGEKSLRPIFLVNTENMIQKQKSSSENLCRLKKFKTLSYKKISMSYLTLGKRNVILKISGWSFLRGGRRPFLVSFYR

SEQ ID NO: 6322 - DNA, 4223 bp, Homo sapiens
aaaattcttttctgttgtattcagaatagcttattcaattggggctggtgtctctcttggtcctaactctgtttctctgttgttcagggacttgggagcaatgtcattcattgccggaaagatggcacctggaacggctccttccatgtctgccaggagatgcaaggccagtgctcggttccaaacgagctcaacagcaacctcaaactgcagtgccctgatggctatgccatagggtcggagtgtgccacctcgtgcctggaccacaacagcgagtccatcatcctgccaatgaacgtgaccgtgcgtgacatcccccactggctgaaccccacacgggtagagagagttgtctgcactgctggtctcaagtggtatcctcaccctgctctgattcactgtgtcaaaggctgtgagcccttcatgggagacaattattgtgatgccatcaacaaccgagccttttgcaactatgacggtggggattgctgcacctccacagtgaagaccaaaaaggtcaccccattccctatgtcctgtgatctacaaggtgactgtgcttgtcgggacccccaggcccaagaacacagccggaaagacctccggggatacagccatggctaaggaaggacaagaagttgtcaaagaattcccaacgccaggacccacatccctttggtattgatttcacagtcagctgctcaacggaatggcctctccacaccagggatccttagcacccaaccggtctgcctttaattttacccaggaaggactcacattggggcgaatgaaccaagtttcgccatgctggatgatgaaatggattcccatcccaaagtctgagatggattgcatatacagtgtgcagtcccagagcctcctaaaattctagccatttgtcacacaaccacagcaagaaacgtgttctatatctagagtgtgcccatctgtgtttagtacacatgcatgcatacacacccatacaaacatctgtgtgagggcagttctggagatgagcagagagagaccggaataaactcaatcttttctttcccaagctcctagccaacactatccttgggagaaagaaatttgcagaaactgctaagaccaagtgtggagatgtcaagctagttcacactctgaggctcagaatatgtaggacatgcacaattgtgcagtcctttgggattggaagtgaaacagtctgtgatcccctaccttctagggaactaggacctaggaagaggtaaagattatcaggtatgcaaagcgccccaattcttctgctgccatgggggattttaccccaactccagggttcgaggccaatctgagaatggcttaggattgcaatgtcaaggtattatatcagccccttgcttgaggcttgaggtcataatatccctctaggacttacctgttcccccagatcttgccttgggaccacatttgctgctacttttcctgctgctctatcctatacattgaataatccaagatggtagaactaggttaggaaaaattccacacaaccaaacagtctgccttaaaagtgacccacatttttccatagctcctcactttttagcccttctgcaagagaaaaaccctcatgggtccacatggtgagaagttaagtttcctgtaagtgggcctctcaccctggaaaggagttgagggacatcagatgctggaaccctcactgaaagtccagaatgtctaagccagtgttagattttgtaaacaagtggaacagtgttaaatttctatgatgttggagccatccagagactactggaattgtcgagacttttggattattatccttatccttatcctaatcttcctagcccttcaggctagagtaggctttgatcctgagaaccttgctgttgctctgaggagatataattctgggagaaagaatcttttataagaacagtacagattgttctcaagagggccatcagaaggaagccaaagagttcacagcctcagcaccaacaactcaacatggtcatcatgttttctatatggtttttccagctagcagtactcccttccatacctgtgactgggcagtgcttttctctctcccatgtctagcctccaaaagttaagtgaaaattagtcaactgcacgtggaagcccccaccactttggggatctctttatttcttttcagccagggacctgtccactccctttgaattaatatgggaagaaattaatacaggatgaactggagagaagggttgagtgtggcatactttctgaaacctggagctgggaattgcggagaagggaaggtctagactagttacatcacatagggattactgtaaatcaagtcatctcaagtctagtgaagacagccaacagaaacaaaacctagcatagggatagaaaataccatgcacgtgtgcagccccacctaattcctgcatccaaggcaggtgttgttaatctatcatagcacttaaaaaaaaaaaaaaaaagagaccaaaaataactttaggaaccaccatattatatcactcccaatagcactgacctggtgatcaaaaacacttgagaagacatctattggccatctctggccaattacactaagaaacatatcaaggtgcttttggcacaggtgcccacaaatacggatgcagtgctgagatagtttatgagacttgtaccatttcacaaactctgaaattgggttccatattggcaaggctgccacagttgttaagaataatcctctatgtttcttcctcacaaaaccatatctcatttatatccagaccattacttcactataattacaaggacaaattattagcaagaaataagaatagtattagaagaattgatcctattttgaacccctctccagtatcttcacactcttgtcaactctccaggcctctctcttgccctgagttatcagcctgtgtggtgttaactaccttagaaggtacaagctaagaaatgtaacagtatcaaccctcccagttgcttaattatacccataggtaatacaaaaagctctgaagacccaaagatgacattactaatgatgtgatttcaggagccacagaagaaccttaccagcttccctcaaatcagtccttatcctctttctatcttcactcccatcatcatctattttcacactatccagctaagcaaagattcctggaggctgacttgtatcttcagactcacagagtgaattcagctcttctgaatcaagacccacccagtctctttcattcagacctgttgctaacaaatttatatttgccaaggatattaggcaaaagaggctacttgattggtggccaacctcgtgcccacatggaaggtatctttaatagggtcttttcaaaccttagtggaggagggtcagctcaatttgggcaatgcatttgttcccagtttcattttcttcctgggaattaactcgtcatttcattccttcagtcatcttctgtgtaggtgaccggagcactgagaggcagctctgatgcactattgtgtgtcagcagctcaaaggccctaaaacactgaaggttctgcatctgaagtattagattgttagcagcaaaatatgaaagatgaggtggacagtcctctaagccctatttagggaagcttttccaagccacaatcttaactacctacccaaaggatttgcattacccccagattctgtgccaacaaccttttaaggaaatacagtccttgggaaatgagttttgatggtgaattggggtgttaaggaagggaaagattgtcatagatggtagggctttgaaaatgcagggtatcagctgccactcctggcttcaacacattgagtcactgcctagacggttctcttggtcttattcccatcctggccaatgcttaaatactatttgttgaaaataattctttgagacagatttcagctacctcccttccaggttcgatttaacttggttgtaattgtcaatttgttgttataggtcttacctgtgtgaaagaaagaaaaagaaagaaagaaagaaagagaaaggaaattataaggtcaagttaacagttttgaggttttgtgtttttttctggaactacttcaagtgagaaaataaaaaaaaatggtgacaaagctgtacagatagagataatagaagacaaagagattaaaaggaaataaaaatgcatgattaaaaactaag

SEQ ID NO: 6323 - protein, 154 aa, Homo sapiens
MQGQCSVPNELNSNLKLQCPDGYAIGSECATSCLDHNSESIILPMNVTVRDIPHWLNPTRVERVVCTAGLKWYPHPALIHCVKGCEPFMGDNYCDAINNRAFCNYDGGDCCTSTVKTKKVTPFPMSCDLQGDCACRDPQAQEHSRKDLRGYSHG

SEQ ID NO: 6324 - DNA, 6330 bp, Homo sapiens
aaaattcttttctgttgtattcagaatagcttattcaattggggctggtgtctctcttggtcctaactctgtttctctgttgttcagggacttgggagcaatgtcattcattgccggaaagatggcacctggaacggctccttccatgtctgccaggagatgcaaggccagtgctcggttccaaacgagctcaacagcaacctcaaactgcagtgccctgatggctatgccatagggtcggagtgtgccacctcgtgcctggaccacaacagcgagtccatcatcctgccaatgaacgtgaccgtgcgtgacatcccccactggctgaaccccacacgggtagagagagttgtctgcactgctggtctcaagtggtatcctcaccctgctctgattcactgtgtcaaaggctgtgagcccttcatgggagacaattattgtgatgccatcaacaaccgagccttttgcaactatgacggtggggattgctgcacctccacagtgaagaccaaaaaggtcaccccattccctatgtcctgtgatctacaaggtgactgtgcttgtcgggacccccaggcccaagaacacagccggaaagacctccggggatacagccatggctaaggaaggacaagaagttgtcaaagaattcccaacgccaggacccacatccctttggtattgatttcacagtcagctgctcaacggaatggcctctccacaccagggatccttagcacccaaccggtctgcctttaattttacccaggaaggactcacattggggcgaatgaaccaagtttcgccatgctggatgatgaaatggattcccatcccaaagtctgagatggattgcatatacagtgtgcagtcccagagcctcctaaaattctagccatttgtcacacaaccacagcaagaaacgtgttctatatctagagtgtgcccatctgtgtttagtacacatgcatgcatacacacccatacaaacatctgtgtgagggcagttctggagatgagcagagagagaccggaataaactcaatcttttctttcccaagctcctagccaacactatccttgggagaaagaaatttgcagaaactgctaagaccaagtgtggagatgtcaagctagttcacactctgaggctcagaatatgtaggacatgcacaattgtgcagtcctttgggattggaagtgaaacagtctgtgatcccctaccttctagggaactaggacctaggaagaggtaaagattatcaggtatgcaaagcgccccaattcttctgctgccatgggggattttaccccaactccagggttcgaggccaatctgagaatggcttaggattgcaatgtcaaggtattatatcagccccttgcttgaggcttgaggtcataatatccctctaggacttacctgttcccccagatcttgccttgggaccacatttgctgctacttttcctgctgctctatcctatacattgaataatccaagatggtagaactaggttaggaaaaattccacacaaccaaacagtctgccttaaaagtgacccacatttttccatagctcctcactttttagcccttctgcaagagaaaaaccctcatgggtccacatggtgagaagttaagtttcctgtaagtgggcctctcaccctggaaaggagttgagggacatcagatgctggaaccctcactgaaagtccagaatgtctaagccagtgttagattttgtaaacaagtggaacagtgttaaatttctatgatgttggagccatccagagactactggaattgtcgagacttttggattattatccttatccttatcctaatcttcctagcccttcaggctagagtaggctttgatcctgagaaccttgctgttgctctgaggagatataattctgggagaaagaatcttttataagaacagtacagattgttctcaagagggccatcagaaggaagccaaagagttcacagcctcagcaccaacaactcaacatggtcatcatgttttctatatggtttttccagctagcagtactcccttccatacctgtgactgggcagtgcttttctctctcccatgtctagcctccaaaagttaagtgaaaattagtcaactgcacgtggaagcccccaccactttggggatctctttatttcttttcagccagggacctgtccactccctttgaattaatatgggaagaaattaatacaggatgaactggagagaagggttgagtgtggcatactttctgaaacctggagctgggaattgcggagaagggaaggtctagactagttacatcacatagggattactgtaaatcaagtcatctcaagtctagtgaagacagccaacagaaacaaaacctagcatagggatagaaaataccatgcacgtgtgcagccccacctaattcctgcatccaaggcaggtgttgttaatctatcatagcacttaaaaaaaaaaaaaaaaagagaccaaaaataactttaggaaccaccatattatatcactcccaatagcactgacctggtgatcaaaaacacttgagaagacatctattggccatctctggccaattacactaagaaacatatcaaggtgcttttggcacaggtgcccacaaatacggatgcagtgctgagatagtttatgagacttgtaccatttcacaaactctgaaattgggttccatattggcaaggctgccacagttgttaagaataatcctctatgtttcttcctcacaaaaccatatctcatttatatccagaccattacttcactataattacaaggacaaattattagcaagaaataagaatagtattagaagaattgatcctattttgaacccctctccagtatcttcacactcttgtcaactctccaggcctctctcttgccctgagttatcagcctgtgtggtgttaactaccttagaaggtacaagctaagaaatgtaacagtatcaaccctcccagttgcttaattatacccataggtaatacaaaaagctctgaagacccaaagatgacattactaatgatgtgatttcaggagccacagaagaaccttaccagcttccctcaaatcagtccttatcctctttctatcttcactcccatcatcatctattttcacactatccagctaagcaaagattcctggaggctgacttgtatcttcagactcacagagtgaattcagctcttctgaatcaagacccacccagtctctttcattcagacctgttgctaacaaatttatatttgccaaggatattaggcaaaagaggctacttgattggtggccaacctcgtgcccacatggaaggtatctttaatagggtcttttcaaaccttagtggaggagggtcagctcaatttgggcaatgcatttgttcccagtttcattttcttcctgggaattaactcgtcatttcattccttcagtcatcttctgtgtaggtgaccggagcactgagaggcagctctgatgcactattgtgtgtcagcagctcaaaggccctaaaacactgaaggttctgcatctgaagtattagattgttagcagcaaaatatgaaagatgaggtggacagtcctctaagccctatttagggaagcttttccaagccacaatcttaactacctacccaaaggatttgcattacccccagattctgtgccaacaaccttttaaggaaatacagtccttgggaaatgagttttgatggtgaattggggtgttaaggaagggaaagattgtcatagatggtagggctttgaaaatgcagggtatcagctgccactcctggcttcaacacattgagtcactgcctagacggttctcttggtcttattcccatcctggccaatgcttaaatactatttgttgaaaataattctttgagacagatttcagctacctcccttccaggttcgatttaacttggttgtaattgtcaatttgttgttataggtcttacctgtgtgaaagaaagaaaaagaaagaaagaaagaaagagaaaggaaattataaggtcaagttaacagttttgaggttttgtgtttttttctggaactacttcaagtgagaaaataaaaaaaaatggtgacaaagctgtacagatagagataatagaagacaaagagattaaaaggaaataaaaatgcatgattaaaaactaagaataaaaaacctatttttatgtttcctaaaggaaattgtttattctacagcctcagtaggtagacacaaacataaagatttccctagaagacatagagtgggatttgataacactgtctgttattttctgtacattgtggtaggtccaggaaatatgacattttcccccttgatgtgttattgttgttgttgggtggggtgggcattttgtttatttgtttggtggcaatcagtggtagtagggagtgggagggcttatattggtttttccagctattaaggggacatattgtgtcgttgtgcttttcacgttataaaatgtttatatttaccagtacagcactgggctttataaagactgcactcagaaccacactgcacagtccagttttttaaaaagctgctacatgacagacaggtaatcccactgagtgagttttgagaaacaaatcaaacgaagtaaacaagaaacataaaaaccaaatagcaaatgaataaaagcctgttcttgtaacttattcaacttttgccaaattcctaccaatcacttgctttttaaaagaaatgtataatagccaaaagagaaattatgtccctgttgtacagaagttagaatttttgactccaggcagcagtttgctcagtgatcttgaacaagttatccaattgcctctacatttgcatcagtttctctagctgcaaaatggggataatactatatacctacctcacagtgggagggcaggagattttgaggccctgaggttttaggtgggctgtgagggccaacgcttgacacaaagtccatgggttattattcaagaatgcacaggcccatcggccttttagaaagacaagacagggagtgcttgtttgatatttcaaggaataaagccggagctcctgaattgtagtccaccttaaaagagagacctgtattggagaatattttatttttttggcaaatttgatcttaccctttaccagttctataatttggttaaaagctgattatgtcctacaatgtcaaagtcagctaactgtcgtctacttaagacttctggtcatttccaacttatagaggaagggagtctctaaaatctcttcttcagaaggcacctcacttctcagacttaaaattccacatcaagtgttccattaaaagaagataaggcattctgagtgcaaacaaatgggggcttcttaaactacacaccagcagtcagtgaggaaaactttgaacaattattgagttgctttcttgggtctctataatcaataacctgtctgcagatatctatctatataaagatattatatataaatataaatttacatatatatgcacatgtatatatagttgtacatatatgtgtgtatatatatacttaaatgtaatatttacaaaataaaactgtgatctcgtctagagaaaatgtattcatattacaaactgctcttccatatttatgtaccatattatacctttttattattgttataattattatgggtatttctaattaatatgatgttgaaacctgtttggcaccttctggaagctaccaaaaaaatgacactccattgaagtgcttaaaagctgttctcataagaattcttctggcctattgtaaaaaagaaaaaaaaaaagaaaaagaagaaagacacaaagaaaataatctaaacaccaaaaactaaacacaattccaatcctttttctgtacctcacgcgcataaatttgctgctcctatttttttttctgtttatgtgtttttatggatctaagttaaatcttttggcaatatataaaaatgtaaatagtaaactttatttattaagaatgtcatcttttttaatttatatttacacaattgttcatctaatttattttttctatacagttttaaatactcagacatattttgctgttcatgatatttttatcctgttctcatggatttgttttcccatactgttttctctgatctcaattacaggttggatctcacaaataataatgtcagagacagaaatattttgccactgttgattactatactttaaagttctatattatgaaaatatataatagcttgtacgcttcag

SEQ ID NO: 6325 - protein, 154 aa, Homo sapiens; identical to SEQ ID NO: 6323

SEQ ID NO: 6326 - DNA, 4455 bp, Homo sapiens
tctaactgacctagagatggagaactaagtgcactggaggggaagcccatagacaaagagatgcagccagaatctactgatttttttcattcatttatggacacgctcatacattcgttcatttgattgtccatttgttcatttacttattcaataaacatcgactatgcacctccaagcagatactcttcaaacactaggaatacgaagtgggaaatgcctaggcttttaaaaagcttaccctggaaagaagccagaaactcagtggctgataacaaaaagcaaataattaataataataataataataactgatatgattcactcatagcaggtcccagaaatcaaggaaaaaagctaagggaaaaagggcttatcttagaagacatccaggaggggtgtcagatctgagcctctggatgagggggctctcttagatgctttctcacatgtctttggctctgcttggggcctgtcttcttgggccttcatcttttagatgctctacccactccaacatttgtctcaaagggcctctccacctttctgaactttggtcttcccatcggtcaaaaaaagagttgtctgcactgctggtctcaagtggtatcctcaccctgctctgattcactgtgtcaaaggctgtgagcccttcatgggagacaattattgtgatgccatcaacaaccgagccttttgcaactatgacggtggggattgctgcacctccacagtgaagaccaaaaaggtcaccccattccctatgtcctgtgatctacaaggtgactgtgcttgtcgggacccccaggcccaagaacacagccggaaagacctccggggatacagccatggctaaggaaggacaagaagttgtcaaagaattcccaacgccaggacccacatccctttggtattgatttcacagtcagctgctcaacggaatggcctctccacaccagggatccttagcacccaaccggtctgcctttaattttacccaggaaggactcacattggggcgaatgaaccaagtttcgccatgctggatgatgaaatggattcccatcccaaagtctgagatggattgcatatacagtgtgcagtcccagagcctcctaaaattctagccatttgtcacacaaccacagcaagaaacgtgttctatatctagagtgtgcccatctgtgtttagtacacatgcatgcatacacacccatacaaacatctgtgtgagggcagttctggagatgagcagagagagaccggaataaactcaatcttttctttcccaagctcctagccaacactatccttgggagaaagaaatttgcagaaactgctaagaccaagtgtggagatgtcaagctagttcacactctgaggctcagaatatgtaggacatgcacaattgtgcagtcctttgggattggaagtgaaacagtctgtgatcccctaccttctagggaactaggacctaggaagaggtaaagattatcaggtatgcaaagcgccccaattcttctgctgccatgggggattttaccccaactccagggttcgaggccaatctgagaatggcttaggattgcaatgtcaaggtattatatcagccccttgcttgaggcttgaggtcataatatccctctaggacttacctgttcccccagatcttgccttgggaccacatttgctgctacttttcctgctgctctatcctatacattgaataatccaagatggtagaactaggttaggaaaaattccacacaaccaaacagtctgccttaaaagtgacccacatttttccatagctcctcactttttagcccttctgcaagagaaaaaccctcatgggtccacatggtgagaagttaagtttcctgtaagtgggcctctcaccctggaaaggagttgagggacatcagatgctggaaccctcactgaaagtccagaatgtctaagccagtgttagattttgtaaacaagtggaacagtgttaaatttctatgatgttggagccatccagagactactggaattgtcgagacttttggattattatccttatccttatcctaatcttcctagcccttcaggctagagtaggctttgatcctgagaaccttgctgttgctctgaggagatataattctgggagaaagaatcttttataagaacagtacagattgttctcaagagggccatcagaaggaagccaaagagttcacagcctcagcaccaacaactcaacatggtcatcatgttttctatatggtttttccagctagcagtactcccttccatacctgtgactgggcagtgcttttctctctcccatgtctagcctccaaaagttaagtgaaaattagtcaactgcacgtggaagcccccaccactttggggatctctttatttcttttcagccagggacctgtccactccctttgaattaatatgggaagaaattaatacaggatgaactggagagaagggttgagtgtggcatactttctgaaacctggagctgggaattgcggagaagggaaggtctagactagttacatcacatagggattactgtaaatcaagtcatctcaagtctagtgaagacagccaacagaaacaaaacctagcatagggatagaaaataccatgcacgtgtgcagccccacctaattcctgcatccaaggcaggtgttgttaatctatcatagcacttaaaaaaaaaaaaaaaaagagaccaaaaataactttaggaaccaccatattatatcactcccaatagcactgacctggtgatcaaaaacacttgagaagacatctattggccatctctggccaattacactaagaaacatatcaaggtgcttttggcacaggtgcccacaaatacggatgcagtgctgagatagtttatgagacttgtaccatttcacaaactctgaaattgggttccatattggcaaggctgccacagttgttaagaataatcctctatgtttcttcctcacaaaaccatatctcatttatatccagaccattacttcactataattacaaggacaaattattagcaagaaataagaatagtattagaagaattgatcctattttgaacccctctccagtatcttcacactcttgtcaactctccaggcctctctcttgccctgagttatcagcctgtgtggtgttaactaccttagaaggtacaagctaagaaatgtaacagtatcaaccctcccagttgcttaattatacccataggtaatacaaaaagctctgaagacccaaagatgacattactaatgatgtgatttcaggagccacagaagaaccttaccagcttccctcaaatcagtccttatcctctttctatcttcactcccatcatcatctattttcacactatccagctaagcaaagattcctggaggctgacttgtatcttcagactcacagagtgaattcagctcttctgaatcaagacccacccagtctctttcattcagacctgttgctaacaaatttatatttgccaaggatattaggcaaaagaggctacttgattggtggccaacctcgtgcccacatggaaggtatctttaatagggtcttttcaaaccttagtggaggagggtcagctcaatttgggcaatgcatttgttcccagtttcattttcttcctgggaattaactcgtcatttcattccttcagtcatcttctgtgtaggtgaccggagcactgagaggcagctctgatgcactattgtgtgtcagcagctcaaaggccctaaaacactgaaggttctgcatctgaagtattagattgttagcagcaaaatatgaaagatgaggtggacagtcctctaagccctatttagggaagcttttccaagccacaatcttaactacctacccaaaggatttgcattacccccagattctgtgccaacaaccttttaaggaaatacagtccttgggaaatgagttttgatggtgaattggggtgttaaggaagggaaagattgtcatagatggtagggctttgaaaatgcagggtatcagctgccactcctggcttcaacacattgagtcactgcctagacggttctcttggtcttattcccatcctggccaatgcttaaatactatttgttgaaaataattctttgagacagatttcagctacctcccttccaggttcgatttaacttggttgtaattgtcaatttgttgttataggtcttacctgtgtgaaagaaagaaaaagaaagaaagaaagaaagagaaaggaaattataaggtcaagttaacagttttgaggttttgtgtttttttctggaactacttcaagtgagaaaataaaaaaaaatggtgacaaagctgtacagatagagataatagaagacaaagagattaaaaggaaataaaaatgcatgattaaaaactaag

SEQ ID NO: 6327 - protein, 66 aa, Homo sapiens
MGDNYCDAINNRAFCNYDGGDCCTSTVKTKKVTPFPMSCDLQGDCACRDPQAQEHSRKDLRGYSHG

SEQ ID NO: 6328 - DNA, 6562 bp, Homo sapiens
tctaactgacctagagatggagaactaagtgcactggaggggaagcccatagacaaagagatgcagccagaatctactgatttttttcattcatttatggacacgctcatacattcgttcatttgattgtccatttgttcatttacttattcaataaacatcgactatgcacctccaagcagatactcttcaaacactaggaatacgaagtgggaaatgcctaggcttttaaaaagcttaccctggaaagaagccagaaactcagtggctgataacaaaaagcaaataattaataataataataataataactgatatgattcactcatagcaggtcccagaaatcaaggaaaaaagctaagggaaaaagggcttatcttagaagacatccaggaggggtgtcagatctgagcctctggatgagggggctctcttagatgctttctcacatgtctttggctctgcttggggcctgtcttcttgggccttcatcttttagatgctctacccactccaacatttgtctcaaagggcctctccacctttctgaactttggtcttcccatcggtcaaaaaaagagttgtctgcactgctggtctcaagtggtatcctcaccctgctctgattcactgtgtcaaaggctgtgagcccttcatgggagacaattattgtgatgccatcaacaaccgagccttttgcaactatgacggtggggattgctgcacctccacagtgaagaccaaaaaggtcaccccattccctatgtcctgtgatctacaaggtgactgtgcttgtcgggacccccaggcccaagaacacagccggaaagacctccggggatacagccatggctaaggaaggacaagaagttgtcaaagaattcccaacgccaggacccacatccctttggtattgatttcacagtcagctgctcaacggaatggcctctccacaccagggatccttagcacccaaccggtctgcctttaattttacccaggaaggactcacattggggcgaatgaaccaagtttcgccatgctggatgatgaaatggattcccatcccaaagtctgagatggattgcatatacagtgtgcagtcccagagcctcctaaaattctagccatttgtcacacaaccacagcaagaaacgtgttctatatctagagtgtgcccatctgtgtttagtacacatgcatgcatacacacccatacaaacatctgtgtgagggcagttctggagatgagcagagagagaccggaataaactcaatcttttctttcccaagctcctagccaacactatccttgggagaaagaaatttgcagaaactgctaagaccaagtgtggagatgtcaagctagttcacactctgaggctcagaatatgtaggacatgcacaattgtgcagtcctttgggattggaagtgaaacagtctgtgatcccctaccttctagggaactaggacctaggaagaggtaaagattatcaggtatgcaaagcgccccaattcttctgctgccatgggggattttaccccaactccagggttcgaggccaatctgagaatggcttaggattgcaatgtcaaggtattatatcagccccttgcttgaggcttgaggtcataatatccctctaggacttacctgttcccccagatcttgccttgggaccacatttgctgctacttttcctgctgctctatcctatacattgaataatccaagatggtagaactaggttaggaaaaattccacacaaccaaacagtctgccttaaaagtgacccacatttttccatagctcctcactttttagcccttctgcaagagaaaaaccctcatgggtccacatggtgagaagttaagtttcctgtaagtgggcctctcaccctggaaaggagttgagggacatcagatgctggaaccctcactgaaagtccagaatgtctaagccagtgttagattttgtaaacaagtggaacagtgttaaatttctatgatgttggagccatccagagactactggaattgtcgagacttttggattattatccttatccttatcctaatcttcctagcccttcaggctagagtaggctttgatcctgagaaccttgctgttgctctgaggagatataattctgggagaaagaatcttttataagaacagtacagattgttctcaagagggccatcagaaggaagccaaagagttcacagcctcagcaccaacaactcaacatggtcatcatgttttctatatggtttttccagctagcagtactcccttccatacctgtgactgggcagtgcttttctctctcccatgtctagcctccaaaagttaagtgaaaattagtcaactgcacgtggaagcccccaccactttggggatctctttatttcttttcagccagggacctgtccactccctttgaattaatatgggaagaaattaatacaggatgaactggagagaagggttgagtgtggcatactttctgaaacctggagctgggaattgcggagaagggaaggtctagactagttacatcacatagggattactgtaaatcaagtcatctcaagtctagtgaagacagccaacagaaacaaaacctagcatagggatagaaaataccatgcacgtgtgcagccccacctaattcctgcatccaaggcaggtgttgttaatctatcatagcacttaaaaaaaaaaaaaaaaagagaccaaaaataactttaggaaccaccatattatatcactcccaatagcactgacctggtgatcaaaaacacttgagaagacatctattggccatctctggccaattacactaagaaacatatcaaggtgcttttggcacaggtgcccacaaatacggatgcagtgctgagatagtttatgagacttgtaccatttcacaaactctgaaattgggttccatattggcaaggctgccacagttgttaagaataatcctctatgtttcttcctcacaaaaccatatctcatttatatccagaccattacttcactataattacaaggacaaattattagcaagaaataagaatagtattagaagaattgatcctattttgaacccctctccagtatcttcacactcttgtcaactctccaggcctctctcttgccctgagttatcagcctgtgtggtgttaactaccttagaaggtacaagctaagaaatgtaacagtatcaaccctcccagttgcttaattatacccataggtaatacaaaaagctctgaagacccaaagatgacattactaatgatgtgatttcaggagccacagaagaaccttaccagcttccctcaaatcagtccttatcctctttctatcttcactcccatcatcatctattttcacactatccagctaagcaaagattcctggaggctgacttgtatcttcagactcacagagtgaattcagctcttctgaatcaagacccacccagtctctttcattcagacctgttgctaacaaatttatatttgccaaggatattaggcaaaagaggctacttgattggtggccaacctcgtgcccacatggaaggtatctttaatagggtcttttcaaaccttagtggaggagggtcagctcaatttgggcaatgcatttgttcccagtttcattttcttcctgggaattaactcgtcatttcattccttcagtcatcttctgtgtaggtgaccggagcactgagaggcagctctgatgcactattgtgtgtcagcagctcaaaggccctaaaacactgaaggttctgcatctgaagtattagattgttagcagcaaaatatgaaagatgaggtggacagtcctctaagccctatttagggaagcttttccaagccacaatcttaactacctacccaaaggatttgcattacccccagattctgtgccaacaaccttttaaggaaatacagtccttgggaaatgagttttgatggtgaattggggtgttaaggaagggaaagattgtcatagatggtagggctttgaaaatgcagggtatcagctgccactcctggcttcaacacattgagtcactgcctagacggttctcttggtcttattcccatcctggccaatgcttaaatactatttgttgaaaataattctttgagacagatttcagctacctcccttccaggttcgatttaacttggttgtaattgtcaatttgttgttataggtcttacctgtgtgaaagaaagaaaaagaaagaaagaaagaaagagaaaggaaattataaggtcaagttaacagttttgaggttttgtgtttttttctggaactacttcaagtgagaaaataaaaaaaaatggtgacaaagctgtacagatagagataatagaagacaaagagattaaaaggaaataaaaatgcatgattaaaaactaagaataaaaaacctatttttatgtttcctaaaggaaattgtttattctacagcctcagtaggtagacacaaacataaagatttccctagaagacatagagtgggatttgataacactgtctgttattttctgtacattgtggtaggtccaggaaatatgacattttcccccttgatgtgttattgttgttgttgggtggggtgggcattttgtttatttgtttggtggcaatcagtggtagtagggagtgggagggcttatattggtttttccagctattaaggggacatattgtgtcgttgtgcttttcacgttataaaatgtttatatttaccagtacagcactgggctttataaagactgcactcagaaccacactgcacagtccagttttttaaaaagctgctacatgacagacaggtaatcccactgagtgagttttgagaaacaaatcaaacgaagtaaacaagaaacataaaaaccaaatagcaaatgaataaaagcctgttcttgtaacttattcaacttttgccaaattcctaccaatcacttgctttttaaaagaaatgtataatagccaaaagagaaattatgtccctgttgtacagaagttagaatttttgactccaggcagcagtttgctcagtgatcttgaacaagttatccaattgcctctacatttgcatcagtttctctagctgcaaaatggggataatactatatacctacctcacagtgggagggcaggagattttgaggccctgaggttttaggtgggctgtgagggccaacgcttgacacaaagtccatgggttattattcaagaatgcacaggcccatcggccttttagaaagacaagacagggagtgcttgtttgatatttcaaggaataaagccggagctcctgaattgtagtccaccttaaaagagagacctgtattggagaatattttatttttttggcaaatttgatcttaccctttaccagttctataatttggttaaaagctgattatgtcctacaatgtcaaagtcagctaactgtcgtctacttaagacttctggtcatttccaacttatagaggaagggagtctctaaaatctcttcttcagaaggcacctcacttctcagacttaaaattccacatcaagtgttccattaaaagaagataaggcattctgagtgcaaacaaatgggggcttcttaaactacacaccagcagtcagtgaggaaaactttgaacaattattgagttgctttcttgggtctctataatcaataacctgtctgcagatatctatctatataaagatattatatataaatataaatttacatatatatgcacatgtatatatagttgtacatatatgtgtgtatatatatacttaaatgtaatatttacaaaataaaactgtgatctcgtctagagaaaatgtattcatattacaaactgctcttccatatttatgtaccatattatacctttttattattgttataattattatgggtatttctaattaatatgatgttgaaacctgtttggcaccttctggaagctaccaaaaaaatgacactccattgaagtgcttaaaagctgttctcataagaattcttctggcctattgtaaaaaagaaaaaaaaaaagaaaaagaagaaagacacaaagaaaataatctaaacaccaaaaactaaacacaattccaatcctttttctgtacctcacgcgcataaatttgctgctcctatttttttttctgtttatgtgtttttatggatctaagttaaatcttttggcaatatataaaaatgtaaatagtaaactttatttattaagaatgtcatcttttttaatttatatttacacaattgttcatctaatttattttttctatacagttttaaatactcagacatattttgctgttcatgatatttttatcctgttctcatggatttgttttcccatactgttttctctgatctcaattacaggttggatctcacaaataataatgtcagagacagaaatattttgccactgttgattactatactttaaagttctatattatgaaaatatataatagcttgtacgcttcag

SEQ ID NO: 6329 - protein, 66 aa, Homo sapiens; identical to SEQ ID NO: 6327

SEQ ID NO: 6330 - DNA, 435 bp, Homo sapiens
acacagagaggtcactattcttattcccatcacacagatgaaccagtctgggcttagagtacatatgggacttgcccaagttcacttggcaaatgagtggggaagcccaagtttgaacccagttctatctgactcaaaagttctgctttttctcctgcatggtgctgagtttcagaagaagaaagcatgcagggtgcctgtgtccttggcacaccttggcatgaccctccctgttctggttggaaacatttcaccatgagcccagaccagagaggagtttcccgtgggcatccacagaacagaagaaagttctggtttttgtttccatcttccaccgcaggaagcctctcagagaaggagagaggttactttcctttcatgcctctgcccttacctgctggacctgtttaggtcccacttgtcccctcagcccca

SEQ ID NO: 6331 - protein, 74 aa, Homo sapiens
MQGACVLGTPWHDPPCSGWKHFTMSPDQRGVSRGHPQNRRKFWFLFPSSTAGSLSEKERGYFPFMPLPLPAGPV

SEQ ID NO: 6332 - DNA, 2729 bp, Homo sapiens
aggtcaccccattccctatgtcctgtgatctacaaggtgactgtgcttgtcgggacccccaggcccaagaacacagccggaaagacctccggggatacagccatggctaaggaaggacaagaagttgtcaaagaattcccaacgccaggacccacatccctttggtattgatttcacagtcagctgctcaacggaatggcctctccacaccagggatccttagcacccaaccggtctgcctttaattttacccaggaaggactcacattggggcgaatgaaccaagtttcgccatgctggatgatgaaatggattcccatcccaaagtctgagatggattgcatatacagtgtgcagtcccagagcctcctaaaattctagccatttgtcacacaaccacagcaagaaacgtgttctatataattctgggagaaagaatcttttataagaacagtacagattgttctcaagagggccatcagaaggaagccaaagagttcacagcctcagcaccaacaactcaacatggtcatcatgttttctatatggtttttccagctagcagtactcccttccatacctgtgactgggcagtgcttttctctctcccatgtctagcctccaaaagttaagtgaaaattagtcaactgcacgtggaagcccccaccactttggggatctctttatttcttttcagccagggacctgtccactccctttgaattaatatgggaagaaattaatacaggatgaactggagagaagggttgagtgtggcatactttctgaaacctggagctgggaattgcggagaagggaaggtctagactagttacatcacatagggattactgtaaatcaagtcatctcaagtctagtgaagacagccaacagaaacaaaacctagcatagggatagaaaataccatgcacgtgtgcagccccacctaattcctgcatccaaggcaggtgttgttaatctatcatagcacttaaaaaaaaaaaaaaaaagagaccaaaaataactttaggaaccaccatattatatcactcccaatagcactgacctggtgatcaaaaacacttgagaagacatctattggccatctctggccaattacactaagaaacatatcaaggtgcttttggcacaggtgcccacaaatacggatgcagtgctgagatagtttatgagacttgtaccatttcacaaactctgaaattgggttccatattggcaaggctgccacagttgttaagaataatcctctatgtttcttcctcacaaaaccatatctcatttatatccagaccattacttcactataattacaaggacaaattattagcaagaaataagaatagtattagaagaattgatcctattttgaacccctctccagtatcttcacactcttgtcaactctccaggcctctctcttgccctgagttatcagcctgtgtggtgttaactaccttagaaggtacaagctaagaaatgtaacagtatcaaccctcccagttgcttaattatacccataggtaatacaaaaagctctgaagacccaaagatgacattactaatgatgtgatttcaggagccacagaagaaccttaccagcttccctcaaatcagtccttatcctctttctatcttcactcccatcatcatctattttcacactatccagctaagcaaagattcctggaggctgacttgtatcttcagactcacagagtgaattcagctcttctgaatcaagacccacccagtctctttcattcagacctgttgctaacaaatttatatttgccaaggatattaggcaaaagaggctacttgattggtggccaacctcgtgcccacatggaaggtatctttaatagggtcttttcaaaccttagtggaggagggtcagctcaatttgggcaatgcatttgttcccagtttcattttcttcctgggaattaactcgtcatttcattccttcagtcatcttctgtgtaggtgaccggagcactgagaggcagctctgatgcactattgtgtgtcagcagctcaaaggccctaaaacactgaaggttctgcatctgaagtattagattgttagcagcaaaatatgaaagatgaggtggacagtcctctaagccctatttagggaagcttttccaagccacaatcttaactacctacccaaaggatttgcattacccccagattctgtgccaacaaccttttaaggaaatacagtccttgggaaatgagttttgatggtgaattggggtgttaaggaagggaaagattgtcatagatggtagggctttgaaaatgcagggtatcagctgccactcctggcttcaacacattgagtcactgcctagacggttctcttggtcttattcccatcctggccaatgcttaaatactatttgttgaaaataattctttgagacagatttcagctacctcccttccaggttcgatttaacttggttgtaattgtcaatttgttgttataggtcttacctgtgtgaaagaaagaaaaagaaagaaagaaagaaagagaaaggaaattataaggtcaagttaacagttttgaggttttgtgtttttttctggaactacttcaagtgagaaaataaaaaaaaatggtgacaaagctgtacagatagagataatagaagacaaagagattaaaaggaaataaaaatgcatgattaaaaactaag

SEQ ID NO: 6333 - protein, 61 aa, Homo sapiens
MASPHQGSLAPNRSAFNFTQEGLTLGRMNQVSPCWMMKWIPIPKSEMDCIYSVQSQSLLKF

SEQ ID NO: 6334 - DNA, 4836 bp, Homo sapiens
aggtcaccccattccctatgtcctgtgatctacaaggtgactgtgcttgtcgggacccccaggcccaagaacacagccggaaagacctccggggatacagccatggctaaggaaggacaagaagttgtcaaagaattcccaacgccaggacccacatccctttggtattgatttcacagtcagctgctcaacggaatggcctctccacaccagggatccttagcacccaaccggtctgcctttaattttacccaggaaggactcacattggggcgaatgaaccaagtttcgccatgctggatgatgaaatggattcccatcccaaagtctgagatggattgcatatacagtgtgcagtcccagagcctcctaaaattctagccatttgtcacacaaccacagcaagaaacgtgttctatataattctgggagaaagaatcttttataagaacagtacagattgttctcaagagggccatcagaaggaagccaaagagttcacagcctcagcaccaacaactcaacatggtcatcatgttttctatatggtttttccagctagcagtactcccttccatacctgtgactgggcagtgcttttctctctcccatgtctagcctccaaaagttaagtgaaaattagtcaactgcacgtggaagcccccaccactttggggatctctttatttcttttcagccagggacctgtccactccctttgaattaatatgggaagaaattaatacaggatgaactggagagaagggttgagtgtggcatactttctgaaacctggagctgggaattgcggagaagggaaggtctagactagttacatcacatagggattactgtaaatcaagtcatctcaagtctagtgaagacagccaacagaaacaaaacctagcatagggatagaaaataccatgcacgtgtgcagccccacctaattcctgcatccaaggcaggtgttgttaatctatcatagcacttaaaaaaaaaaaaaaaaagagaccaaaaataactttaggaaccaccatattatatcactcccaatagcactgacctggtgatcaaaaacacttgagaagacatctattggccatctctggccaattacactaagaaacatatcaaggtgcttttggcacaggtgcccacaaatacggatgcagtgctgagatagtttatgagacttgtaccatttcacaaactctgaaattgggttccatattggcaaggctgccacagttgttaagaataatcctctatgtttcttcctcacaaaaccatatctcatttatatccagaccattacttcactataattacaaggacaaattattagcaagaaataagaatagtattagaagaattgatcctattttgaacccctctccagtatcttcacactcttgtcaactctccaggcctctctcttgccctgagttatcagcctgtgtggtgttaactaccttagaaggtacaagctaagaaatgtaacagtatcaaccctcccagttgcttaattatacccataggtaatacaaaaagctctgaagacccaaagatgacattactaatgatgtgatttcaggagccacagaagaaccttaccagcttccctcaaatcagtccttatcctctttctatcttcactcccatcatcatctattttcacactatccagctaagcaaagattcctggaggctgacttgtatcttcagactcacagagtgaattcagctcttctgaatcaagacccacccagtctctttcattcagacctgttgctaacaaatttatatttgccaaggatattaggcaaaagaggctacttgattggtggccaacctcgtgcccacatggaaggtatctttaatagggtcttttcaaaccttagtggaggagggtcagctcaatttgggcaatgcatttgttcccagtttcattttcttcctgggaattaactcgtcatttcattccttcagtcatcttctgtgtaggtgaccggagcactgagaggcagctctgatgcactattgtgtgtcagcagctcaaaggccctaaaacactgaaggttctgcatctgaagtattagattgttagcagcaaaatatgaaagatgaggtggacagtcctctaagccctatttagggaagcttttccaagccacaatcttaactacctacccaaaggatttgcattacccccagattctgtgccaacaaccttttaaggaaatacagtccttgggaaatgagttttgatggtgaattggggtgttaaggaagggaaagattgtcatagatggtagggctttgaaaatgcagggtatcagctgccactcctggcttcaacacattgagtcactgcctagacggttctcttggtcttattcccatcctggccaatgcttaaatactatttgttgaaaataattctttgagacagatttcagctacctcccttccaggttcgatttaacttggttgtaattgtcaatttgttgttataggtcttacctgtgtgaaagaaagaaaaagaaagaaagaaagaaagagaaaggaaattataaggtcaagttaacagttttgaggttttgtgtttttttctggaactacttcaagtgagaaaataaaaaaaaatggtgacaaagctgtacagatagagataatagaagacaaagagattaaaaggaaataaaaatgcatgattaaaaactaagaataaaaaacctatttttatgtttcctaaaggaaattgtttattctacagcctcagtaggtagacacaaacataaagatttccctagaagacatagagtgggatttgataacactgtctgttattttctgtacattgtggtaggtccaggaaatatgacattttcccccttgatgtgttattgttgttgttgggtggggtgggcattttgtttatttgtttggtggcaatcagtggtagtagggagtgggagggcttatattggtttttccagctattaaggggacatattgtgtcgttgtgcttttcacgttataaaatgtttatatttaccagtacagcactgggctttataaagactgcactcagaaccacactgcacagtccagttttttaaaaagctgctacatgacagacaggtaatcccactgagtgagttttgagaaacaaatcaaacgaagtaaacaagaaacataaaaaccaaatagcaaatgaataaaagcctgttcttgtaacttattcaacttttgccaaattcctaccaatcacttgctttttaaaagaaatgtataatagccaaaagagaaattatgtccctgttgtacagaagttagaatttttgactccaggcagcagtttgctcagtgatcttgaacaagttatccaattgcctctacatttgcatcagtttctctagctgcaaaatggggataatactatatacctacctcacagtgggagggcaggagattttgaggccctgaggttttaggtgggctgtgagggccaacgcttgacacaaagtccatgggttattattcaagaatgcacaggcccatcggccttttagaaagacaagacagggagtgcttgtttgatatttcaaggaataaagccggagctcctgaattgtagtccaccttaaaagagagacctgtattggagaatattttatttttttggcaaatttgatcttaccctttaccagttctataatttggttaaaagctgattatgtcctacaatgtcaaagtcagctaactgtcgtctacttaagacttctggtcatttccaacttatagaggaagggagtctctaaaatctcttcttcagaaggcacctcacttctcagacttaaaattccacatcaagtgttccattaaaagaagataaggcattctgagtgcaaacaaatgggggcttcttaaactacacaccagcagtcagtgaggaaaactttgaacaattattgagttgctttcttgggtctctataatcaataacctgtctgcagatatctatctatataaagatattatatataaatataaatttacatatatatgcacatgtatatatagttgtacatatatgtgtgtatatatatacttaaatgtaatatttacaaaataaaactgtgatctcgtctagagaaaatgtattcatattacaaactgctcttccatatttatgtaccatattatacctttttattattgttataattattatgggtatttctaattaatatgatgttgaaacctgtttggcaccttctggaagctaccaaaaaaatgacactccattgaagtgcttaaaagctgttctcataagaattcttctggcctattgtaaaaaagaaaaaaaaaaagaaaaagaagaaagacacaaagaaaataatctaaacaccaaaaactaaacacaattccaatcctttttctgtacctcacgcgcataaatttgctgctcctatttttttttctgtttatgtgtttttatggatctaagttaaatcttttggcaatatataaaaatgtaaatagtaaactttatttattaagaatgtcatcttttttaatttatatttacacaattgttcatctaatttattttttctatacagttttaaatactcagacatattttgctgttcatgatatttttatcctgttctcatggatttgttttcccatactgttttctctgatctcaattacaggttggatctcacaaataataatgtcagagacagaaatattttgccactgttgattactatactttaaagttctatattatgaaaatatataatagcttgtacgcttcag

SEQ ID NO: 6335 - protein, 94 aa, Homo sapiens
MCFYGSKLNLLAIYKNVNSKLYLLRMSSFLIYIYTIVHLIYFFYTVLNTQTYFAVHDIFILFSWICFPILFSLISITGWISQIIMSETEIFCHC

SEQ ID NO: 6336 - DNA, 2436 bp, Homo sapiens
gcattacccccagattctgtgccaacaaccttttaaggaaatacagtccttgggaaatgagttttgatggtgaattggggtgttaaggaagggaaagattgtcatagatggtagggctttgaaaatgcagggtatcagctgccactcctggcttcaacacattgagtcactgcctagacggttctcttggtcttattcccatcctggccaatgcttaaatactatttgttgaaaataattctttgagacagatttcagctacctcccttccaggttcgatttaacttggttgtaattgtcaatttgttgttataggtcttacctgtgtgaaagaaagaaaaagaaagaaagaaagaaagagaaaggaaattataaggtcaagttaacagttttgaggttttgtgtttttttctggaactacttcaagtgagaaaataaaaaaaaatggtgacaaagctgtacagatagagataatagaagacaaagagattaaaaggaaataaaaatgcatgattaaaaactaagaataaaaaacctatttttatgtttcctaaaggaaattgtttattctacagcctcagtaggtagacacaaacataaagatttccctagaagacatagagtgggatttgataacactgtctgttattttctgtacattgtggtaggtccaggaaatatgacattttcccccttgatgtgttattgttgttgttgggtggggtgggcattttgtttatttgtttggtggcaatcagtggtagtagggagtgggagggcttatattggtttttccagctattaaggggacatattgtgtcgttgtgcttttcacgttataaaatgtttatatttaccagtacagcactgggctttataaagactgcactcagaaccacactgcacagtccagttttttaaaaagctgctacatgacagacaggtaatcccactgagtgagttttgagaaacaaatcaaacgaagtaaacaagaaacataaaaaccaaatagcaaatgaataaaagcctgttcttgtaacttattcaacttttgccaaattcctaccaatcacttgctttttaaaagaaatgtataatagccaaaagagaaattatgtccctgttgtacagaagttagaatttttgactccaggcagcatgggagggcaggagattttgaggccctgaggttttaggtgggctgtgagggccaacgcttgacacaaagtccatgggttattattcaagaatgcacaggcccatcggccttttagaaagacaagacagggagtgcttgtttgatatttcaaggaataaagccggagctcctgaattgtagtccaccttaaaagagagacctgtattggagaatattttatttttttggcaaatttgatcttaccctttaccagttctataatttggttaaaagctgattatgtcctacaatgtcaaagtcagctaactgtcgtctacttaagacttctggtcatttccaacttatagaggaagggagtctctaaaatctcttcttcagaaggcacctcacttctcagacttaaaattccacatcaagtgttccattaaaagaagataaggcattctgagtgcaaacaaatgggggcttcttaaactacacaccagcagtcagtgaggaaaactttgaacaattattgagttgctttcttgggtctctataatcaataacctgtctgcagtaaatgtaatatttacaaaataaaactgtgatctcgtctagagaaaatgtattcatattacaaactgctcttccatatttatgtaccatattatacctttttattattgttataattattatgggtatttctaattaatatgatgttgaaacctgtttggcaccttctggaagctaccaaaaaaatgacactccattgaagtgcttaaaagctgttctcataagaattcttctggcctattgtaaaaaagaaaaaaaaaaagaaaaagaagaaagacacaaagaaaataatctaaacaccaaaaactaaacacaattccaatcctttttctgtacctcacgcgcataaatttgctgctcctatttttttttctgtttatgtgtttttatggatctaagttaaatcttttggcaatatataaaaatgtaaatagtaaactttatttattaagaatgtcatcttttttaatttatatttacacaattgttcatctaatttattttttctatacagttttaaatactcagacatattttgctgttcatgatatttttatcctgttctcatggatttgttttcccatactgttttctctgatctcaattacaggttggatctcacaaataataatgtcagagacagaaatattttgccactgttgattactatactttaaagttctatattatgaaaatatataatagcttgtacgcttcag

SEQ ID NO: 6337 - protein, 32 aa, Homo sapiens
MYNSQKRNYVPVVQKLEFLTPGSMGGQEILRP

SEQ ID NO: 6338 - DNA, 578 bp, Homo sapiens
atcaggtgcttgctttgtgccaagtaattttctaagagtttgacgtgtactgacttaaccctcactataactttatgaggaaggcccacctgattctacggcgactggagagggtgagtagccactgctccagcctcctgcggagtgcctacatccagagccgcgtggaaacagtgccctatcttttctgccgcagcgaggaggtccggcctgcaggcatggtgtggtatagcatcctcaaggacaccaaaatcacgtgtgaggagaagatggtgtcaatggcccgaaacacgtagagacctctggtctagtcttgctcctgaagtagagctgctatgtgaccttgagcaagccgttcaccctctgtgggccctgggttatccatgtgcccccaccacactaggggagatctatgtgtcatggatgtgaaacattatatcagatgatgactcaggtacaaagagcacttttaatctctcttttatcttcactacctccctttgagattgacaacagcaggataactgtctctggccagtctagagagggtcacagcctcagccaggttgcagcagagc

SEQ ID NO: 6339 - protein, 73 aa, Homo sapiens
MRKAHLILRRLERVSSHCSSLLRSAYIQSRVETVPYLFCRSEEVRPAGMVWYSILKDTKITCEEKMVSMARNT

SEQ ID NO: 6340 - DNA, 2814 bp, Homo sapiens
attacctcatacctcccgagatgctgcaaccgcaaatctcttcagagcccctcgctcccctcccccagctgcatctcctcggatctcctcagccccacgaatccctcccgagcctgcccctcgcagccccacccccaccctagtcctgccccccccagatccggtccccacaccctgccattcgggcgcggccgctgcacgccggcacgttcccccgcctggccgctgagccacggcccacgactccggccgcggtccccagtccccaaccctccttcccgccccctacctgaccgcccgcggctccgacgagtccaccgccggcagcccacccgcctgcctccctctgcgcacgcgccgttgagcaccccttgccgggcgccaattcgcagagctccctgtccgtcactgagccccgcctccccagcatgctggggcttgtcgtgcagctggccccaagcgcgcggggcaaggcggccctgcaggggtgagctttcctctgagaacccggggccttagcgacacgtaatccagttttccgtctccttggtgcagatgaagaaaccgacgcccatgggcgaaagggacctgctcaagttcactcagtaagtcaggagataagccagaatgcgtatctgactccagtctcaatgtctaccccttcacaaaacggtagcctccagggtagtcctcagcaaagcgttggcaccttactgaatctgtttttccatctgagaaatgggccaacggaaaaatcaaacttccattctggggaagtcgagaaccgggactccctaggaagggcagtgctttggcctcatgttctgtgctctgacagagagctgcactagagacaagtttatccatgaacacattgctctgtaaaggaatgttttgcctactcagctgggaggccgacagcagaggcagacttggggagtacactctgcagcccctgtccctgcagactgaagagaccacagagctgggcagcaagaaggagctcaagtccatgcccttcatcacctacctctcaggtttgctgacagcccagatgctgtcagatgaccagctcatttcaggtgtggagattcgctgtgaggagaaggggcgctgtccatctacctgtcacctttgccgccggccaggcaaggagcagctgagccccacaccagtgctgctggaaatcaaccgtgtggtgccactttataccctcatccaagacaatggcacaaaggaggccttcaagagtgcactgatgagttcctactggtgctcagggaaaggggatgtgatcgatgactggtgcaggtgtgacctcagcgcctttgatgccaatgggctccccaactgcagcccccttctgcagccggtgctgcggctgtccccaacagtggagccctccagtactgtggtctccttggagtgggtggatgttcagccagctattgggaccaaggtctccgactatattctgcagcataagaaagtggatgaatacacagacactgacctgtacacaggagaattcctgagttttgctgatgacttactctctggcctgggcacatcttgtgtagcagctggtcgaagccatggagaggtccctgaagtcagtatctactcagtcatcttcaagtgtctggagcccgacggtctctacaagttcactctgtatgctgtggatacacgagggaggcactcagagctaagcacggtgaccctgaggacggcctgtccactggtagatgacaacaaggcagaagaaatagctgacaagatctacaatctgtacaatgggtacacaagtggaaaggagcagcagatggcctacaacacactgatggaggtctcagcctcgatgctgttccgagtccagcaccactacaactctcactatgaaaagtttggcgacttcgtctggagaagtgaggatgagctggggcccaggaaggcccacctgattctacggcgactggagagggtgagtagccactgctccagcctcctgcggagtgcctacatccagagccgcgtggaaacagtgccctatcttttctgccgcagcgaggaggtccggcctgcaggcatggtgtggtatagcatcctcaaggacaccaaaatcacgtgtgaggagaagatggtgtcaatggcccgaaacacgtacggggagtccaagggccggtgagggagggtattgccctccgtgagcacagagactctccatgggagggggagcagtattctcctggatcctggggcctgggtgggctgggggacagctgaggatgggcctagcagatgaagcttgccagcaaggccaaagcaaacggtttctcctgtggatagtggacagagacctttgtaaccaatggaattattcatttttctctatcttttattttttcaaagatattatttgactctatcaaaagtctctcctttttaaaccttttcttatggatggctgtcaatcccgaggcagaagttttcaggtggagaccaagcggcctttgctcttcttccttcttcctgccacactctgctttcttcctgccatggacccctggaggagacctatggagggacagttttgacctgacccctagaggagacagttttgacctcttcagcaccaggaaggaagctctgaggatggttgcagtgaggaagcatgggtctttaaggacttctctctcttttttgctggacattattgagtttgtgggaccctgcctcttcctgctacctgtgggtctgcccagagtccctgcaggcctgtccatgcattaaaaattcctattgtctctcttt

SEQ ID NO: 6341 - protein, 440 aa, Homo sapiens
MNTLLCKGMFCLLSWEADSRGRLGEYTLQPLSLQTEETTELGSKKELKSMPFITYLSGLLTAQMLSDDQLISGVEIRCEEKGRCPSTCHLCRRPGKEQLSPTPVLLEINRVVPLYTLIQDNGTKEAFKSALMSSYWCSGKGDVIDDWCRCDLSAFDANGLPNCSPLLQPVLRLSPTVEPSSTVVSLEWVDVQPAIGTKVSDYILQHKKVDEYTDTDLYTGEFLSFADDLLSGLGTSCVAAGRSHGEVPEVSIYSVIFKCLEPDGLYKFTLYAVDTRGRHSELSTVTLRTACPLVDDNKAEEIADKIYNLYNGYTSGKEQQMAYNTLMEVSASMLFRVQHHYNSHYEKFGDFVWRSEDELGPRKAHLILRRLERVSSHCSSLLRSAYIQSRVETVPYLFCRSEEVRPAGMVWYSILKDTKITCEEKMVSMARNTYGESKGR

SEQ ID NO: 6342 - DNA, 2497 bp, Homo sapiens
attacctcatacctcccgagatgctgcaaccgcaaatctcttcagagcccctcgctcccctcccccagctgcatctcctcggatctcctcagccccacgaatccctcccgagcctgcccctcgcagccccacccccaccctagtcctgccccccccagatccggtccccacaccctgccattcgggcgcggccgctgcacgccggcacgttcccccgcctggccgctgagccacggcccacgactccggccgcggtccccagtccccaaccctccttcccgccccctacctgaccgcccgcggctccgacgagtccaccgccggcagcccacccgcctgcctccctctgcgcacgcgccgttgagcaccccttgccgggcgccaattcgcagagctccctgtccgtcactgagccccgcctccccagcatgctggggcttgtcgtgcagctggccccaagcgcgcggggcaaggcggccctgcaggggtgagctttcctctgagaacccggggccttagcgacacgtaatccagttttccgtctccttggtgcagatgaagaaaccgacgcccatgggcgaaagggacctgctcaagttcactcaagaccacagagctgggcagcaagaaggagctcaagtccatgcccttcatcacctacctctcaggtttgctgacagcccagatgctgtcagatgaccagctcatttcaggtgtggagattcgctgtgaggagaaggggcgctgtccatctacctgtcacctttgccgccggccaggcaaggagcagctgagccccacaccagtgctgctggaaatcaaccgtgtggtgccactttataccctcatccaagacaatggcacaaaggaggccttcaagagtgcactgatgagttcctactggtgctcagggaaaggggatgtgatcgatgactggtgcaggtgtgacctcagcgcctttgatgccaatgggctccccaactgcagcccccttctgcagccggtgctgcggctgtccccaacagtggagccctccagtactgtggtctccttggagtgggtggatgttcagccagctattgggaccaaggtctccgactatattctgcagcataagaaagtggatgaatacacagacactgacctgtacacaggtaggtacatgagcctgagctggggagctcatctttctttttctccctccaggagaattcctgagttttgctgatgacttactctctggcctgggcacatcttgtgtagcagctggtcgaagccatggagaggtccctgaagtcagtatctactcagtcatcttcaagtgtctggagcccgacggtctctacaagttcactctgtatgctgtggatacacgagggaggcactcagagctaagcacggtgaccctgaggacggcctgtccactggtagatgacaacaaggcagaagaaatagctgacaagatctacaatctgtacaatgggtacacaagtggaaaggagcagcagatggcctacaacacactgatggaggtctcagcctcgatgctgttccgagtccagcaccactacaactctcactatgaaaagtttggcgacttcgtctggagaagtgaggatgagctggggcccaggaaggcccacctgattctacggcgactggagagggtgagtagccactgctccagcctcctgcggagtgcctacatccagagccgcgtggaaacagtgccctatcttttctgccgcagcgaggaggtccggcctgcaggcatggtgtggtatagcatcctcaaggacaccaaaatcacgtgtgaggagaagatggtgtcaatggcccgaaacacgtacggggagtccaagggccggtgagggagggtattgccctccgtgagcacagagactctccatgggagggggagcagtattctcctggatcctggggcctgggtgggctgggggacagctgaggatgggcctagcagatgaagcttgccagcaaggccaaagcaaacggtttctcctgtggatagtggacagagacctttgtaaccaatggaattattcatttttctctatcttttattttttcaaagatattatttgactctatcaaaagtctctcctttttaaaccttttcttatggatggctgtcaatcccgaggcagaagttttcaggtggagaccaagcggcctttgctcttcttccttcttcctgccacactctgctttcttcctgccatggacccctggaggagacctatggagggacagttttgacctgacccctagaggagacagttttgacctcttcagcaccaggaaggaagctctgaggatggttgcagtgaggaagcatgggtctttaaggacttctctctcttttttgctggacattattgagtttgtgggaccctgcctcttcctgctacctgtgggtctgcccagagtccctgcaggcctgtccatgcattaaaaattcctattgtctctcttt

SEQ ID NO: 6343 - protein, 194 aa, Homo sapiens
MPFITYLSGLLTAQMLSDDQLISGVEIRCEEKGRCPSTCHLCRRPGKEQLSPTPVLLEINRVVPLYTLIQDNGTKEAFKSALMSSYWCSGKGDVIDDWCRCDLSAFDANGLPNCSPLLQPVLRLSPTVEPSSTVVSLEWVDVQPAIGTKVSDYILQHKKVDEYTDTDLYTGRYMSLSWGAHLSFSPSRRIPEFC

SEQ ID NO: 6344 - DNA, 3927 bp, Homo sapiens
agctcgggcgtcctggttcgcttcggcgtccgccgtctccgcagctgcctcctcttcctccttcgccaccgcgcgggagagcttccgttcatcccggctgcaaacccacaattccgtcattggcgtgcccatccgggagactcccatcctggatgactatgactgtgaggaggatgaggagccacctaggcgggccaaccatgtctcccgcgaggacgagtttggcagccaggtgacccacactctggacagtctgggacatccaggggaagagaaggtggactttgagaagaaagcagcagctgaggcgactcaggagacagtggagtccctgatgcagaagttcaaggagagtttccgcgctaacacgcccatcgagatcggtcagctgcaaccacccctgcgcagcacatcggcagggaagaggaagcggaggagcaagtctcgaggaggaatcagctttgggagagccaaggggacgtcgggctcagaggcagacgatgaaactcagctgacattctacacggagcagtaccgcagtcgccgccgcagcaaaggtttgctgaaaagcccagtgaacaagacagccctgacactgattgctgtgagttcctgcatcctggccatggtgtgtggcagccagatgtcttgtccactcactgtgaaggtgactctgcatgtgcccgagcacttcatagcagatggaagcagcttcgtggtgagtgaagggagctacctggacatctccgactggttaaacccggccaagctttccctgtattaccagatcaatgccacctccccatgggtgagggacctctgtggacaaaggacgacagatgcctgtgagcagctctgcgacccagaaaccggagagtgcagctgtcatgaaggctatgcccctgaccctgttcacagacacctgtgtgtgcgcagtgactggggacagagtgaaggaccttggccctacacgacacttgagaggggctatgatctggtgacaggggagcaagcccctgaaaagattctcaggtctactttcagcttgggccaaggcctctggcttcctgtcagcaaaagctttgtggttccgcctgtggagctgtccatcaaccccctggccagctgcaagaccgatgtgctcgtcacggaagaccctgcagatgtcagggaagaagcgatgctgtccacatactttgaaaccatcaatgacctgctgtcttccttcgggccagttcgtgactgctctcggaacaatgggggctgcactcgcaacttcaagtgtgtgtctgaccggcaggtggattcctcgggatgtgtgtgccctgaggagctgaaacccatgaaggatggctctggctgctacgaccactccaaaggcattgactgctctgatggctttaatggcggctgtgagcagctgtgcctgcagcagacgctgcccctgccctacgatgccacttcgagcaccatcttcatgttctgcggttgcgtggaggagtacaaactggctcctgatggaaaatcctgcttaatgctctcagatgtctgcgagggccccaagtgcctcaaacctgactccaaattcaatgataccctctttggagagatgctacatggttacaacaaccggacccagcatgtgaaccaaggccaagtcttccagatgacctttagggagaacaacttcatcaaggactttccccagctggccgatgggctgttggtgatcccgctgccggtggaggagcagtgccggggggtcctctccgagccccttccagacctccaactgctcactggagatatcaggtatgatgaggccatgggttaccccatggtgcagcagtggcgggtccggagcaacctctaccgtgtgaagctcagcaccatcaccctcgcagcaggcttcactaatgttctcaagatcctgaccaaggagagcagtcgggaggagctgctgtccttcatccagcactatggctcccactacatcgcagaggccctctatggctcagagctcacctgcatcatccactttcccagcaagaaggtccagcagcagctgtggctccagtatcagaaagagaccacagagctgggcagcaagaaggagctcaagtccatgcccttcatcacctacctctcaggtttgctgacagcccagatgctgtcagatgaccagctcatttcaggtgtggagattcgctgtgaggagaaggggcgctgtccatctacctgtcacctttgccgccggccaggcaaggagcagctgagccccacaccagtgctgctggaaatcaaccgtgtggtgccactttataccctcatccaagacaatggcacaaaggaggccttcaagagtgcactgatgagttcctactggtgctcagggaaaggggatgtgatcgatgactggtgcaggtgtgacctcagcgcctttgatgccaatgggctccccaactgcagcccccttctgcagccggtgctgcggctgtccccaacagtggagccctccagtactgtggtctccttggagtgggtggatgttcagccagctattgggaccaaggtctccgactatattctgcagcataagaaagtggatgaatacacagacactgacctgtacacaggagaattcctgagttttgctgatgacttactctctggcctgggcacatcttgtgtagcagctggtcgaagccatggagaggtccctgaagtcagtatctactcagtcatcttcaagtgtctggagcccgacggtctctacaagttcactctgtatgctgtggatacacgagggaggcactcagagctaagcacggtgaccctgaggacggcctgtccactggtagatgacaacaaggcagaagaaatagctgacaagatctacaatctgtacaatgggtacacaagtggaaaggagcagcagatggcctacaacacactgatggaggtctcagcctcgatgctgttccgagtccagcaccactacaactctcactatgaaaagtttggcgacttcgtctggagaagtgaggatgagctggggcccaggaaggcccacctgattctacggcgactggagagggtgagtagccactgctccagcctcctgcggagtgcctacatccagagccgcgtggaaacagtgccctatcttttctgccgcagcgaggaggtccggcctgcaggcatggtgtggtatagcatcctcaaggacaccaaaatcacgtgtgaggagaagatggtgtcaatggcccgaaacacgtacggggagtccaagggccggtgagggagggtattgccctccgtgagcacagagactctccatgggagggggagcagtattctcctggatcctggggcctgggtgggctgggggacagctgaggatgggcctagcagatgaagcttgccagcaaggccaaagcaaacggtttctcctgtggatagtggacagagacctttgtaaccaatggaattattcatttttctctatcttttattttttcaaagatattatttgactctatcaaaagtctctcctttttaaaccttttcttatggatggctgtcaatcccgaggcagaagttttcaggtggagaccaagcggcctttgctcttcttccttcttcctgccacactctgctttcttcctgccatggacccctggaggagacctatggagggacagttttgacctgacccctagaggagacagttttgacctcttcagcaccaggaaggaagctctgaggatggttgcagtgaggaagcatgggtctttaaggacttctctctcttttttgctggacattattgagtttgtgggaccctgcctcttcctgctacctgtgggtctgcccagagtccctgcaggcctgtccatgcattaaaaattcctattgtctctcttt

SEQ ID NO: 6345 - protein, 988 aa, Homo sapiens
MQKFKESFRANTPIEIGQLQPPLRSTSAGKRKRRSKSRGGISFGRAKGTSGSEADDETQLTFYTEQYRSRRRSKGLLKSPVNKTALTLIAVSSCILAMVCGSQMSCPLTVKVTLHVPEHFIADGSSFVVSEGSYLDISDWLNPAKLSLYYQINATSPWVRDLCGQRTTDACEQLCDPETGECSCHEGYAPDPVHRHLCVRSDWGQSEGPWPYTTLERGYDLVTGEQAPEKILRSTFSLGQGLWLPVSKSFVVPPVELSINPLASCKTDVLVTEDPADVREEAMLSTYFETINDLLSSFGPVRDCSRNNGGCTRNFKCVSDRQVDSSGCVCPEELKPMKDGSGCYDHSKGIDCSDGFNGGCEQLCLQQTLPLPYDATSSTIFMFCGCVEEYKLAPDGKSCLMLSDVCEGPKCLKPDSKFNDTLFGEMLHGYNNRTQHVNQGQVFQMTFRENNFIKDFPQLADGLLVIPLPVEEQCRGVLSEPLPDLQLLTGDIRYDEAMGYPMVQQWRVRSNLYRVKLSTITLAAGFTNVLKILTKESSREELLSFIQHYGSHYIAEALYGSELTCIIHFPSKKVQQQLWLQYQKETTELGSKKELKSMPFITYLSGLLTAQMLSDDQLISGVEIRCEEKGRCPSTCHLCRRPGKEQLSPTPVLLEINRVVPLYTLIQDNGTKEAFKSALMSSYWCSGKGDVIDDWCRCDLSAFDANGLPNCSPLLQPVLRLSPTVEPSSTVVSLEWVDVQPAIGTKVSDYILQHKKVDEYTDTDLYTGEFLSFADDLLSGLGTSCVAAGRSHGEVPEVSIYSVIFKCLEPDGLYKFTLYAVDTRGRHSELSTVTLRTACPLVDDNKAEEIADKIYNLYNGYTSGKEQQMAYNTLMEVSASMLFRVQHHYNSHYEKFGDFVWRSEDELGPRKAHLILRRLERVSSHCSSLLRSAYIQSRVETVPYLFCRSEEVRPAGMVWYSILKDTKITCEEKMVSMARNTYGESKGR

SEQ ID NO: 6346 - DNA, 2195 bp, Homo sapiens
attacctcatacctcccgagatgctgcaaccgcaaatctcttcagagcccctcgctcccctcccccagctgcatctcctcggatctcctcagccccacgaatccctcccgagcctgcccctcgcagccccacccccaccctagtcctgccccccccagatccggtccccacaccctgccattcgggcgcggccgctgcacgccggcacgttcccccgcctggccgctgagccacggcccacgactccggccgcggtccccagtccccaaccctccttcccgccccctacctgaccgcccgcggctccgacgagtccaccgccggcagcccacccgcctgcctccctctgcgcacgcgccgttgagcaccccttgccgggcgccaattcgcagagctccctgtccgtcactgagccccgcctccccagcatgctggggcttgtcgtgcagctggccccaagcgcgcggggcaaggcggccctgcaggggtgagctttcctctgagaacccggggccttagcgacacgtaatccagttttccgtctccttggtgcagatgaagaaaccgacgcccatgggcgaaagggacctgctcaagttcactcaagaccacagagctgggcagcaagaaggagctcaagtccatgcccttcatcacctacctctcaggtttgctgacagcccagatgctgtcagatgaccagctcatttcaggtgtggagattcgctgtgaggagaaggggcgctgtccatctacctgtcacctttgccgccggccaggcaaggagcagctgagccccacaccagtgctgctggaaatcaaccgtgtggtgccactttataccctcatccaagacaatggcacaaaggaggccttcaagagtgcactgatgagttcctactggtgctcagggaaaggggatgtgatcgatgactggtgcaggtgtgacctcagcgcctttgatgccaatgggctccccaactgcagcccccttctgcagccggtgctgcggctgtccccaacagtggagccctccagtactgtggtctccttggagtgggtggatgttcagccagctattgggaccaaggtctccgactatattctgcagcataagaaagtggatgaatacacagacactgacctgtacacaggagaattcctgagttttgctgatgacttactctctggcctgggcacatcttgtgtagcagctggtcgaagccatggagaggtccctgaagtcagtatctactcagtcatcttcaagtgtctggagcccgacggtctctacaagttcactctgtatgctgtggatacacgagggaggcactcagagctaagcacggtgaccctgaggacggcctgtccactggtagatgacaacaaggcagaagaaatagctgacaagatctacaatctgtacaatgggtacacaagtggaaaggagcagcagatggcctacaacacactgatggaggtctcagcctcgatgctgttccgagtccagcaccactacaactctcactatgaaaagtttggcgacttcgtctggagaagtgaggatgagctggggcccaggaaggcccacctgattctacggcgactggagagggtgagtagccactgctccagcctcctgcggagtgcctacatccagagccgcgtggaaacagtgccctatcttttctgccgcagcgaggaggtccggcctgcaggcatggtgtggtatagcatcctcaaggacaccaaaatcacgtgtgaggagaagatggtgtcaatggcccgaaacacatattatttgactctatcaaaagtctctcctttttaaaccttttcttatggatggctgtcaatcccgaggcagaagttttcaggtggagaccaagcggcctttgctcttcttccttcttcctgccacactctgctttcttcctgccatggacccctggaggagacctatggagggacagttttgacctgacccctagaggagacagttttgacctcttcagcaccaggaaggaagctctgaggatggttgcagtgaggaagcatgggtctttaaggacttctctctcttttttgctggacattattgagtttgtgggaccctgcctcttcctgctacctgtgggtctgcccagagtccctgcaggcctgtccatgcattaaaaattcctattgtctctctt

SEQ ID NO: 6347 - protein, 395 aa, Homo sapiens; identical to SEQ ID NO: 865

SEQ ID NO: 6348 - DNA, 568 bp, Homo sapiens
agatatgaactagtttaagccttgggtatctttataactcagtgacaagagacaggcagacagaaatattaacattctctaattcgggggcagagcactgggttgaggaacactacgtatgctgttctgggaatataaaagatggacaccagtcatcagtttggagactcagagtagtctctcaagaggacgccacacctgagctagttcttcaataatgaaacagcattttcagggctgttgttaggttgaaatgaaatgatggctacaagcaaccaacacaagactttgtacgtaacaggcactgaaccaatgtttgcatttagaaaacaaagaagaattcagaaagtaaagccatggagagaagggttggaggtgctcgaaggctggggaggagaaggaagagtcggagtgagagagaccaaaggcaaaaatgctggctaataaattgtaggcaatggagatccataaatcaaaaggtcaggcatgcttcaagctttccctggaggggaaatcataggtcagtgaccacttttgtcaaataccggaaatgaaatcttcctcattg

SEQ ID NO: 6349 - protein, 65 aa, Homo sapiens
MERRVGGARRLGRRRKSRSERDQRQKCWLINCRQWRSINQKVRHASSFPWRGNHRSVTTFVKYRK

SEQ ID NO: 6350 - DNA, 525 bp, Homo sapiens
actttggagttcagccctttcatgttacaaacaaggtccagaatggggatggcttgtgtccaaggtcacacaacaagattcttccttgagctccagatctggattagctgctccagctttctgcatctggaaccttgtcactccaagtatgcttttggggccaacaacattaacatcactatgagagcttgttacattggattttttggaatgttagaagacctcagagttcatggaattcagtaaatgcagaatctcagacctaacccagactactgagtcaatttggaatgtaacaagtcctcaggtgattctcaggcacgttaaagtttgagaagcactgctctaaaacgcttgtccattcacatgccaaatgccaccgcaattgctggctgaccagtcttttccgcactagatgctgaaccttgtaaaggcaggatctctgccatcttcactctgtatttttagcccccagcacacggcctgacacatagttagcacattaaatgaatcaatgaatcaatc

SEQ ID NO: 6351 - protein, 74 aa, Homo sapiens [sequence omitted]

SEQ ID NO: 6352 - DNA, 1756 bp, Homo sapiens
attgtgagcagcaaaacctgtgcgactgcatctgacatcgccaggatgggggcccaaccaagatccccagagacgtgaagatgcatggaataacacgtgaagagaggaaacttcgggcctgtggtcaaaatgtgttcaccacggcagacaactgcttgggtgacagctttggcctctggatgaattctccttggcgagcaatcgtcccacctgtaggtgccttcatgatcgtctgtgtgcagggcaccaagcaggccatctaaagccactaatctcaaagagagcttacccagggacaggactttccaaaaggaaaggagcacaatagaagagaatggctgctgctaagttccatccaacagtggcctcttttgaaaagtcgtcctcatccacagatggtcaacattatgatggaattttgttttcctctcatgtgaatttggagctgatagatgcttctcagctccttgctgggacctcactgacaaacccgctggccccagaactacttgtgacatcaggatgacgcttggtacaagccaggcactgagctgggcattgaggatgaagagatgaaacacaattctagcatctaaatagaccttggttggaagttgagttccagagtgggatatcagactcaaggcccagacttcacttctggtctcctgacttccaagtgaacagtgttgcagcttccctgactgcagttataggagaagacagggaggagataaagatgagagtgcctcgggaagagcagggatggaggagacaacctgagtcttctgatccaaaggagtgtgaagatggagtgacattgagagaactgcagaagaaagggacttggcatttatggagcatacacctgtaccatcatatcaaaatgcaacacagctattgcctcttggaacattataatagaatggggaaatcaagtatataaagagtcatgtgaaattggcaagacaagcatcaatttacagaggaggaaactgaggtccagagagatcaattaaactgtctaaagtcacatggcctgacataaaagtagtggagagtcaaactcagggctatgtacctgcggtggtggacttcatctttccaatcctacttccttatctgtgaagtgggcaaaccaatcatttttaccccagagagctgtgaagaacctgtatcagttatacagaaagttaaagaacttatcgcagtgcctggaagccaggatgtggagccaggagagaaggggcattcaaagggcctgggagacccttggtgaaaacaatcagttggtttcaacatcccagagagattctcaatcaggtagctcacagagaccaaagttggcacacagcactctcctaacactaaagactctacaactccttcttcatgggatgtgtgaaagcacagagagatggagacatggctgcttggaaattgtccttaaaggaaccacaggcaagcgggaggtagaaatcaaaaccagggtggctgccacaggcgatgaagctagagtgaaagaggttggctgaggttaaaccaaagaacagtccagaagatgggagaatcccaacaaattttcagtcagtatttcccaaagtgggttcctgaaaattgttcctttagaaaaagcatcatagtcaagcacatttaggaaactttccttaattcccctctctttgaaattcacaagcccctttgacatattaaagtttctgtaaagtcagtgaataaagaaacctgtttacatttg

SEQ ID NO: 6353 - protein, 102 aa, Homo sapiens
MWSQERRGIQRAWETLGENNQLVSTSQRDSQSGSSQRPKLAHSTLLTLKTLQLLLHGMCESTERWRHGCLEIVLKGTTGKREVEIKTRVAATGDEARVKEVG

SEQ ID NO: 6354 - DNA, 553 bp, Homo sapiens
atcgccaggatgggggcccaaccaaggtgagggcaaagaggacggtaagggagaaagaaagaaagaagggaagataggaggaaggactagcttgcagctcctgcctggatggacagagcagcgtggggagactcatattgtgaacttttgctccaagaactactgcaggaacataccaggaagccaagagaatccacagaccctttgaaggaactagatcactgctgcagtctccctgagatgacaaaaaactatccccagagacgtgaagatgcatggaataacacgtgaagagaggaaacttcgggcctgtggtcaaaatgtgttcaccacggcagacaactgcttgggtgacagctttggcctctggatgaattctccttggcgagcaatcgtcccacctgtaggtgccttcatgatcgtctgtgtgcagggcaccaagcaggccatctaaagccactaatctcaaagagagcttacccagggacaggactttccaaaaggaaaggagcacaatagaagagaatggctgctgctaagttccatccaacag

SEQ ID NO: 6355 - protein, 60 aa, Homo sapiens [sequence omitted]

SEQ ID NO: 6356 - DNA, 543 bp, Homo sapiens
atcgccaggatgggggcccaaccaaggtgagggcaaagaggacggtaagggagaaagaaagaaagaagggaagatccccagagacgtgaagatgcatggaataacacgtgaagagaggaaacttcgggcctgtggtcaaaatgtgttcaccacggcagacaactgcttgggtgacagctttggcctctggatgaattctccttggcgagcaatcgtcccacctgtaggtgccttcatgatcgtctgtgtgcagggcaccaagcaggccatctaaagccactaatctcaaagagagcttacccagggacaggactttccaaaaggaaaggagcacaatagaagagaatggctgctgctaagttccatccaacagtggcctcttttgaaaagtcgtcctcatccacagatggtcaacattatgatggaattttgttttcctctcatgtgaatttggagctgatagatgcttctcagctccttgctgggacctcactgacaaacccgctggccccagaactacttgtgacatcaggatgacgcttg

SEQ ID NO: 6357 - protein, 63 aa, Homo sapiens
MAAAKFHPTVASFEKSSSSTDGQHYDGILFSSHVNLELIDASQLLAGTSLTNPLAPELLVTSG

SEQ ID NO: 6358 - DNA, 2640 bp, Homo sapiens
agcttcccgagcgagccctgcggccgccggagcagctcccgcggcggagcaggagccggatggtcagaggagcccggcagccccagcagccgcggagtcgcctggcccccagactgactggcacagtggagaaaccgcctcgaaaacggagaagcagtatcagaggttctggtgatagcagtcattcacaatctcaaggggaaagatatcaacatttcactgaaaagactgaatttgctcttaaagaaatcatgtcctctggaggtgctgaagatgatatcccacagggagagaggaaaacagttacagatttttgttatcttctggataaatctaagcaactgttcaatgggttaagagatttgccacaatatggacagaagcagtggcagtcctattttggaagaacttttgatgtttacaccaaactctggaagttccagcagcagcatcgacaagtcttggataatcggtatggcttgaagcgctggcaaataggagaaattgcttccaagattgggcagctatactatcattattacttacgcacatcggaaaccagctatctgaatgaggctttttccttctattctgcaatcagacagagatcatattattctcaagtcaataaagaggacagacctgaattggtagttaagaagttacgatattatgcaagatttatagtagtttgtcttcttctcaacaaaatggatgttgtaaaggatctggtaaaggaattgtcagatgaaattgaagattatactcaccgatttaatactgaagatcaagtggaatggaacttggtgcttcaagaagtagcagctttcattgaggcggatcctgtaatggtattaaatgatgataataccattgttatcacatcgaatcgccttgctgaaacaggagccccattgctggaacagggcatgattgtgggacagttgtctctggctgacgcactcattattggtaattgtaataatcaggttaagttcagtgaactaactgttgacatgttccggatgttacaagctctggaaagggagccaatgaatttagcttcccagatgaataaaccaggaatgcaggaatcagctgacaagcctactagacgagaaaacccccacaagtatctgctctacaaaccaaccttcagccagctatataccttcttagcagcgtcttttaaggagctgcctgccaatagcgtgcttctgatttacctgtcggccactggcgttttccccacaggtcgttctgatagtgaaggtccttatgattttggaggtgtacttactaatagtaaccgggatattattaatggagatgccatccacaaacgaaatcagtcccacaaggaaatgcactgccttcatcccggggatctctatcctttcaccaggaagccactgttcatcattgtggattcgtctaatagtgttgcgtataagaatttcacaaacttgtttggacagccactagtctgcttgctttctcctacagcatatccaaaagctttacaagatcaatctcagcgaggtagcctcttcactctctttttgaacaatcctctaatggccttcctatttgtctctggattgtcaagcatgcgcagaggcctatgggaaaagtgtcaagaatatcttcgaaaaatcaaccgtgatattgcccagctactgactcattcacgttcaatagatcaggcatttctccagttttttggagatgaatttcttcgcttgctcctcacaagatttatcttttgttcagccaccatgaggatgcacaagatttttcgggaaacacgaaattatccagaatcatatccacaactgccaagggatgaaacagtggagaatcctcatctccagaagcacattttggaattagcatccattctggatgttcgaaacgtgttctttgagaataccattgatgactattaaaacaaaaaccctgttgtcgaaacaagttttcattttccacaaattttaaatggtgcagttttctaacgtgataagacacatagtggtgttacttagtttttattttttaatttagggccaccattttaaaaacaaacaaaaaaatgttcacacttttagggtaactgttttaaaatgcaacctttcaggtcttttaaaatcttaaccttggaatttttattttttgattttgagggatggatatttacctccaacttctaatcctacactcaaatagtcactattctcaccctgagaagagtaaatcatttatttttgtataatgaggtaaatccaactcttatacttggacctaagttaaatgtctggatttggaaatatgtaatggttcataatgatgaagctagccaccatggactactgaaaatcaagaacagagtccctccataatatattttttctcattccaacttagctggtagaaaaatgtttgatcctttgaaacatgatcaagccagttttttgaaatcatttaatttctttcaatactgtcataatttcagaaattggattgaattgcatctgaaagctacatcttgattgaggacttgaggtggtaatattacttggaatgtatgagtattatgagatttatttgcatattttctttgtagtctgtgaatgctggaaa

SEQ ID NO: 6359 - protein, 629 aa, Homo sapiens; identical to SEQ ID NO: 867

SEQ ID NO: 6360 - DNA, 2634 bp, Homo sapiens
aagcctggcagaggcgcgaggccctcctcccgcctctccgcctactccagcctccgccgcctcagcttcccgagcgagccctgcggccgccggagcagctcccgcggcggagcaggagccggatggtcagaggagcccggcagccccagcagccgcggagtcgcctggcccccagactgactggcacagtggagaaaccgcctcgaaaacggagaagcaggactgaatttgctcttaaagaaatcatgtcctctggaggtgctgaagatgatatcccacagggagagaggaaaacagttacagatttttgttatcttctggataaatctaagcaactgttcaatgggttaagagatttgccacaatatggacagaagcagtggcagtcctattttggaagaacttttgatgtttacaccaaactctggaagttccagcagcagcatcgacaagtcttggataatcggtatggcttgaagcgctggcaaataggagaaattgcttccaagattgggcagctatactatcattattacttacgcacatcggaaaccagctatctgaatgaggctttttccttctattctgcaatcagacagagatcatattattctcaagtcaataaagaggacagacctgaattggtagttaagaagttacgatattatgcaagatttatagtagtttgtcttcttctcaacaaaatggatgttgtaaaggatctggtaaaggaattgtcagatgaaattgaagattatactcaccgatttaatactgaagatcaagtggaatggaacttggtgcttcaagaagtagcagctttcattgaggcggatcctgtaatggtattaaatgatgataataccattgttatcacatcgaatcgccttgctgaaacaggagccccattgctggaacagggcatgattgtgggacagttgtctctggctgacgcactcattattggtaattgtaataatcaggttaagttcagtgaactaactgttgacatgttccggatgttacaagctctggaaagggagccaatgaatttagcttcccagatgaataaaccaggaatgcaggaatcagctgacaagcctactagacgagaaaacccccacaagtatctgctctacaaaccaaccttcagccagctatataccttcttagcagcgtcttttaaggagctgcctgccaatagcgtgcttctgatttacctgtcggccactggcgttttccccacaggtcgttctgatagtgaaggtccttatgattttggaggtgtacttactaatagtaaccgggatattattaatggagatgccatccacaaacgaaatcagtcccacaaggaaatgcactgccttcatcccggggatctctatcctttcaccaggaagccactgttcatcattgtggattcgtctaatagtgttgcgtataagaatttcacaaacttgtttggacagccactagtctgcttgctttctcctacagcatatccaaaagctttacaagatcaatctcagcgaggtagcctcttcactctctttttgaacaatcctctaatggccttcctatttgtctctggattgtcaagcatgcgcagaggcctatgggaaaagtgtcaagaatatcttcgaaaaatcaaccgtgatattgcccagctactgactcattcacgttcaatagatcaggcatttctccagttttttggagatgaatttcttcgcttgctcctcacaagatttatcttttgttcagccaccatgaggatgcacaagatttttcgggaaacacgaaattatccagaatcatatccacaactgccaagggatgaaacagtggagaatcctcatctccagaagcacattttggaattagcatccattctggatgttcgaaacgtgttctttgagaataccattgatgactattaaaacaaaaaccctgttgtcgaaacaagttttcattttccacaaattttaaatggtgcagttttctaacgtgataagacacatagtggtgttacttagtttttattttttaatttagggccaccattttaaaaacaaacaaaaaaatgttcacacttttagggtaactgttttaaaatgcaacctttcaggtcttttaaaatcttaaccttggaatttttattttttgattttgagggatggatatttacctccaacttctaatcctacactcaaatagtcactattctcaccctgagaagagtaaatcatttatttttgtataatgaggtaaatccaactcttatacttggacctaagttaaatgtctggatttggaaatatgtaatggttcataatgatgaagctagccaccatggactactgaaaatcaagaacagagtccctccataatatattttttctcattccaacttagctggtagaaaaatgtttgatcctttgaaacatgatcaagccagttttttgaaatcatttaatttctttcaatactgtcataatttcagaaattggattgaattgcatctgaaagctacatcttgattgaggacttgaggtggtaatattacttggaatgtatgagtattatgagatttatttgcatattttctttgtagtctgtgaatgctggaaa

SEQ ID NO: 6361 - protein, 606 aa, Homo sapiens
MVRGARQPQQPRSRLAPRLTGTVEKPPRKRRSRTEFALKEIMSSGGAEDDIPQGERKTVTDFCYLLDKSKQLFNGLRDLPQYGQKQWQSYFGRTFDVYTKLWKFQQQHRQVLDNRYGLKRWQIGEIASKIGQLYYHYYLRTSETSYLNEAFSFYSAIRQRSYYSQVNKEDRPELVVKKLRYYARFIVVCLLLNKMDVVKDLVKELSDEIEDYTHRFNTEDQVEWNLVLQEVAAFIEADPVMVLNDDNTIVITSNRLAETGAPLLEQGMIVGQLSLADALIIGNCNNQVKFSELTVDMFRMLQALEREPMNLASQMNKPGMQESADKPTRRENPHKYLLYKPTFSQLYTFLAASFKELPANSVLLIYLSATGVFPTGRSDSEGPYDFGGVLTNSNRDIINGDAIHKRNQSHKEMHCLHPGDLYPFTRKPLFIIVDSSNSVAYKNFTNLFGQPLVCLLSPTAYPKALQDQSQRGSLFTLFLNNPLMAFLFVSGLSSMRRGLWEKCQEYLRKINRDIAQLLTHSRSIDQAFLQFFGDEFLRLLLTRFIFCSATMRMHKIFRETRNYPESYPQLPRDETVENPHLQKHILELASILDVRNVFFENTIDDY

SEQ ID NO: 6362 - DNA, 1997 bp, Homo sapiens
aagcctggcagaggcgcgaggccctcctcccgcctctccgcctactccagcctccgccgcctcagcttcccgagcgagccctgcggccgccggagcagctcccgcggcggagcaggagccggatggtcagaggagcccggcagccccagcagccgcggagtcgcctggcccccagactgactggcacagtggagaaaccgcctcgaaaacggagaagcaggactgaatttgctcttaaagaaatcatgtcctctggaggtgctgaagatgatatcccacagggagagaggaaaacagttacagatttttgttatcttctggataaatctaagcaactgttcaatgggttaagagatttgccacaatatggacagaagcagtggcagtcctattttggaagaacttttgatgtttacaccaaactctggaagttccagcagcagcatcgacaagtcttggataatcggtatggcttgaagcgctggcaaataggagaaattgcttccaagattgggcagctatactatcattattacttacgcacatcggaaaccagctatctgaatgaggctttttccttctattctgcaatcagacagagatcatattattctcaagtcaataaagaggacagacctgaattggtagttaagaagttacgatattatgcaagatttatagtagtttgtcttcttctcaacaaaatggatgttgtaaaggatctggtaaaggaattgtcagatgaaattgaagattatactcaccgatttaatactgaagatcaagtggaatggaacttggtgcttcaagaagtagcagctttcattgaggcggatcctgtaatggtattaaatgatgataataccattgttatcacatcgaatcgccttgctgaaacaggagccccattgctggaacagggcatgattgtgggacagttgtctctggctgacgcactcattattggtaattgtaataatcaggttaagttcagtgaactaactgttgacatgttccggatgttacaagctctggaaagggagccaatgaatttagcttcccagatgaataaaccaggaatgcaggaatcagctgacaagcctactagacgagaaaacccccacaagtatctgctctacaaaccaaccttcagccagctatataccttcttagcagcgtcttttaaggagctgcctgccaatagcgtgcttctgatttacctgtcggccactggcgttttccccacaggtcgttctgatagtgaaggtccttatgattttggaggtgtacttactaatagtaaccgggatattattaatggagatgccatccacaaacgaaatcagtcccacaaggaaatgcactgccttcatcccggggatctctatcctttcaccaggaagccactgttcatcattgtggattcgtctaatagtgttgcgtataagaatttcacaaacttgtttggacagccactagtctgcttgctttctcctacagcatatccaaaagctttacaagcatgcgcagaggcctatgggaaaagtgtcaagaatatcttcgaaaaatcaaccgtgatattgcccagctactgactcattcacgttcaatagatcaggcatttctccagttttttggagatgaatttcttcgcttgctcctcacaagatttatcttttgttcagccaccatgaggatgcacaagatttttcgggaaacacgaaattatccagaatcatatccacaactgccaagggatgaaacagtggagaatcctcatctccagaagcacattttggaattagcatccattctggatgttcgaaacgtgttctttgagaataccattgatgactattaaaacaaaaaccctgttgtcgaaacaagttttcattttccacaaattttaaatggtgcagttttctaacgtgataagacacatagtggtgttacttagtttttattttttaatttagggccaccattttaaaaacaaa

SEQ ID NO: 6363 - protein, 490 aa, Homo sapiens
MVRGARQPQQPRSRLAPRLTGTVEKPPRKRRSRTEFALKEIMSSGGAEDDIPQGERKTVTDFCYLLDKSKQLFNGLRDLPQYGQKQWQSYFGRTFDVYTKLWKFQQQHRQVLDNRYGLKRWQIGEIASKIGQLYYHYYLRTSETSYLNEAFSFYSAIRQRSYYSQVNKEDRPELVVKKLRYYARFIVVCLLLNKMDVVKDLVKELSDEIEDYTHRFNTEDQVEWNLVLQEVAAFIEADPVMVLNDDNTIVITSNRLAETGAPLLEQGMIVGQLSLADALIIGNCNNQVKFSELTVDMFRMLQALEREPMNLASQMNKPGMQESADKPTRRENPHKYLLYKPTFSQLYTFLAASFKELPANSVLLIYLSATGVFPTGRSDSEGPYDFGGVLTNSNRDIINGDAIHKRNQSHKEMHCLHPGDLYPFTRKPLFIIVDSSNSVAYKNFTNLFGQPLVCLLSPTAYPKALQACAEAYGKSVKNIFEKSTVILPSY

SEQ ID NO: 6364 - DNA, 1968 bp, Homo sapiens; identical to SEQ ID NO: 866

SEQ ID NO: 6365 - protein, 629 aa, Homo sapiens; identical to SEQ ID NO: 867

SEQ ID NO: 6366 - DNA, 1962 bp, Homo sapiens
aagcctggcagaggcgcgaggccctcctcccgcctctccgcctactccagcctccgccgcctcagcttcccgagcgagccctgcggccgccggagcagctcccgcggcggagcaggagccggatggtcagaggagcccggcagccccagcagccgcggagtcgcctggcccccagactgactggcacagtggagaaaccgcctcgaaaacggagaagcaggactgaatttgctcttaaagaaatcatgtcctctggaggtgctgaagatgatatcccacagggagagaggaaaacagttacagatttttgttatcttctggataaatctaagcaactgttcaatgggttaagagatttgccacaatatggacagaagcagtggcagtcctattttggaagaacttttgatgtttacaccaaactctggaagttccagcagcagcatcgacaagtcttggataatcggtatggcttgaagcgctggcaaataggagaaattgcttccaagattgggcagctatactatcattattacttacgcacatcggaaaccagctatctgaatgaggctttttccttctattctgcaatcagacagagatcatattattctcaagtcaataaagaggacagacctgaattggtagttaagaagttacgatattatgcaagatttatagtagtttgtcttcttctcaacaaaatggatgttgtaaaggatctggtaaaggaattgtcagatgaaattgaagattatactcaccgatttaatactgaagatcaagtggaatggaacttggtgcttcaagaagtagcagctttcattgaggcggatcctgtaatggtattaaatgatgataataccattgttatcacatcgaatcgccttgctgaaacaggagccccattgctggaacagggcatgattgtgggacagttgtctctggctgacgcactcattattggtaattgtaataatcaggttaagttcagtgaactaactgttgacatgttccggatgttacaagctctggaaagggagccaatgaatttagcttcccagatgaataaaccaggaatgcaggaatcagctgacaagcctactagacgagaaaacccccacaagtatctgctctacaaaccaaccttcagccagctatataccttcttagcagcgtcttttaaggagctgcctgccaatagcgtgcttctgatttacctgtcggccactggcgttttccccacaggtcgttctgatagtgaaggtccttatgattttggaggtgtacttactaatagtaaccgggatattattaatggagatgccatccacaaacgaaatcagtcccacaaggaaatgcactgccttcatcccggggatctctatcctttcaccaggaagccactgttcatcattgtggattcgtctaatagtgttgcgtataagaatttcacaaacttgtttggacagccactagtctgcttgctttctcctacagcatatccaaaagctttacaagatcaatctcagcgaggtagcctcttcactctctttttgaacaatcctctaatggccttcctatttgtctctggattgtcaagcatgcgcagaggcctatgggaaaagtgtcaagaatatcttcgaaaaatcaaccgtgatattgcccagctactgactcattcacgttcaatagatcaggcatttctccagttttttggagatgaatttcttcgcttgctcctcacaagatttatcttttgttcagccaccatgaggatgcacaagatttttcgggaaacacgaaattatccagaatcatatccacaactgccaagggatgaaacagtggagaatcctcatctccagaagcacattttggaattagcatccattctggatgttcgaaacgtgttctttgagaataccattgatgactattaaaacaaaaaccctgttgtcg

SEQ ID NO: 6367 - protein, 606 aa, Homo sapiens; identical to SEQ ID NO: 6361

SEQ ID NO: 6368 - DNA, 736 bp, Homo sapiens
agcttcccgagcgagccctgcggccgccggagcagctcccgcggcggagcaggagccggatggtcagaggagcccggcagccccagcagccgcggagtcgcctggcccccagactgactggcacagtggagaaaccgcctcgaaaacggagaagcagtatcagaggttctggtgatagcagtcattcacaatctcaaggggaaagatatcaacatttcactgaaaagactgaatttgctcttaaagaaatcatgtcctctggaggtgctgaagatgatatcccacagggagagaggaaaacagttacagatttttgttatcttctggataaatctaagcaactgttcaatgggttaaggctggagtgtgatggtgcgatcttgctcactgcaacctccgcctcctgggttcaagtgattctcctgcctccaagcgattctcctgcctccaagcgattctcctgcctcggcacccaccgcccccctaccccgagtagctgggattacaggtgcctgtcaccatgcccggctaatttttgtatttttagtagaaacgggatttcaccatgttggccaggctggtctagaactcctgacctcaggtgatccacccgcctcgacctcccaaagtgctgggattacaggcgtgagccaccgcaaaccggcatgtcttttactttcttaatgatatcctttgaagcacaaatgtttttaattttaataaagttaaacttatc

SEQ ID NO: 6369 - protein, 181 aa, Homo sapiens
MVRGARQPQQPRSRLAPRLTGTVEKPPRKRRSSIRGSGDSSHSQSQGERYQHFTEKTEFALKEIMSSGGAEDDIPQGERKTVTDFCYLLDKSKQLFNGLRLECDGAILLTATSASWVQVILLPPSDSPASKRFSCLGTHRPPTPSSWDYRCLSPCPANFCIFSRNGISPCWPGWSRTPDLR

SEQ ID NO: 6370 - DNA, 893 bp, Homo sapiens
ttttaaatatatatacctctgtctctgtctctctacctctacctctgtctctctcctgttgattctgtttctctggagagccctgactaatatataagcctagtcttttattgccttacttttgtctcatttcaggtttttcagagtgctcctaatctctgagaacttctgcattactggcttaattctctgcattgacgcagtctgtcatgaaatggctatcttcatgacaaaccaagcaaaaggagaggtgcttgggttttcataaacttggcagctgttttggaaacattttactctaaggctaggcaccactgtttgtattcttattttgcatttggggtttctttctcctaagttctctctccatatattctcctggcctggaaggcatgtgtgcctgtttgacagtgtcctggaaattcttttctagacggggagtgcatgttgaaggtgctcacacgtggtttcctaaaatcctgcaaagtggcagttaggattttaaactcttaggataatttccaaactatagagtcatcatgtatagattttcagagaacaactgccaaaaataaagattttagatttagaattgttgacataagcctttttttttttgagttggagtctcactctcttggccagtctggagtgtagtggtgcaatctcagcccactgcaacctccatctccccagttcaggcaattctcctgcctcagcctcccgagttgctgggactacaggcacgtgccaccacacctggctgattttttgtagttttattagagacagagttttaccatgtctctcaggctggtcttgaactcctgagcacaggcaatctgcctaccttggcctcccagagtgctaggattgcaagtgtgagccactga

SEQ ID NO: 6371 - protein, 34 aa, Homo sapiens
MCACLTVSWKFFSRRGVHVEGAHTWFPKILQSGS

SEQ ID NO: 6372 - DNA, 546 bp, Homo sapiens
ccgccgcctcagcttcccgagcgagccctgcggccgccggagcagctcccgcggcggagcaggagccggatggtcagaggagcccggcagccccagcagccgcggagtcgcctggcccccagactgactggcacagtggagaaaccgcctcgaaaacggagaagcaggtaaggcagtgccttcctattttgcttcatgtttttctttttgcttggctgcacctgtgccgtactgcataattgtatactgtcagtagatgaagtttcttatttatcccccttttaaaagaatataaccacatgcatgatttttcttttgaggacttcaaattactacctctacagtcgattttttttttcttggtatctaagataatgtgggaaatcttgagaaatcctacttttttactttttgatgttgtgtaaggatctcagctatttttttttttaaccttagccataatttcattttctccagcatctctgtttaaaaagctcatcttggctggggtggctcatgccttcaatcccagctctttgggaggct

SEQ ID NO: 6373 - protein, 33 aa, Homo sapiens
MVRGARQPQQPRSRLAPRLTGTVEKPPRKRRSR

SEQ ID NO: 6374 - DNA, 3866 bp, Homo sapiens
cgccgccgctgctacagccgccgccgccgctgttgccgcggcttgttattcttaaaatggcgccgctagacctggacaagtatgtggaaatagcgcggctgtgcaagtacctgccagagaacgacctgaagcggctatgtgactacgtttgtgacctcctcttagaagagtcaaatgttcagccagtatcaacaccagtaacagtgtgtggagatatccatggacagatgagtgccaaaccaaatatggaaatgctaatgcctggagatactgtaccaaagtttttgacatgctcacagtagcagctttaatagatgagcagattttgtgtgtccatggtggtttatctcctgatatcaaaacactggatcaaattcgaaccatcgaacggaatcaggaaattcctcataaaggagcattttgtgatctggtttggtcagatcctgaagatgtggatacctgggctatcagtccccgaggagcaggttggctttttggagcaaaggtcacaaatgagtttgttcatatcaacaacttaaaactcatctgcagagcacatcaactagtgcacgaaggctataaatttatgtttgatgagaagctggtgacagtatggtctgctcctaattactgctatcgttgtggaaatattgcttcgatcatggtcttcaaagatgtaaatacaagagaaccaaagttattccgggcagttccagattcagaacgtgttattcctcccagaacgacaacgccatatttcctttgaggccttcgcccatcctgctgacccatttttctgccctcttcttaccccaattttcttgtattaccctctacaatatactttttattgagcactttgctgctgaaatgctgcctcttgcctttttttttttaaattttaaattatctaaatttattgtttgttgtggtgtctatagcaaagtttttctatcaattttcccccatcccatccccaccctggactcatttgagaagacttgagaaatgtcttaatactcacactgctgcatgtagctcttgcttatttactggtctgggaaacaggatgtgtttcctttttttaaaagccaattgacagattacacctaaatactcctccttttgtatcattcagccttttgttttagtttggtaagttttaagaaatttcagcagcaaagttgttattcagtgggcacgatggactccaaatgcctcaagttatgtatacctgtcccagatgtaaacttcattgtcctttgttggatgatattttaaatggatataaaataaattggtctaaagggctgccctccttgttgtgtttttaaattttagttaaaaactgctacagcttatgactttgtactttaagataattgtattgatcttttttcagattccttgtattttttaataaagtaatcttaaataaaactcagataggttaagtgttagaaattttaaacagcttacattgttagcgtaaagttatcttttcttttttcctaatcagagttcttgaccctttggttattgagtttaaaacttcaattgaaattcaatagtatttatttttgaaaaaaatcactaaactgtgcctaaagaacataactgccatattaatgttttggtttatatcctctatagtaatagaaaaacatttaatacttgtaatgctgatgtgttaatttgataccagttgagtagaatgtgatcaatccagtttacaatctatcatgagtattattaactaaaatctatgtgcttttcaataggaatcattcttctcttgctgtaacacttgaccttaacttttagaaagtgttcatttttaaactgcaactggaaaggttgaaaagttaggactcttgtatttgtgaactgtaatctgaagcagattatttaaagtgtagaaaaagaaacaagttcttcttttttgcaaaggtctgtgataccatatttcagctttgtgtaagtaatttgaatatccaaagggttgtgatgatcagttctgaatatgcaactgtccacttaataaggacaagtattccagtatctcttatgactgtagtcataaatgatgttggaatgtacattttgtgaaatagttggtatccctttactatgattaatttttgttattccaggaaatacttgtgaagccagccaattaataaagcactttagcatctgttcaggtagttttgaaaacccacttttccccttcaggataagaacttccaggttacctaaaaatgcaataaaaatctttatagtctaagcttcttggcatataatttttcatcagggttttcttttattaattgagcacaatactgttttgatttaatttttttccctcaaaccacccagctccttacatagtttttaattatatagctatatgaaagaggtggctaagacatttgctgcacacacttgaactaatgttgggtcagtagcttcgtgttactgccctgatcccagtgtaattcaggtggaaaggtatttttatctcacagggatatgtagctatgtattttactaattgtgaaacactggaaattaatgatgcagacaacttggtgtggtctttgaacagctctctgcagtatttttttttttcctgttaccataaattgtatttaagtgcttgctttccacttaagttgtactaatagaaccggtaactcccagccctccctgtttgacactccttagcttagattgatgtagttgtttttgttatccctataatgtgacttttatttttaagtcattgtgtactgcatttgtttgtcactagttgggcacgtgccaataatattctctccattccttatctgccatctctgttttgcctgatttctcttcaactgaataatggctttttgcatggaaaaaatagtttttactattagacgtgtaaagggaagagagagctaatgtattggactttgtgagcctacaaggaatattttggatccctccaataaataagggctatgtactatatgtactatatagagttatcatgtggtggaagatacttgcaagtcatagatttatgggcaggaggatttgttactccctatatctaggctgaatgtaaaatcccttatgttgtatcaatgggggtaaaaactatttttatttgcctatgatatacttggtttctaataaagtgccctaggctctagtgagaactgtctactttgaattgccatttactccctttcctcctttggccgatatgctcttggctagctttttataagttaatgtgtttccccaaaaagtttcactactttatattcatttgagtgtgatcctaaaacacctggatcaacagtacatctcatatgcaatctgcatcagctcctattctgtctggatgtctagaactgttggaagattttgacgtcttaagccctaggttttgctttgggaaataaggtttgaaatattgttcattgcattaagatttgtgtgtgtgtgctttgtaagcccagaaccaggttttggaaaatgcctgtactgtgaaagcaaattaggactctttctgagcctctttcattgtcagaaatagaatcactttccatcagcttccaggaaattgtgtatctggagtcgaagagatttgacatcaagaatccagatttttaaatgtaattgttttttaaatgctaatgtttgtaaagcaccttcagttcttcggatgaaaggtgctatattccctcagtgtaaattaataaaaagattacaggaagtttgtcaaaaaattcaatgcatagtctgtagtatgtcctgacaagaagttagcattttatataagaaattaaaaaatgcttattcctcca

SEQ ID NO: 6375 - protein, 158 aa, Homo sapiens
MLTVAALIDEQILCVHGGLSPDIKTLDQIRTIERNQEIPHKGAFCDLVWSDPEDVDTWAISPRGAGWLFGAKVTNEFVHINNLKLICRAHQLVHEGYKFMFDEKLVTVWSAPNYCYRCGNIASIMVFKDVNTREPKLFRAVPDSERVIPPRTTTPYFL

SEQ ID NO: 6376 - DNA, 4061 bp, Homo sapiens
tcacgggccggacgtgacgcagggaaagttccggcttcggcctccgccgctgccgccgccgctgctacagccgccgccgccgctgttgccgcggcttgttattcttaaaatggcgccgctagacctggacaagtatgtggaaatagcgcggctgtgcaagtacctgccagagaacgacctgaagcggctatgtgactacgtttgtgacctcctcttagaagagtcaaatgttcagccagtatcaacaccagtaacagtgtgtggagatatccatggacagggtgattttgtagacagaggttactatagtttggagaccttcacttaccttcttgcattaaaggctaaatggcctgatcgtattacacttttgcgaggaaatcatgagagtagacagataacacaggtctatggattttatgatgagtgccaaaccaaatatggaaatgctaatgcctggagatactgtaccaaagtttttgacatgctcacagtagcagctttaatagatgagcagattttgtgtgtccatggtggtttatctcctgatatcaaaacactggatcaaattcgaaccatcgaacggaatcaggaaattcctcataaaggagcattttgtgatctggtttggtcagatcctgaagatgtggatacctgggctatcagtccccgaggagcaggttggctttttggagcaaaggtcacaaatgagtttgttcatatcaacaacttaaaactcatctgcagagcacatcaactagtgcacgaaggctataaatttatgtttgatgagaagctggtgacagtatggtctgctcctaattactgctatcgttgtggaaatattgcttcgatcatggtcttcaaagatgtaaatacaagagaaccaaagttattccgggcagttccagattcagaacgtgttattcctcccagaacgacaacgccatatttcctttgaggccttcgcccatcctgctgacccatttttctgccctcttcttaccccaattttcttgtattaccctctacaatatactttttattgagcactttgctgctgaaatgctgcctcttgcctttttttttttaaattttaaattatctaaatttattgtttgttgtggtgtctatagcaaagtttttctatcaattttcccccatcccatccccaccctggactcatttgagaagacttgagaaatgtcttaatactcacactgctgcatgtagctcttgcttatttactggtctgggaaacaggatgtgtttcctttttttaaaagccaattgacagattacacctaaatactcctccttttgtatcattcagccttttgttttagtttggtaagttttaagaaatttcagcagcaaagttgttattcagtgggcacgatggactccaaatgcctcaagttatgtatacctgtcccagatgtaaacttcattgtcctttgttggatgatattttaaatggatataaaataaattggtctaaagggctgccctccttgttgtgtttttaaattttagttaaaaactgctacagcttatgactttgtactttaagataattgtattgatcttttttcagattccttgtattttttaataaagtaatcttaaataaaactcagataggttaagtgttagaaattttaaacagcttacattgttagcgtaaagttatcttttcttttttcctaatcagagttcttgaccctttggttattgagtttaaaacttcaattgaaattcaatagtatttatttttgaaaaaaatcactaaactgtgcctaaagaacataactgccatattaatgttttggtttatatcctctatagtaatagaaaaacatttaatacttgtaatgctgatgtgttaatttgataccagttgagtagaatgtgatcaatccagtttacaatctatcatgagtattattaactaaaatctatgtgcttttcaataggaatcattcttctcttgctgtaacacttgaccttaacttttagaaagtgttcatttttaaactgcaactggaaaggttgaaaagttaggactcttgtatttgtgaactgtaatctgaagcagattatttaaagtgtagaaaaagaaacaagttcttcttttttgcaaaggtctgtgataccatatttcagctttgtgtaagtaatttgaatatccaaagggttgtgatgatcagttctgaatatgcaactgtccacttaataaggacaagtattccagtatctcttatgactgtagtcataaatgatgttggaatgtacattttgtgaaatagttggtatccctttactatgattaatttttgttattccaggaaatacttgtgaagccagccaattaataaagcactttagcatctgttcaggtagttttgaaaacccacttttccccttcaggataagaacttccaggttacctaaaaatgcaataaaaatctttatagtctaagcttcttggcatataatttttcatcagggttttcttttattaattgagcacaatactgttttgatttaatttttttccctcaaaccacccagctccttacatagtttttaattatatagctatatgaaagaggtggctaagacatttgctgcacacacttgaactaatgttgggtcagtagcttcgtgttactgccctgatcccagtgtaattcaggtggaaaggtatttttatctcacagggatatgtagctatgtattttactaattgtgaaacactggaaattaatgatgcagacaacttggtgtggtctttgaacagctctctgcagtatttttttttttcctgttaccataaattgtatttaagtgcttgctttccacttaagttgtactaatagaaccggtaactcccagccctccctgtttgacactccttagcttagattgatgtagttgtttttgttatccctataatgtgacttttatttttaagtcattgtgtactgcatttgtttgtcactagttgggcacgtgccaataatattctctccattccttatctgccatctctgttttgcctgatttctcttcaactgaataatggctttttgcatggaaaaaatagtttttactattagacgtgtaaagggaagagagagctaatgtattggactttgtgagcctacaaggaatattttggatccctccaataaataagggctatgtactatatgtactatatagagttatcatgtggtggaagatacttgcaagtcatagatttatgggcaggaggatttgttactccctatatctaggctgaatgtaaaatcccttatgttgtatcaatgggggtaaaaactatttttatttgcctatgatatacttggtttctaataaagtgccctaggctctagtgagaactgtctactttgaattgccatttactccctttcctcctttggccgatatgctcttggctagctttttataagttaatgtgtttccccaaaaagtttcactactttatattcatttgagtgtgatcctaaaacacctggatcaacagtacatctcatatgcaatctgcatcagctcctattctgtctggatgtctagaactgttggaagattttgacgtcttaagccctaggttttgctttgggaaataaggtttgaaatattgttcattgcattaagatttgtgtgtgtgtgctttgtaagcccagaaccaggttttggaaaatgcctgtactgtgaaagcaaattaggactctttctgagcctctttcattgtcagaaatagaatcactttccatcagcttccaggaaattgtgtatctggagtcgaagagatttgacatcaagaatccagatttttaaatgtaattgttttttaaatgctaatgtttgtaaagcaccttcagttcttcggatgaaaggtgctatattccctcagtgtaaattaataaaaagattacaggaagtttgtcaaaaaattcaatgcatagtctgtagtatgtcctgacaagaagttagcattttatataagaaattaaaaaatgcttattcctcca

SEQ ID NO: 6377 - protein, 283 aa, Homo sapiens
MAPLDLDKYVEIARLCKYLPENDLKRLCDYVCDLLLEESNVQPVSTPVTVCGDIHGQGDFVDRGYYSLETFTYLLALKAKWPDRITLLRGNHESRQITQVYGFYDECQTKYGNANAWRYCTKVFDMLTVAALIDEQILCVHGGLSPDIKTLDQIRTIERNQEIPHKGAFCDLVWSDPEDVDTWAISPRGAGWLFGAKVTNEFVHINNLKLICRAHQLVHEGYKFMFDEKLVTVWSAPNYCYRCGNIASIMVFKDVNTREPKLFRAVPDSERVIPPRTTTPYFL

SEQ ID NO: 6378 - DNA, 4239 bp, Homo sapiens
gaagcgggctctcttggggcctgcagtcggggttcagccagagggggcgccgggcgtaccgacgtagcggggagaaacgggtcgcgctttaacggcgctgcgcaggcgccactcacgggccggacgtgacgcagggaaagttccggcttcggcctccgccgctgccgccgccgctgctacagccgccgccgccgctgttgccgcggcttgttattcttaaaatggcgccgctagacctggacaagtatgtggaaatagcgcggctgtgcaagtacctgccagagaacgacctgaagcggctatgtgactacgtttgtgacctcctcttagaagagtcaaatgttcagccagtatcaacaccagtaacagtgtgtggagatatccatggacagttttatgacctttgtgaactgttcagaactggaggtcaggttcctgacacaaactacatatttatgggtgattttgtagacagaggttactatagtttggagaccttcacttaccttcttgcattaaaggctaaatggcctgatcgtattacacttttgcgaggaaatcatgagagtagacagataacacaggtctatggattttatgatgagtgccaaaccaaatatggaaatgctaatgcctggagatactgtaccaaagtttttgacatgctcacagtagcagctttaatagatgagcagattttgtgtgtccatggtggtttatctcctgatatcaaaacactggatcaaattcgaaccatcgaacggaatcaggaaattcctcataaaggagcattttgtgatctggtttggtcagatcctgaagatgtggatacctgggctatcagtccccgaggagcaggttggctttttggagcaaaggtcacaaatgagtttgttcatatcaacaacttaaaactcatctgcagagcacatcaactagtgcacgaaggctataaatttatgtttgatgagaagctggtgacagtatggtctgctcctaattactgctatcgttgtggaaatattgcttcgatcatggtcttcaaagatgtaaatacaagagaaccaaagttattccgggcagttccagattcagaacgtgttattcctcccagaacgacaacgccatatttcctttgaggccttcgcccatcctgctgacccatttttctgccctcttcttaccccaattttcttgtattaccctctacaatatactttttattgagcactttgctgctgaaatgctgcctcttgcctttttttttttaaattttaaattatctaaatttattgtttgttgtggtgtctatagcaaagtttttctatcaattttcccccatcccatccccaccctggactcatttgagaagacttgagaaatgtcttaatactcacactgctgcatgtagctcttgcttatttactggtctgggaaacaggatgtgtttcctttttttaaaagccaattgacagattacacctaaatactcctccttttgtatcattcagccttttgttttagtttggtaagttttaagaaatttcagcagcaaagttgttattcagtgggcacgatggactccaaatgcctcaagttatgtatacctgtcccagatgtaaacttcattgtcctttgttggatgatattttaaatggatataaaataaattggtctaaagggctgccctccttgttgtgtttttaaattttagttaaaaactgctacagcttatgactttgtactttaagataattgtattgatcttttttcagattccttgtattttttaataaagtaatcttaaataaaactcagataggttaagtgttagaaattttaaacagcttacattgttagcgtaaagttatcttttcttttttcctaatcagagttcttgaccctttggttattgagtttaaaacttcaattgaaattcaatagtatttatttttgaaaaaaatcactaaactgtgcctaaagaacataactgccatattaatgttttggtttatatcctctatagtaatagaaaaacatttaatacttgtaatgctgatgtgttaatttgataccagttgagtagaatgtgatcaatccagtttacaatctatcatgagtattattaactaaaatctatgtgcttttcaataggaatcattcttctcttgctgtaacacttgaccttaacttttagaaagtgttcatttttaaactgcaactggaaaggttgaaaagttaggactcttgtatttgtgaactgtaatctgaagcagattatttaaagtgtagaaaaagaaacaagttcttcttttttgcaaaggtctgtgataccatatttcagctttgtgtaagtaatttgaatatccaaagggttgtgatgatcagttctgaatatgcaactgtccacttaataaggacaagtattccagtatctcttatgactgtagtcataaatgatgttggaatgtacattttgtgaaatagttggtatccctttactatgattaatttttgttattccaggaaatacttgtgaagccagccaattaataaagcactttagcatctgttcaggtagttttgaaaacccacttttccccttcaggataagaacttccaggttacctaaaaatgcaataaaaatctttatagtctaagcttcttggcatataatttttcatcagggttttcttttattaattgagcacaatactgttttgatttaatttttttccctcaaaccacccagctccttacatagtttttaattatatagctatatgaaagaggtggctaagacatttgctgcacacacttgaactaatgttgggtcagtagcttcgtgttactgccctgatcccagtgtaattcaggtggaaaggtatttttatctcacagggatatgtagctatgtattttactaattgtgaaacactggaaattaatgatgcagacaacttggtgtggtctttgaacagctctctgcagtatttttttttttcctgttaccataaattgtatttaagtgcttgctttccacttaagttgtactaatagaaccggtaactcccagccctccctgtttgacactccttagcttagattgatgtagttgtttttgttatccctataatgtgacttttatttttaagtcattgtgtactgcatttgtttgtcactagttgggcacgtgccaataatattctctccattccttatctgccatctctgttttgcctgatttctcttcaactgaataatggctttttgcatggaaaaaatagtttttactattagacgtgtaaagggaagagagagctaatgtattggactttgtgagcctacaaggaatattttggatccctccaataaataagggctatgtactatatgtactatatagagttatcatgtggtggaagatacttgcaagtcatagatttatgggcaggaggatttgttactccctatatctaggctgaatgtaaaatcccttatgttgtatcaatgggggtaaaaactatttttatttgcctatgatatacttggtttctaataaagtgccctaggctctagtgagaactgtctactttgaattgccatttactccctttcctcctttggccgatatgctcttggctagctttttataagttaatgtgtttccccaaaaagtttcactactttatattcatttgagtgtgatcctaaaacacctggatcaacagtacatctcatatgcaatctgcatcagctcctattctgtctggatgtctagaactgttggaagattttgacgtcttaagccctaggttttgctttgggaaataaggtttgaaatattgttcattgcattaagatttgtgtgtgtgtgctttgtaagcccagaaccaggttttggaaaatgcctgtactgtgaaagcaaattaggactctttctgagcctctttcattgtcagaaatagaatcactttccatcagcttccaggaaattgtgtatctggagtcgaagagatttgacatcaagaatccagatttttaaatgtaattgttttttaaatgctaatgtttgtaaagcaccttcagttcttcggatgaaaggtgctatattccctcagtgtaaattaataaaaagattacaggaagtttgtcaaaaaattcaatgcatagtctgtagtatgtcctgacaagaagttagcattttatataagaaattaaaaaatgcttattcctcca

SEQ ID NO: 6379 - protein, 305 aa, Homo sapiens; identical to SEQ ID NO: 869

SEQ ID NO: 6380 - DNA, 3791 bp, Homo sapiens
cgccgccgctgctacagccgccgccgccgctgttgccgcggcttgttattcttaaaatggcgccgctagacctggacaagtatgtggaaatagcgcggctgtgcaagtacctgccagagaacgacctgaagcggctatgtgactacgtttgtgacctcctcttagaagagtcaaatgttcagccagtatcaacaccagtaacagtgtgtggagatatccatggacagatgagtgccaaaccaaatatggaaatgctaatgcctggagatactgtaccaaagtttttgacatgctcacagtagcagctttaatagatgagcagattttgtgtgtccatggtggtttatctcctgatatcaaaacactggatcaaattcgaaccatcgaacggaatcaggaaattcctcataaaggagcattttgtgatctggtttggtcagatcctgaagatgtggatacctgggctatcagtccccgaggagcaggttggctttttggagcaaaggtcacaaatgagtttgttcatatcaacaacttaaaactcatctgcagagcacatcaactagtgcacgaaggctataaatttatgtttgatgagaagctggtgacagtatggtctgctcctaattactgctatcgttgtggaaatattgcttcgatcatggtcttcaaagatgtaaatacaagagaaccaaagttattccgggcagttccagattcagaacgtgttattcctcccagaacgacaacgccatatttcctttgaggccttcgcccatcctgctgacccatttttctgccctcttcttaccccaattttcttgtattaccctctacaatatactttttattgagcactttgctgctgaaatgctgcctcttgcctttttttttttaaattttaaattatctaaatttattgtttgttgtggtgtctatagcaaagtttttctatcaattttcccccatcccatccccaccctggactcatttgagaagacttgagaaatgtcttaatactcacactgctgcatgtagctcttgcttatttactggtctgggaaacaggatgtgtttcctttttttaaaagccaattgacagattacacctaaatactcctccttttgtatcattcagccttttgttttagtttggtaagttttaagaaatttcagcagcaaagttgttattcagtgggcacgatggactccaaatgcctcaagttatgtatacctgtcccagatgtaaacttcattgtcctttgttggatgatattttaaatggatataaaataaattggtctaaagggctgccctccttgttgtgtttttaaattttagttaaaaactgctacagcttatgactttgtactttaagataattgtattgatcttttttcagattccttgtattttttaataaagtaatcttaaataaaactcagataggttaagtgttagaaattttaaacagcttacattgttagcgtaaagttatcttttcttttttcctaatcagagttcttgaccctttggttattgagtttaaaacttcaattgaaattcaatagtatttatttttgaaaaaaatcactaaactgtgcctaaagaacataactgccatattaatgttttggtttatatcctctatagtaatagaaaaacatttaatacttgtaatgctgatgtgttaatttgataccagttgagtagaatgtgatcaatccagtttacaatctatcatgagtattattaactaaaatctatgtgcttttcaataggaatcattcttctcttgctgtaacacttgaccttaacttttagaaagtgttcatttttaaactgcaactggaaaggttgaaaagttaggactcttgtatttgtgaactgtaatctgaagcagattatttaaagtgtagaaaaagaaacaagttcttcttttttgcaaaggtctgtgataccatatttcagctttgtgtaagtaatttgaatatccaaagggttgtgatgatcagttctgaatatgcaactgtccacttaataaggacaagtattccagtatctcttatgactgtagtcataaatgatgttggaatgtacattttgtgaaatagttggtatccctttactatgattaatttttgttattccaggaaatacttgtgaagccagccaattaataaagcactttagcatctgttcaggtagttttgaaaacccacttttccccttcaggataagaacttccaggttacctaaaaatgcaataaaaatctttatagtctaagcttcttggcatataatttttcatcagggttttcttttattaattgagcacaatactgttttgatttaatttttttccctcaaaccacccagctccttacatagtttttaattatatagctatatgaaagaggtggctaagacatttgctgcacacacttgaactaatgttgggtcagtagcttcgtgttactgccctgatcccagtgtaattcaggtggaaaggtatttttatctcacagggatatgtagctatgtattttactaattgtgaaacactggaaattaatgatgcagacaacttggtgtggtctttgaacagctctctgcagtatttttttttttcctgttaccataaattgtatttaagtgcttgctttccacttaagttgtactaatagaaccggtaactcccagccctccctgtttgacactccttagcttagattgatgtagttgtttttgttatccctataatgtgacttttatttttaagtcattgtgtactgcatttgtttgtcactagttgggcacgtgccaataatattctctccattccttatctgccatctctgttttgcctgatttctcttcaactgaataatggctttttgcatggaaaaaatagtttttactattagacgtgtaaagggaagagagagctaatgtattggactttgtgagcctacaaggaatattttggatccctccaataaataagggctatgtactatatgtactatatagagttatcatgtggtggaagatacttgcaagtcatagatttatgggcaggaggatttgttactccctatatctaggctgaatgtaaaatcccttatgttgtatcaatgggggtaaaaactatttttatttgcctatgatatacttggtttctaataaagtgccctaggctctagtgagaactgtctactttgaattgccatttactccctttcctcctttggccgatatgctcttggctagctttttataagttaatgtgtttccccaaaaagtttcactactttatattcatttgagtgtgatcctaaaacacctggatcaacagtacatctcatatgcaatctgcatcagctcctattctgtctggatgtctagaactgttggaagattttgacgtcttaagccctaggttttgctttgggaaataaggtttgaaatattgttcattgcattaagatttgtgtgtgtgtgctttgtaagcccagaaccaggttttggaaaatgcctgtactgtgaaagcaaattaggactctttctgagcctctttcattgtcagaaatagaatcactttccatcagcttccaggaaattgtgtatctggagtcgaagagatttgacatcaagaatccagatttttaaatgtaattgttttttaaatgctaatgtttgtaaagcaccttcagttcttcggatgaaaggtgctatattccctcagtgtaaattaataaaaagattacaggaagtttgtcaaaaaattc

SEQ ID NO: 6381 - protein, 158 aa, Homo sapiens; identical to SEQ ID NO: 6375

SEQ ID NO: 6382 - DNA, 3986 bp, Homo sapiens
tcacgggccggacgtgacgcagggaaagttccggcttcggcctccgccgctgccgccgccgctgctacagccgccgccgccgctgttgccgcggcttgttattcttaaaatggcgccgctagacctggacaagtatgtggaaatagcgcggctgtgcaagtacctgccagagaacgacctgaagcggctatgtgactacgtttgtgacctcctcttagaagagtcaaatgttcagccagtatcaacaccagtaacagtgtgtggagatatccatggacagggtgattttgtagacagaggttactatagtttggagaccttcacttaccttcttgcattaaaggctaaatggcctgatcgtattacacttttgcgaggaaatcatgagagtagacagataacacaggtctatggattttatgatgagtgccaaaccaaatatggaaatgctaatgcctggagatactgtaccaaagtttttgacatgctcacagtagcagctttaatagatgagcagattttgtgtgtccatggtggtttatctcctgatatcaaaacactggatcaaattcgaaccatcgaacggaatcaggaaattcctcataaaggagcattttgtgatctggtttggtcagatcctgaagatgtggatacctgggctatcagtccccgaggagcaggttggctttttggagcaaaggtcacaaatgagtttgttcatatcaacaacttaaaactcatctgcagagcacatcaactagtgcacgaaggctataaatttatgtttgatgagaagctggtgacagtatggtctgctcctaattactgctatcgttgtggaaatattgcttcgatcatggtcttcaaagatgtaaatacaagagaaccaaagttattccgggcagttccagattcagaacgtgttattcctcccagaacgacaacgccatatttcctttgaggccttcgcccatcctgctgacccatttttctgccctcttcttaccccaattttcttgtattaccctctacaatatactttttattgagcactttgctgctgaaatgctgcctcttgcctttttttttttaaattttaaattatctaaatttattgtttgttgtggtgtctatagcaaagtttttctatcaattttcccccatcccatccccaccctggactcatttgagaagacttgagaaatgtcttaatactcacactgctgcatgtagctcttgcttatttactggtctgggaaacaggatgtgtttcctttttttaaaagccaattgacagattacacctaaatactcctccttttgtatcattcagccttttgttttagtttggtaagttttaagaaatttcagcagcaaagttgttattcagtgggcacgatggactccaaatgcctcaagttatgtatacctgtcccagatgtaaacttcattgtcctttgttggatgatattttaaatggatataaaataaattggtctaaagggctgccctccttgttgtgtttttaaattttagttaaaaactgctacagcttatgactttgtactttaagataattgtattgatcttttttcagattccttgtattttttaataaagtaatcttaaataaaactcagataggttaagtgttagaaattttaaacagcttacattgttagcgtaaagttatcttttcttttttcctaatcagagttcttgaccctttggttattgagtttaaaacttcaattgaaattcaatagtatttatttttgaaaaaaatcactaaactgtgcctaaagaacataactgccatattaatgttttggtttatatcctctatagtaatagaaaaacatttaatacttgtaatgctgatgtgttaatttgataccagttgagtagaatgtgatcaatccagtttacaatctatcatgagtattattaactaaaatctatgtgcttttcaataggaatcattcttctcttgctgtaacacttgaccttaacttttagaaagtgttcatttttaaactgcaactggaaaggttgaaaagttaggactcttgtatttgtgaactgtaatctgaagcagattatttaaagtgtagaaaaagaaacaagttcttcttttttgcaaaggtctgtgataccatatttcagctttgtgtaagtaatttgaatatccaaagggttgtgatgatcagttctgaatatgcaactgtccacttaataaggacaagtattccagtatctcttatgactgtagtcataaatgatgttggaatgtacattttgtgaaatagttggtatccctttactatgattaatttttgttattccaggaaatacttgtgaagccagccaattaataaagcactttagcatctgttcaggtagttttgaaaacccacttttccccttcaggataagaacttccaggttacctaaaaatgcaataaaaatctttatagtctaagcttcttggcatataatttttcatcagggttttcttttattaattgagcacaatactgttttgatttaatttttttccctcaaaccacccagctccttacatagtttttaattatatagctatatgaaagaggtggctaagacatttgctgcacacacttgaactaatgttgggtcagtagcttcgtgttactgccctgatcccagtgtaattcaggtggaaaggtatttttatctcacagggatatgtagctatgtattttactaattgtgaaacactggaaattaatgatgcagacaacttggtgtggtctttgaacagctctctgcagtatttttttttttcctgttaccataaattgtatttaagtgcttgctttccacttaagttgtactaatagaaccggtaactcccagccctccctgtttgacactccttagcttagattgatgtagttgtttttgttatccctataatgtgacttttatttttaagtcattgtgtactgcatttgtttgtcactagttgggcacgtgccaataatattctctccattccttatctgccatctctgttttgcctgatttctcttcaactgaataatggctttttgcatggaaaaaatagtttttactattagacgtgtaaagggaagagagagctaatgtattggactttgtgagcctacaaggaatattttggatccctccaataaataagggctatgtactatatgtactatatagagttatcatgtggtggaagatacttgcaagtcatagatttatgggcaggaggatttgttactccctatatctaggctgaatgtaaaatcccttatgttgtatcaatgggggtaaaaactatttttatttgcctatgatatacttggtttctaataaagtgccctaggctctagtgagaactgtctactttgaattgccatttactccctttcctcctttggccgatatgctcttggctagctttttataagttaatgtgtttccccaaaaagtttcactactttatattcatttgagtgtgatcctaaaacacctggatcaacagtacatctcatatgcaatctgcatcagctcctattctgtctggatgtctagaactgttggaagattttgacgtcttaagccctaggttttgctttgggaaataaggtttgaaatattgttcattgcattaagatttgtgtgtgtgtgctttgtaagcccagaaccaggttttggaaaatgcctgtactgtgaaagcaaattaggactctttctgagcctctttcattgtcagaaatagaatcactttccatcagcttccaggaaattgtgtatctggagtcgaagagatttgacatcaagaatccagatttttaaatgtaattgttttttaaatgctaatgtttgtaaagcaccttcagttcttcggatgaaaggtgctatattccctcagtgtaaattaataaaaagattacaggaagtttgtcaaaaaattc

SEQ ID NO: 6383 - protein, 283 aa, Homo sapiens; identical to SEQ ID NO: 6377

SEQ ID NO: 6384 - DNA, 4164 bp, Homo sapiens
gaagcgggctctcttggggcctgcagtcggggttcagccagagggggcgccgggcgtaccgacgtagcggggagaaacgggtcgcgctttaacggcgctgcgcaggcgccactcacgggccggacgtgacgcagggaaagttccggcttcggcctccgccgctgccgccgccgctgctacagccgccgccgccgctgttgccgcggcttgttattcttaaaatggcgccgctagacctggacaagtatgtggaaatagcgcggctgtgcaagtacctgccagagaacgacctgaagcggctatgtgactacgtttgtgacctcctcttagaagagtcaaatgttcagccagtatcaacaccagtaacagtgtgtggagatatccatggacagttttatgacctttgtgaactgttcagaactggaggtcaggttcctgacacaaactacatatttatgggtgattttgtagacagaggttactatagtttggagaccttcacttaccttcttgcattaaaggctaaatggcctgatcgtattacacttttgcgaggaaatcatgagagtagacagataacacaggtctatggattttatgatgagtgccaaaccaaatatggaaatgctaatgcctggagatactgtaccaaagtttttgacatgctcacagtagcagctttaatagatgagcagattttgtgtgtccatggtggtttatctcctgatatcaaaacactggatcaaattcgaaccatcgaacggaatcaggaaattcctcataaaggagcattttgtgatctggtttggtcagatcctgaagatgtggatacctgggctatcagtccccgaggagcaggttggctttttggagcaaaggtcacaaatgagtttgttcatatcaacaacttaaaactcatctgcagagcacatcaactagtgcacgaaggctataaatttatgtttgatgagaagctggtgacagtatggtctgctcctaattactgctatcgttgtggaaatattgcttcgatcatggtcttcaaagatgtaaatacaagagaaccaaagttattccgggcagttccagattcagaacgtgttattcctcccagaacgacaacgccatatttcctttgaggccttcgcccatcctgctgacccatttttctgccctcttcttaccccaattttcttgtattaccctctacaatatactttttattgagcactttgctgctgaaatgctgcctcttgcctttttttttttaaattttaaattatctaaatttattgtttgttgtggtgtctatagcaaagtttttctatcaattttcccccatcccatccccaccctggactcatttgagaagacttgagaaatgtcttaatactcacactgctgcatgtagctcttgcttatttactggtctgggaaacaggatgtgtttcctttttttaaaagccaattgacagattacacctaaatactcctccttttgtatcattcagccttttgttttagtttggtaagttttaagaaatttcagcagcaaagttgttattcagtgggcacgatggactccaaatgcctcaagttatgtatacctgtcccagatgtaaacttcattgtcctttgttggatgatattttaaatggatataaaataaattggtctaaagggctgccctccttgttgtgtttttaaattttagttaaaaactgctacagcttatgactttgtactttaagataattgtattgatcttttttcagattccttgtattttttaataaagtaatcttaaataaaactcagataggttaagtgttagaaattttaaacagcttacattgttagcgtaaagttatcttttcttttttcctaatcagagttcttgaccctttggttattgagtttaaaacttcaattgaaattcaatagtatttatttttgaaaaaaatcactaaactgtgcctaaagaacataactgccatattaatgttttggtttatatcctctatagtaatagaaaaacatttaatacttgtaatgctgatgtgttaatttgataccagttgagtagaatgtgatcaatccagtttacaatctatcatgagtattattaactaaaatctatgtgcttttcaataggaatcattcttctcttgctgtaacacttgaccttaacttttagaaagtgttcatttttaaactgcaactggaaaggttgaaaagttaggactcttgtatttgtgaactgtaatctgaagcagattatttaaagtgtagaaaaagaaacaagttcttcttttttgcaaaggtctgtgataccatatttcagctttgtgtaagtaatttgaatatccaaagggttgtgatgatcagttctgaatatgcaactgtccacttaataaggacaagtattccagtatctcttatgactgtagtcataaatgatgttggaatgtacattttgtgaaatagttggtatccctttactatgattaatttttgttattccaggaaatacttgtgaagccagccaattaataaagcactttagcatctgttcaggtagttttgaaaacccacttttccccttcaggataagaacttccaggttacctaaaaatgcaataaaaatctttatagtctaagcttcttggcatataatttttcatcagggttttcttttattaattgagcacaatactgttttgatttaatttttttccctcaaaccacccagctccttacatagtttttaattatatagctatatgaaagaggtggctaagacatttgctgcacacacttgaactaatgttgggtcagtagcttcgtgttactgccctgatcccagtgtaattcaggtggaaaggtatttttatctcacagggatatgtagctatgtattttactaattgtgaaacactggaaattaatgatgcagacaacttggtgtggtctttgaacagctctctgcagtatttttttttttcctgttaccataaattgtatttaagtgcttgctttccacttaagttgtactaatagaaccggtaactcccagccctccctgtttgacactccttagcttagattgatgtagttgtttttgttatccctataatgtgacttttatttttaagtcattgtgtactgcatttgtttgtcactagttgggcacgtgccaataatattctctccattccttatctgccatctctgttttgcctgatttctcttcaactgaataatggctttttgcatggaaaaaatagtttttactattagacgtgtaaagggaagagagagctaatgtattggactttgtgagcctacaaggaatattttggatccctccaataaataagggctatgtactatatgtactatatagagttatcatgtggtggaagatacttgcaagtcatagatttatgggcaggaggatttgttactccctatatctaggctgaatgtaaaatcccttatgttgtatcaatgggggtaaaaactatttttatttgcctatgatatacttggtttctaataaagtgccctaggctctagtgagaactgtctactttgaattgccatttactccctttcctcctttggccgatatgctcttggctagctttttataagttaatgtgtttccccaaaaagtttcactactttatattcatttgagtgtgatcctaaaacacctggatcaacagtacatctcatatgcaatctgcatcagctcctattctgtctggatgtctagaactgttggaagattttgacgtcttaagccctaggttttgctttgggaaataaggtttgaaatattgttcattgcattaagatttgtgtgtgtgtgctttgtaagcccagaaccaggttttggaaaatgcctgtactgtgaaagcaaattaggactctttctgagcctctttcattgtcagaaatagaatcactttccatcagcttccaggaaattgtgtatctggagtcgaagagatttgacatcaagaatccagatttttaaatgtaattgttttttaaatgctaatgtttgtaaagcaccttcagttcttcggatgaaaggtgctatattccctcagtgtaaattaataaaaagattacaggaagtttgtcaaaaaattc

SEQ ID NO: 6385 - protein, 305 aa, Homo sapiens; identical to SEQ ID NO: 869

SEQ ID NO: 6386 - DNA, 3210 bp, Homo sapiens
cgccgccgctgctacagccgccgccgccgctgttgccgcggcttgttattcttaaaatggcgccgctagacctggacaagtatgtggaaatagcgcggctgtgcaagtacctgccagagaacgacctgaagcggctatgtgactacgtttgtgacctcctcttagaagagtcaaatgttcagccagtatcaacaccagtaacagtgtgtggagatatccatggacagatgagtgccaaaccaaatatggaaatgctaatgcctggagatactgtaccaaagtttttgacatgctcacagtagcagctttaatagatgagcagattttgtgtgtccatggtggtttatctcctgatatcaaaacactggatcaaattcgaaccatcgaacggaatcaggaaattcctcataaaggagcattttgtgatctggtttggtcagatcctgaagatgtggatacctgggctatcagtccccgaggagcaggttggctttttggagcaaaggtcacaaatgagtttgttcatatcaacaacttaaaactcatctgcagagcacatcaactagtgcacgaaggctataaatttatgtttgatgagaagctggtgacagtatggtctgctcctaattactgctatcgttgtggaaatattgcttcgatcatggtcttcaaagatgtaaatacaagagaaccaaagttattccgggcagttccagattcagaacgtgttattcctcccagaacgacaacgccatatttcctttgaggccttcgcccatcctgctgacccatttttctgccctcttcttaccccaattttcttgtattaccctctacaatatactttttattgagcactttgctgctgaaatgctgcctcttgcctttttttttttaaattttaaattatctaaatttattgtttgttgtggtgtctatagcaaagtttttctatcaattttcccccatcccatccccaccctggactcatttgagaagacttgagaaatgtcttaatactcacactgctgcatgtagctcttgcttatttactggtctgggaaacaggatgtgtttcctttttttaaaagccaattgacagattacacctaaatactcctccttttgtatcattcagccttttgttttagtttggtaagttttaagaaatttcagcagcaaagttgttattcagtgggcacgatggactccaaatgcctcaagttatgtatacctgtcccagatgtaaacttcattgtcctttgttggatgatattttaaatggatataaaataaattggtctaaagggctgccctccttgttgtgtttttaaattttagttaaaaactgctacagcttatgactttgtactttaagataattgtattgatcttttttcagattccttgtattttttaataaagtaatcttaaataaaactcagataggttaagtgttagaaattttaaacagcttacattgttagcgtaaagttatcttttcttttttcctaatcagagttcttgaccctttggttattgagtttaaaacttcaattgaaattcaatagtatttatttttgaaaaaaatcactaaactgtgcctaaagaacataactgccatattaatgttttggtttatatcctctatagtaatagaaaaacatttaatacttgtaatgctgatgtgttaatttgataccagttgagtagaatgtgatcaatccagtttacaatctatcatgagtattattaactaaaatctatgtgcttttcaataggaatcattcttctcttgctgtaacacttgaccttaacttttagaaagtgttcatttttaaactgcaactggaaaggttgaaaagttaggactcttgtatttgtgaactgtaatctgaagcagattatttaaagtgtagaaaaagaaacaagttcttcttttttgcaaaggtctgtgataccatatttcagctttgtgtaagtaatttgaatatccaaagggttgtgatgatcagttctgaatatgcaactgtccacttaataaggacaagtattccagtatctcttatgactgtagtcataaatgatgttggaatgtacattttgtgaaatagttggtatccctttactatgattaatttttgttattccaggaaatacttgtgaagccagccaattaataaagcactttagcatctgttcaggtagttttgaaaacccacttttccccttcaggataagaacttccaggttacctaaaaatgcaataaaaatctttatagtctaagcttcttggcatataatttttcatcagggttttcttttattaattgagcacaatactgttttgatttaatttttttccctcaaaccacccagctccttacatagtttttaattatatagctatatgaaagaggtggctaagacatttgctgcacacacttgaactaatgttgggtcagtagcttcgtgttactgccctgatcccagtgtaattcaggtggaaaggtatttttatctcacagggatatgtagctatgtattttactaattgtgaaacactggaaattaatgatgcagacaacttggtgtggtctttgaacagctctctgcagtatttttttttttcctgttaccataaattgtatttaagtgcttgctttccacttaagttgtactaatagaaccggtaactcccagccctccctgtttgacactccttagcttagattgatgtagttgtttttgttatccctataatgtgacttttatttttaagtcattgtgtactgcatttgtttgtcactagttgggcacgtgccaataatattctctccattccttatctgccatctctgttttgcctgatttctcttcaactgaataatggctttttgcatggaaaaaatagtttttactattagacgtgtaaagggaagagagagctaatgtattggactttgtgagcctacaaggaatattttggatccctccaataaataagggctatgtactatatgtactatatagagttatcatgtggtggaagatacttgcaagtcatagatttatgggcaggaggatttgttactccctatatctaggctgaatgtaaaatcccttatgttgtatcaatgggggtaaaaactatttttatttgcctatgatatacttggtttctaataaagtgccctaggctctagtgag

SEQ ID NO: 6387 - protein, 158 aa, Homo sapiens; identical to SEQ ID NO: 6375

SEQ ID NO: 6388 - DNA, 3405 bp, Homo sapiens
tcacgggccggacgtgacgcagggaaagttccggcttcggcctccgccgctgccgccgccgctgctacagccgccgccgccgctgttgccgcggcttgttattcttaaaatggcgccgctagacctggacaagtatgtggaaatagcgcggctgtgcaagtacctgccagagaacgacctgaagcggctatgtgactacgtttgtgacctcctcttagaagagtcaaatgttcagccagtatcaacaccagtaacagtgtgtggagatatccatggacagggtgattttgtagacagaggttactatagtttggagaccttcacttaccttcttgcattaaaggctaaatggcctgatcgtattacacttttgcgaggaaatcatgagagtagacagataacacaggtctatggattttatgatgagtgccaaaccaaatatggaaatgctaatgcctggagatactgtaccaaagtttttgacatgctcacagtagcagctttaatagatgagcagattttgtgtgtccatggtggtttatctcctgatatcaaaacactggatcaaattcgaaccatcgaacggaatcaggaaattcctcataaaggagcattttgtgatctggtttggtcagatcctgaagatgtggatacctgggctatcagtccccgaggagcaggttggctttttggagcaaaggtcacaaatgagtttgttcatatcaacaacttaaaactcatctgcagagcacatcaactagtgcacgaaggctataaatttatgtttgatgagaagctggtgacagtatggtctgctcctaattactgctatcgttgtggaaatattgcttcgatcatggtcttcaaagatgtaaatacaagagaaccaaagttattccgggcagttccagattcagaacgtgttattcctcccagaacgacaacgccatatttcctttgaggccttcgcccatcctgctgacccatttttctgccctcttcttaccccaattttcttgtattaccctctacaatatactttttattgagcactttgctgctgaaatgctgcctcttgcctttttttttttaaattttaaattatctaaatttattgtttgttgtggtgtctatagcaaagtttttctatcaattttcccccatcccatccccaccctggactcatttgagaagacttgagaaatgtcttaatactcacactgctgcatgtagctcttgcttatttactggtctgggaaacaggatgtgtttcctttttttaaaagccaattgacagattacacctaaatactcctccttttgtatcattcagccttttgttttagtttggtaagttttaagaaatttcagcagcaaagttgttattcagtgggcacgatggactccaaatgcctcaagttatgtatacctgtcccagatgtaaacttcattgtcctttgttggatgatattttaaatggatataaaataaattggtctaaagggctgccctccttgttgtgtttttaaattttagttaaaaactgctacagcttatgactttgtactttaagataattgtattgatcttttttcagattccttgtattttttaataaagtaatcttaaataaaactcagataggttaagtgttagaaattttaaacagcttacattgttagcgtaaagttatcttttcttttttcctaatcagagttcttgaccctttggttattgagtttaaaacttcaattgaaattcaatagtatttatttttgaaaaaaatcactaaactgtgcctaaagaacataactgccatattaatgttttggtttatatcctctatagtaatagaaaaacatttaatacttgtaatgctgatgtgttaatttgataccagttgagtagaatgtgatcaatccagtttacaatctatcatgagtattattaactaaaatctatgtgcttttcaataggaatcattcttctcttgctgtaacacttgaccttaacttttagaaagtgttcatttttaaactgcaactggaaaggttgaaaagttaggactcttgtatttgtgaactgtaatctgaagcagattatttaaagtgtagaaaaagaaacaagttcttcttttttgcaaaggtctgtgataccatatttcagctttgtgtaagtaatttgaatatccaaagggttgtgatgatcagttctgaatatgcaactgtccacttaataaggacaagtattccagtatctcttatgactgtagtcataaatgatgttggaatgtacattttgtgaaatagttggtatccctttactatgattaatttttgttattccaggaaatacttgtgaagccagccaattaataaagcactttagcatctgttcaggtagttttgaaaacccacttttccccttcaggataagaacttccaggttacctaaaaatgcaataaaaatctttatagtctaagcttcttggcatataatttttcatcagggttttcttttattaattgagcacaatactgttttgatttaatttttttccctcaaaccacccagctccttacatagtttttaattatatagctatatgaaagaggtggctaagacatttgctgcacacacttgaactaatgttgggtcagtagcttcgtgttactgccctgatcccagtgtaattcaggtggaaaggtatttttatctcacagggatatgtagctatgtattttactaattgtgaaacactggaaattaatgatgcagacaacttggtgtggtctttgaacagctctctgcagtatttttttttttcctgttaccataaattgtatttaagtgcttgctttccacttaagttgtactaatagaaccggtaactcccagccctccctgtttgacactccttagcttagattgatgtagttgtttttgttatccctataatgtgacttttatttttaagtcattgtgtactgcatttgtttgtcactagttgggcacgtgccaataatattctctccattccttatctgccatctctgttttgcctgatttctcttcaactgaataatggctttttgcatggaaaaaatagtttttactattagacgtgtaaagggaagagagagctaatgtattggactttgtgagcctacaaggaatattttggatccctccaataaataagggctatgtactatatgtactatatagagttatcatgtggtggaagatacttgcaagtcatagatttatgggcaggaggatttgttactccctatatctaggctgaatgtaaaatcccttatgttgtatcaatgggggtaaaaactatttttatttgcctatgatatacttggtttctaataaagtgccctaggctctagtgag

SEQ ID NO: 6389 - protein, 283 aa, Homo sapiens; identical to SEQ ID NO: 6377

SEQ ID NO: 6390 - DNA, 3583 bp, Homo sapiens
gaagcgggctctcttggggcctgcagtcggggttcagccagagggggcgccgggcgtaccgacgtagcggggagaaacgggtcgcgctttaacggcgctgcgcaggcgccactcacgggccggacgtgacgcagggaaagttccggcttcggcctccgccgctgccgccgccgctgctacagccgccgccgccgctgttgccgcggcttgttattcttaaaatggcgccgctagacctggacaagtatgtggaaatagcgcggctgtgcaagtacctgccagagaacgacctgaagcggctatgtgactacgtttgtgacctcctcttagaagagtcaaatgttcagccagtatcaacaccagtaacagtgtgtggagatatccatggacagttttatgacctttgtgaactgttcagaactggaggtcaggttcctgacacaaactacatatttatgggtgattttgtagacagaggttactatagtttggagaccttcacttaccttcttgcattaaaggctaaatggcctgatcgtattacacttttgcgaggaaatcatgagagtagacagataacacaggtctatggattttatgatgagtgccaaaccaaatatggaaatgctaatgcctggagatactgtaccaaagtttttgacatgctcacagtagcagctttaatagatgagcagattttgtgtgtccatggtggtttatctcctgatatcaaaacactggatcaaattcgaaccatcgaacggaatcaggaaattcctcataaaggagcattttgtgatctggtttggtcagatcctgaagatgtggatacctgggctatcagtccccgaggagcaggttggctttttggagcaaaggtcacaaatgagtttgttcatatcaacaacttaaaactcatctgcagagcacatcaactagtgcacgaaggctataaatttatgtttgatgagaagctggtgacagtatggtctgctcctaattactgctatcgttgtggaaatattgcttcgatcatggtcttcaaagatgtaaatacaagagaaccaaagttattccgggcagttccagattcagaacgtgttattcctcccagaacgacaacgccatatttcctttgaggccttcgcccatcctgctgacccatttttctgccctcttcttaccccaattttcttgtattaccctctacaatatactttttattgagcactttgctgctgaaatgctgcctcttgcctttttttttttaaattttaaattatctaaatttattgtttgttgtggtgtctatagcaaagtttttctatcaattttcccccatcccatccccaccctggactcatttgagaagacttgagaaatgtcttaatactcacactgctgcatgtagctcttgcttatttactggtctgggaaacaggatgtgtttcctttttttaaaagccaattgacagattacacctaaatactcctccttttgtatcattcagccttttgttttagtttggtaagttttaagaaatttcagcagcaaagttgttattcagtgggcacgatggactccaaatgcctcaagttatgtatacctgtcccagatgtaaacttcattgtcctttgttggatgatattttaaatggatataaaataaattggtctaaagggctgccctccttgttgtgtttttaaattttagttaaaaactgctacagcttatgactttgtactttaagataattgtattgatcttttttcagattccttgtattttttaataaagtaatcttaaataaaactcagataggttaagtgttagaaattttaaacagcttacattgttagcgtaaagttatcttttcttttttcctaatcagagttcttgaccctttggttattgagtttaaaacttcaattgaaattcaatagtatttatttttgaaaaaaatcactaaactgtgcctaaagaacataactgccatattaatgttttggtttatatcctctatagtaatagaaaaacatttaatacttgtaatgctgatgtgttaatttgataccagttgagtagaatgtgatcaatccagtttacaatctatcatgagtattattaactaaaatctatgtgcttttcaataggaatcattcttctcttgctgtaacacttgaccttaacttttagaaagtgttcatttttaaactgcaactggaaaggttgaaaagttaggactcttgtatttgtgaactgtaatctgaagcagattatttaaagtgtagaaaaagaaacaagttcttcttttttgcaaaggtctgtgataccatatttcagctttgtgtaagtaatttgaatatccaaagggttgtgatgatcagttctgaatatgcaactgtccacttaataaggacaagtattccagtatctcttatgactgtagtcataaatgatgttggaatgtacattttgtgaaatagttggtatccctttactatgattaatttttgttattccaggaaatacttgtgaagccagccaattaataaagcactttagcatctgttcaggtagttttgaaaacccacttttccccttcaggataagaacttccaggttacctaaaaatgcaataaaaatctttatagtctaagcttcttggcatataatttttcatcagggttttcttttattaattgagcacaatactgttttgatttaatttttttccctcaaaccacccagctccttacatagtttttaattatatagctatatgaaagaggtggctaagacatttgctgcacacacttgaactaatgttgggtcagtagcttcgtgttactgccctgatcccagtgtaattcaggtggaaaggtatttttatctcacagggatatgtagctatgtattttactaattgtgaaacactggaaattaatgatgcagacaacttggtgtggtctttgaacagctctctgcagtatttttttttttcctgttaccataaattgtatttaagtgcttgctttccacttaagttgtactaatagaaccggtaactcccagccctccctgtttgacactccttagcttagattgatgtagttgtttttgttatccctataatgtgacttttatttttaagtcattgtgtactgcatttgtttgtcactagttgggcacgtgccaataatattctctccattccttatctgccatctctgttttgcctgatttctcttcaactgaataatggctttttgcatggaaaaaatagtttttactattagacgtgtaaagggaagagagagctaatgtattggactttgtgagcctacaaggaatattttggatccctccaataaataagggctatgtactatatgtactatatagagttatcatgtggtggaagatacttgcaagtcatagatttatgggcaggaggatttgttactccctatatctaggctgaatgtaaaatcccttatgttgtatcaatgggggtaaaaactatttttatttgcctatgatatacttggtttctaataaagtgccctaggctctagtgag

SEQ ID NO: 6391 - protein, 305 aa, Homo sapiens; identical to SEQ ID NO: 869

SEQ ID NO: 6392 - DNA, 1315 bp, Homo sapiens
cgccgccgctgctacagccgccgccgccgctgttgccgcggcttgttattcttaaaatggcgccgctagacctggacaagtatgtggaaatagcgcggctgtgcaagtacctgccagagaacgacctgaagcggctatgtgactacgtttgtgacctcctcttagaagagtcaaatgttcagccagtatcaacaccagtaacagtgtgtggagatatccatggacagatgagtgccaaaccaaatatggaaatgctaatgcctggagatactgtaccaaagtttttgacatgctcacagtagcagctttaatagatgagcagattttgtgtgtccatggtggtttatctcctgatatcaaaacactggatcaaattcgaaccatcgaacggaatcaggaaattcctcataaaggagcattttgtgatctggtttggtcagatcctgaagatgtggatacctgggctatcagtccccgaggagcaggttggctttttggagcaaaggtcacaaatgagtttgttcatatcaacaacttaaaactcatctgcagagcacatcaactagtgcacgaaggctataaatttatgtttgatgagaagctggtgacagtatggtctgctcctaattactgctatcgttgtggaaatattgcttcgatcatggtcttcaaagatgtaaatacaagagaaccaaagttattccgggcagttccagattcagaacgtgttattcctcccagaacgacaacgccatatttcctttgaggccttcgcccatcctgctgacccatttttctgccctcttcttaccccaattttcttgtattaccctctacaatatactttttattgagcactttgctgctgaaatgctgcctcttgcctttttttttttaaattttaaattatctaaatttattgtttgttgtggtgtctatagcaaagtttttctatcaattttcccccatcccatccccaccctggactcatttgagaagacttgagaaatgtcttaatactcacactgctgcatgtagctcttgcttatttactggtctgggaaacaggatgtgtttcctttttttaaaagccaattgacagattacacctaaatactcctccttttgtatcattcagccttttgttttagtttggtaagttttaagaaatttcagcagcaaagttgttattcagtgggcacgatggactccaaatgcctcaagttatgtatacctgtcccagatgtaaacttcattgtcctttgttggatgatattttaaatggatataaaataaattggtctaaagggctgcc

SEQ ID NO: 6393 - protein, 158 aa, Homo sapiens; identical to SEQ ID NO: 6375

SEQ ID NO: 6394 - DNA, 1510 bp, Homo sapiens
tcacgggccggacgtgacgcagggaaagttccggcttcggcctccgccgctgccgccgccgctgctacagccgccgccgccgctgttgccgcggcttgttattcttaaaatggcgccgctagacctggacaagtatgtggaaatagcgcggctgtgcaagtacctgccagagaacgacctgaagcggctatgtgactacgtttgtgacctcctcttagaagagtcaaatgttcagccagtatcaacaccagtaacagtgtgtggagatatccatggacagggtgattttgtagacagaggttactatagtttggagaccttcacttaccttcttgcattaaaggctaaatggcctgatcgtattacacttttgcgaggaaatcatgagagtagacagataacacaggtctatggattttatgatgagtgccaaaccaaatatggaaatgctaatgcctggagatactgtaccaaagtttttgacatgctcacagtagcagctttaatagatgagcagattttgtgtgtccatggtggtttatctcctgatatcaaaacactggatcaaattcgaaccatcgaacggaatcaggaaattcctcataaaggagcattttgtgatctggtttggtcagatcctgaagatgtggatacctgggctatcagtccccgaggagcaggttggctttttggagcaaaggtcacaaatgagtttgttcatatcaacaacttaaaactcatctgcagagcacatcaactagtgcacgaaggctataaatttatgtttgatgagaagctggtgacagtatggtctgctcctaattactgctatcgttgtggaaatattgcttcgatcatggtcttcaaagatgtaaatacaagagaaccaaagttattccgggcagttccagattcagaacgtgttattcctcccagaacgacaacgccatatttcctttgaggccttcgcccatcctgctgacccatttttctgccctcttcttaccccaattttcttgtattaccctctacaatatactttttattgagcactttgctgctgaaatgctgcctcttgcctttttttttttaaattttaaattatctaaatttattgtttgttgtggtgtctatagcaaagtttttctatcaattttcccccatcccatccccaccctggactcatttgagaagacttgagaaatgtcttaatactcacactgctgcatgtagctcttgcttatttactggtctgggaaacaggatgtgtttcctttttttaaaagccaattgacagattacacctaaatactcctccttttgtatcattcagccttttgttttagtttggtaagttttaagaaatttcagcagcaaagttgttattcagtgggcacgatggactccaaatgcctcaagttatgtatacctgtcccagatgtaaacttcattgtcctttgttggatgatattttaaatggatataaaataaattggtctaaagggctgcc

SEQ ID NO: 6395 - protein, 283 aa, Homo sapiens; identical to SEQ ID NO: 6377

SEQ ID NO: 6396 - DNA, 1688 bp, Homo sapiens
gaagcgggctctcttggggcctgcagtcggggttcagccagagggggcgccgggcgtaccgacgtagcggggagaaacgggtcgcgctttaacggcgctgcgcaggcgccactcacgggccggacgtgacgcagggaaagttccggcttcggcctccgccgctgccgccgccgctgctacagccgccgccgccgctgttgccgcggcttgttattcttaaaatggcgccgctagacctggacaagtatgtggaaatagcgcggctgtgcaagtacctgccagagaacgacctgaagcggctatgtgactacgtttgtgacctcctcttagaagagtcaaatgttcagccagtatcaacaccagtaacagtgtgtggagatatccatggacagttttatgacctttgtgaactgttcagaactggaggtcaggttcctgacacaaactacatatttatgggtgattttgtagacagaggttactatagtttggagaccttcacttaccttcttgcattaaaggctaaatggcctgatcgtattacacttttgcgaggaaatcatgagagtagacagataacacaggtctatggattttatgatgagtgccaaaccaaatatggaaatgctaatgcctggagatactgtaccaaagtttttgacatgctcacagtagcagctttaatagatgagcagattttgtgtgtccatggtggtttatctcctgatatcaaaacactggatcaaattcgaaccatcgaacggaatcaggaaattcctcataaaggagcattttgtgatctggtttggtcagatcctgaagatgtggatacctgggctatcagtccccgaggagcaggttggctttttggagcaaaggtcacaaatgagtttgttcatatcaacaacttaaaactcatctgcagagcacatcaactagtgcacgaaggctataaatttatgtttgatgagaagctggtgacagtatggtctgctcctaattactgctatcgttgtggaaatattgcttcgatcatggtcttcaaagatgtaaatacaagagaaccaaagttattccgggcagttccagattcagaacgtgttattcctcccagaacgacaacgccatatttcctttgaggccttcgcccatcctgctgacccatttttctgccctcttcttaccccaattttcttgtattaccctctacaatatactttttattgagcactttgctgctgaaatgctgcctcttgcctttttttttttaaattttaaattatctaaatttattgtttgttgtggtgtctatagcaaagtttttctatcaattttcccccatcccatccccaccctggactcatttgagaagacttgagaaatgtcttaatactcacactgctgcatgtagctcttgcttatttactggtctgggaaacaggatgtgtttcctttttttaaaagccaattgacagattacacctaaatactcctccttttgtatcattcagccttttgttttagtttggtaagttttaagaaatttcagcagcaaagttgttattcagtgggcacgatggactccaaatgcctcaagttatgtatacctgtcccagatgtaaacttcattgtcctttgttggatgatattttaaatggatataaaataaattggtctaaagggctgcc

SEQ ID NO: 6397 - protein, 305 aa, Homo sapiens; identical to SEQ ID NO: 869

SEQ ID NO: 6398 - DNA, 868 bp, Homo sapiens
cgccgccgctgctacagccgccgccgccgctgttgccgcggcttgttattcttaaaatggcgccgctagacctggacaagtatgtggaaatagcgcggctgtgcaagtacctgccagagaacgacctgaagcggctatgtgactacgtttgtgacctcctcttagaagagtcaaatgttcagccagtatcaacaccagtaacagtgtgtggagatatccatggacagatgagtgccaaaccaaatatggaaatgctaatgcctggagatactgtaccaaagtttttgacatgctcacagtagcagctttaatagatgagcagattttgtgtgtccatggtggtttatctcctgatatcaaaacactggatcaaattcgaaccatcgaacggaatcaggaaattcctcataaaggagcattttgtgatctggtttggtcagatcctgaagatgtggatacctgggctatcagtccccgaggagcaggttggctttttggagcaaaggtcacaaatgagtttgttcatatcaacaacttaaaactcatctgcagagcacatcaactagtgcacgaaggctataaatttatgtttgatgagaagctggtgacagtatggtctgctcctaattactgctatcgttgtggaaatattgcttcgatcatggtcttcaaagatgtaaatacaagagaaccaaagttattccgggcagttccagattcagaacgtgttattcctcccagaacgacaacgccatatttcctttgaggccttcgcccatcctgctgacccatttttctgccctcttcttaccccaattttcttgtattaccctctacaatatactttttattgagcactttgctgctg

SEQ ID NO: 6399 - protein, 158 aa, Homo sapiens; identical to SEQ ID NO: 6375

SEQ ID NO: 6400 - DNA, 1063 bp, Homo sapiens
tcacgggccggacgtgacgcagggaaagttccggcttcggcctccgccgctgccgccgccgctgctacagccgccgccgccgctgttgccgcggcttgttattcttaaaatggcgccgctagacctggacaagtatgtggaaatagcgcggctgtgcaagtacctgccagagaacgacctgaagcggctatgtgactacgtttgtgacctcctcttagaagagtcaaatgttcagccagtatcaacaccagtaacagtgtgtggagatatccatggacagggtgattttgtagacagaggttactatagtttggagaccttcacttaccttcttgcattaaaggctaaatggcctgatcgtattacacttttgcgaggaaatcatgagagtagacagataacacaggtctatggattttatgatgagtgccaaaccaaatatggaaatgctaatgcctggagatactgtaccaaagtttttgacatgctcacagtagcagctttaatagatgagcagattttgtgtgtccatggtggtttatctcctgatatcaaaacactggatcaaattcgaaccatcgaacggaatcaggaaattcctcataaaggagcattttgtgatctggtttggtcagatcctgaagatgtggatacctgggctatcagtccccgaggagcaggttggctttttggagcaaaggtcacaaatgagtttgttcatatcaacaacttaaaactcatctgcagagcacatcaactagtgcacgaaggctataaatttatgtttgatgagaagctggtgacagtatggtctgctcctaattactgctatcgttgtggaaatattgcttcgatcatggtcttcaaagatgtaaatacaagagaaccaaagttattccgggcagttccagattcagaacgtgttattcctcccagaacgacaacgccatatttcctttgaggccttcgcccatcctgctgacccatttttctgccctcttcttaccccaattttcttgtattaccctctacaatatactttttattgagcactttgctgctg

SEQ ID NO: 6401 - protein, 283 aa, Homo sapiens; identical to SEQ ID NO: 6377

SEQ ID NO: 6402 - DNA, 1241 bp, Homo sapiens
gaagcgggctctcttggggcctgcagtcggggttcagccagagggggcgccgggcgtaccgacgtagcggggagaaacgggtcgcgctttaacggcgctgcgcaggcgccactcacgggccggacgtgacgcagggaaagttccggcttcggcctccgccgctgccgccgccgctgctacagccgccgccgccgctgttgccgcggcttgttattcttaaaatggcgccgctagacctggacaagtatgtggaaatagcgcggctgtgcaagtacctgccagagaacgacctgaagcggctatgtgactacgtttgtgacctcctcttagaagagtcaaatgttcagccagtatcaacaccagtaacagtgtgtggagatatccatggacagttttatgacctttgtgaactgttcagaactggaggtcaggttcctgacacaaactacatatttatgggtgattttgtagacagaggttactatagtttggagaccttcacttaccttcttgcattaaaggctaaatggcctgatcgtattacacttttgcgaggaaatcatgagagtagacagataacacaggtctatggattttatgatgagtgccaaaccaaatatggaaatgctaatgcctggagatactgtaccaaagtttttgacatgctcacagtagcagctttaatagatgagcagattttgtgtgtccatggtggtttatctcctgatatcaaaacactggatcaaattcgaaccatcgaacggaatcaggaaattcctcataaaggagcattttgtgatctggtttggtcagatcctgaagatgtggatacctgggctatcagtccccgaggagcaggttggctttttggagcaaaggtcacaaatgagtttgttcatatcaacaacttaaaactcatctgcagagcacatcaactagtgcacgaaggctataaatttatgtttgatgagaagctggtgacagtatggtctgctcctaattactgctatcgttgtggaaatattgcttcgatcatggtcttcaaagatgtaaatacaagagaaccaaagttattccgggcagttccagattcagaacgtgttattcctcccagaacgacaacgccatatttcctttgaggccttcgcccatcctgctgacccatttttctgccctcttcttaccccaattttcttgtattaccctctacaatatactttttattgagcactttgctgctg

SEQ ID NO: 6403 - protein, 305 aa, Homo sapiens; identical to SEQ ID NO: 869

SEQ ID NO: 6404 - DNA, 1846 bp, Homo sapiens
gtagcaatggggcaggatggataatcctctcactgaggggatggtgaataactggaaacagtgaccaatctgctgccgttcaccatcttggttgcaaatatcactcccgtctcttgcatgggcgtggtggattggagatggctgcagattcttagtcattactctcagcaagacctggagtcttttcctcctccccttggatctgggctgactccaggactggctttcatcaacaggatgcagcagaagcgacgctgtgtgacttccgaggctgaggctgcagagatttgaggcatctgctctcacccagcttgaagtgcttcctcttggaagccagccaccgtgaaaaaccccgccatgctgtgaggaagcccaagagagctgcatggagagaagggcctgtggaagagccctgaggtgccactcacatgaagtgaacctttgtggaccttccagcccagctaccagcaaaacgcaagcagcgagtctccaggcccagcctgcttttaacaagacagtgaagagtggcagttaaaggtctggctggcatcagacagtgctgaattcaaacaccagctgagctgaaaacggcctgactgggtgaccttgagcaagcagcctgccctctctgaggctcagtttattttctggaagggagaagacggtgtctacttccaatgaccgccatgatgtttcaggttcagcccgaagggtgagcagccaataaagagtgccgagaacggcctctggcctgccaggtagagaaatgacctgattccttccagaagtttccagtgttcccaagctgatgaggctcctgggagatgcctccagatctcttaacgttcagggaagcatgggctctggttgcattagggaggatttattttatttttaaaggagttgaggccactttgcaatcagagccttcgtggctggagctgggcgagctgaggaaggagtattaatcaaggcgctttaaggacatgcaaatcaggagaaagctcaagtgattagggtgtgatggggcctggagtccagcctatatccccatctgagaagagagagccagagtgccaggcaaggtggctcaggcccagctgggggcggcagccaaggggctgccatggggccaggaactgtgggttgggagcaattggaggcagagggaagggagccactccaaggtggctgaagggtccctgatgcctgcgctgtccacatggtactctggctggcttccccgcctcccccacagctgcagaggggctgctctggcatgatcccctgcctggctgggacaggcccctcttcctaaggatacagaatggttatttgggtgagaggggcccaccggcgctgctgggggcgggatggcgaatgtgacgtcagcgatctgcggtatcttcagggtgacagccgtaccccccgcgtgggacccagggctccacatctatagacctgacccaaggaaagactcaggcctgtgcacaaggatgccatctcggggactgcgtattcataagaagctgaatcaaacagtgtccaacaaggggggttgttcgagctggttatgggacgtgtttaccacggacgttcaggtcctcctgagaaatgacgacctagacatgggaagatggttgcaatgtattgttccgcaaaggagaaaaaaagcaggttgcaaaaccctgggaactgtctgcccaccttcaaaaagtcggtcatatatctagaaaaatctggaagggtagccacaaaaacatcatcagtaggtactttggagaggttattgttactttccccttttatgttaatttttgtgcaataaacatatatgtatttgtaa

SEQ ID NO: 6405 - protein, 49 aa, Homo sapiens
MERRACGRALRCHSHEVNLCGPSSPATSKTQAASLQAQPAFNKTVKSGS

SEQ ID NO: 6406 - DNA, 575 bp, Homo sapiens
cacttcccacagcaagggctgatgatagatccaggactcaagtgcagctggggcgggcgctgggaggactgggcactgaggccccaggtgaattgggaaacggaggctccgaggtgccagagcttgcaaaccgatggaggttggccagacttcatgagccacactctgaatattccctttgaggcacaaacaacagaatcaagaaggaggccacgcgcggaggctcacacctgtcatcccagcactttgggagccgagcttcctttgcagctggtggtgagcatgggacccagctctggccaatgagatgaaggcagatgatcccgaggatagtttcccttcctgaattaaaaggcaaagattccaagaaaaatatacttgcctggaatgtggacgtgatggctggaggtggagcaggcatcttatgactatgaggacaaaagccagacaccaaggtggcaaggaggaagccaaggatacctggatctttgggaactcttgtatcaaggctgccacaaccccagaccacctccctcaacacattccacacacagaaagaaacttttcatttgttt

SEQ ID NO: 6407 - protein, 94 aa, Homo sapiens [sequence omitted]

SEQ ID NO: 6408 - DNA, 1565 bp, Homo sapiens
gccggcgctccccctcgttccctgcgcagctcgcgggtcgggcgttggcggggagggggaggccagaggcttttcaaggcgctgggggctccggccggcccggtgggggcctccccccgccagagtcaggggtgtcgggcgattccggggtgggggcccgagtctggtccagcggggctctgggtggcagaggggggaaggttaagcggggctgctggcttggggaatttggggccgtccgcggggctctcctcgggctccaagctttcaccccagaaaacagccctgaaccccaaatttgctccagccccagggggccctacctgcccttcctggcttccccagtggaaatctaaggtactggaggcttccaggggagccagggcacccctaggacaaccccctctctctgcagatggggaaactgaggcctggaaacagagaacggtgggaccaaggtcacatgatggcggaaggaggacaaggaaggaggctgactgcgtatccagcacgtgttccgtgccaagcctgtgcaggggccaaggaccggggtctctggacagcgccggttgctgggtcccacgctgggcgacagggcctttgcaatcaggccgacagggtttgaacccttgccgcggcactttccagatggccttggccactgtcccctctctgaccttcagatggagcccatggcacctccggagggggtgtgtgcttccaggaccaaatccacttgtgcgtggttaggcacgaggtggggggaggcggctcagccaccgggacctgtcctgcctccaccctctgtgcaacccctttccttgccttttgtctctgttgcttttggggggtgattagccgctagctcagcggctagaggattctctcccggaaaaggctccggagttgaggcccagacccccagggcaagacggaatctgctccccagggcactaactgagactcggttccctcactggtaaaatgagaaaactcacttatggtcaggggtccccgagttaatgccagtgaattccttggcagagcatcaagcacttggagaagcccccacccccggtcattgtgatgatggtttgtttgtttgtttgtttgttttgagacggagtctcgctctgtcgcccaggctggagtgcagtggcgcgatctcggctcactgcaagctctgcctcccgggttcacgccattcaggggagtggcgccgagacaccgtgtagcgcccatgccaaggaggaagcgagacagcaggagcggaggaaagaaccccgggctgtgttgaggaagcctcctacttttgcctgaagtgaggttgttgttgttgttgttgttgttttttccacgtgccttattcatccacgtaacctcagcctctagtgcagcgtcctattttttggcttgtattattatttttaattggcacataataattgtacatatttatgggatgcagtgtaatattttagtacacatatacaatgtgtattggtcaaatcagggtaattagcacattcagggttggagtttttctgtcaatacagatacttata

SEQ ID NO: 6409 - protein, 70 aa, Homo sapiens
MPVNSLAEHQALGEAPTPGHCDDGLFVCLFVLRRSLALSPRLECSGAISAHCKLCLPGSRHSGEWRRDTV

SEQ ID NO: 6410 - DNA, 1427 bp, Homo sapiens
gccggcgctccccctcgttccctgcgcagctcgcgggtcgggcgttggcggggagggggaggccagaggcttttcaaggcgctgggggctccggccggcccggtgggggcctccccccgccagagtcaggggtgtcgggcgattccggggtgggggcccgagtctggtccagcggggctctgggtggcagaggggggaaggttaagcggggctgctggcttggggaatttggggccgtccgcggggctctcctcgggctccaagctttcaccccagaaaacagccctgaaccccaaatttgctccagccccagggggccctacctgcccttcctggcttccccagtggaaatctaaggtactggaggcttccaggggagccagggcacccctaggacaaccccctctctctgcagatggggaaactgaggcctggaaacagagaacggtgggaccaaggtcacatgatggcggaaggaggacaaggaaggaggctgactgcgtatccagcacgtgttccgtgccaagcctgtgcaggggccaaggaccggggtctctggacagcgccggttgctgggtcccacgctgggcgacagggcctttgcaatcaggccgacagggtttgaacccttgccgcggcactttccagatggccttggccactgtcccctctctgaccttcagatggagcccatggcacctccggagggggtgtgtgcttccaggaccaaatccacttgtgcgtggttaggcacgaggtggggggaggcggctcagccaccgggacctgtcctgcctccaccctctgtgcaacccctttccttgccttttgtctctgttgcttttggggggtgattagccgctagctcagcggctagaggattctctcccggaaaaggctccggagttgaggcccagacccccagggcaagacggaatctgctccccagggcactaactgagactcggttccctcactggtaaaatgagaaaactcacttatggtcaggggtccccgagttaatgccagtgaattccttggcagagcatcaagcacttggagaagcccccacccccggtcattgtgatgatggtttgtttgtttgtttgtttgttttgagacggagtctcgctctgtcgcccaggctggagtgcagtggcgcgatctcggctcactgcaagctctgcctcccgggttcacgccattcaggggagtggcgccgagacaccgtgtagcgcccatgccaaggaggaagcgagacagcaggagcggaggaaagaaccccgggctgtgttgaggaagcctcctacttttgcctgaagtgagccacccaggactttgtgaccacagccctagcaaacgaatacgccgcatttcacagggccctacagacaggagatgggatctaagggaattaacctacttgc

SEQ ID NO: 6411 - protein, 70 aa, Homo sapiens; identical to SEQ ID NO: 6409

SEQ ID NO: 6412 - DNA, 459 bp, Homo sapiens
gaccctgcgctctgccccgagggacccaccagccaggatgcagcagaagcgacgctgtgtgacttccgaggctgaggctgcagagatttgaggcatctgctctcacccagcttgaagtgcttcctcttggaagccagccaccgtgaaaaaccccgccatgctgtgaggaagcccaagagagctgcatggagagaagggcctgtggaagagccctgaggtgccactcacatgaagtgaacctttgtggaccttccagcccagctaccagcaaaacgcaagcagcgagtgtccccagtcaacgcttctctctataggagacctgtaaatggggtggcggggggagcaggaggaattttctgatctcacacactgttatgagttgaattgtctccccacccaaattcatatgttgaagcccccaccttcagtactttacaaagtaatgtatttggagataat

SEQ ID NO: 6413 - protein, 43 aa, Homo sapiens
MGWRGEQEEFSDLTHCYELNCLPTQIHMLKPPPSVLYKVMYLE

SEQ ID NO: 6414 - DNA, 1386 bp, Homo sapiens
ccggtgcctggggtctctggagggggtactcagagtatccgaggaggagactcctggatgctaacagagcccccagttaggagcagtccgcgagacagttggtaacagtgctggccttgcccgggcgccggaaggttccgtgaggcccagcaagtcctgacttggcacagggcccagcacacggcgcagtaacaatataattaccgtatgcagtcccccaggatacagggtcaaaggagagcacaaccatcgcagttggaagcccatggggcagggcccaggacacagtgagcatacaatagacattagctgctgtggtgtcttgatttcaagcccagtgcagatgcatctgacttacgaaacttcagtgacacctgctctgtgccagacactgaagatggagcagtgaacagcactgacccagcctgtcctcctgttgcctgcaggccagaagcaaggtctcgctgtgttaccctggctggagtgcagtggctacttacaggcatgatcatagcatactgcagcctcgaactcctggactagagcagttctcctgcctcagcctccagagcagctgggactgcagacacgcaccacagagcccagcctgagtcattttgattctgtaactggcttcctctcggcgggcaggctcacaccctccacccccagctggagatggaaggaggatgctcaccgcccattcctcatgcaggccatcgatggaaatgtcagacagtgcgagtccacgcctgaacacttctggggtccgctctgggactgacactggcagatccatcggtgagctcccgcctgccacctctgggcctgcattgcggtgatagggccaagggcctgggccttcaattctccagacttgccaaaatgctcagcgcaggcctcgtcggcaactgcagacaagcagaggcagcacctgggctctgcctgtgcctggcacagtgaagcgagggtgggggcaggaatgagggtcctctccatgcaaggggggaagatagaagaacaaaatttcaccctaatgtagtgtctttagaccgtgcaatgttgtgctcctgttagtctgatatcaggggcttgcagcctggcaaaggaaaaaaaacaggctgaggcacatgatagaagacaggcagggatgccacaatcataaccatggcaaagaccaggatcagaaaggcccaccatctctgaccccaaatccctgggcagatggttccagaactcagaattttcccagttgtagaaagatggggccaggtgcagtggctcacgcctgtaatcccagcattttgggagtacaaggtgggcggatcacctgaggtcaggagttcgagaccagcctggccaacatggtgaaaccctgtctctact

SEQ ID NO: 6415 - protein, 47 aa, Homo sapiens
MGQGPGHSEHTIDISCCGVLISSPVQMHLTYETSVTPALCQTLKMEQ

SEQ ID NO: 6416 - DNA, 1561 bp, Homo sapiens
ccggtgcctggggtctctggagggggtactcagagtatccgaggaggagactcctggatgctaacagagcccccagttaggagcagtccgcgagacagttggtaacagtgctggccttgcccgggcgccggaaggttccgtgaggcccagcaagtcctgacttggcacagggcccagcacacggcgcagtaacaatataattaccgtatgcagtcccccaggatacagggtcaaaggagagcacaaccatcgcagttggaagcccatggggcagggcccaggacacagtgagcatacaatagacattagctgctgtggtgtcttgatttcaagcccagtgcagatgcatctgacttacgaaacttcagtgacacctgctctgtgccagacactgaagatggagcagtgaacagcactgacccagcctgtcctcctgttgcctgcaggccagaagcaaggtctcgctgtgttaccctggctggagtgcagtggctacttacaggcatgatcatagcatactgcagcctcgaactcctggactagagcagttctcctgcctcagcctccagagcagctgggactgcagacacgcaccacagagcccagcctgagtcattttgattctgtaactggcttcctctcggcgggcaggctcacaccctccacccccagctggagatggaaggaggatgctcaccgcccattcctcatgcaggccatcgatggaaatgtcagacagtgcgagtccacgcctgaacacttctggggtccgctctgggactgacactggcagatccatcggtgagctcccgcctgccacctctgggcctgcattgcggtgatagggccaagggcctgggccttcaattctccagacttgccaaaatgctcagcgcaggcctcgtcggcaactgcagacaagcagaggcagcacctgggctctgcctgtgcctggcacagtgaagcgagggtgggggcaggaatgagggtcctctccatgcaaggggggaagatagaagaacaaaatttcaccctaatgtagtgtctttagaccgtgcaatgttgtgctcctgttagtctgatatcaggggcttgcagcctggcaaaggaaaaaaaacaggctgaggcacatgatagaagacaggcagggatgccacaatcataaccatggcaaagaccaggatcagaaaggcccaccatctctgaccccaaatccctgggcagatggttccagaactcagaattttcccagttgtagaaagatggggccaggtgcagtggctcacgcctgtaatcccagcattttgggagtacaaggtgggcggatcacctgaggtcaggagttcgagaccagcctggccaacatggtgaaaccctgtctctactaaaaaaaaaaaaaaaaattagccgggcgtggcgatgcatgcctgtaatcccagctactcgggaggctgagccaggagaattgcttgaacccgggaggcggaggttgcagtgagccaagatcgcgccactacactccagtccgggcgacagagcaagagtccattcccccaccacc

SEQ ID NO: 6417 - protein, 47 aa, Homo sapiens; identical to SEQ ID NO: 6415

SEQ ID NO: 6418 - DNA, 2117 bp, Homo sapiens
ccggcccgtctcggggccctgagtcatcgccgcccccggccccgacgctggcctgcggcgtctgtttgtgcagagcgaggccccgccggccgggcttgacgtcaggctggcagggcctggaacggccccgcatcgcggccccctgggggcaggacgacaccgctgggggccgagggcagggcacgccttcggaatccggcttcgaagccggccgcctgacctggggcaagtgctttcaactctctgaacttcggttcctcatctgccagttggcagacgctcagcaaatcttcctagactcacggggcgaattgtacagttgggtaaatcgaggcccagagatggcaaaaggaccgtccaaggtcgtacagccacccggaattacaattcttttctgccgggtcacacgctgtcatccacgtgttacctaagagagctttccagcctgtgctaagaaaactgccccacatcatctgcagtaggacgggggagttggagccctggtcaggccactctgctactgaccacagttttctcatctctaaaaaggcgcagtaacaatataattaccgtatgcagtcccccaggatacagggtcaaaggagagcacaaccatcgcagttggaagcccatggggcagcccagtgcagatgcatctgacttacgaaacttcagtgacacctgctctgtgccagacactgaagatggagcagtgaacagcactgacccagcctgtcctcctgttgcctgcaggccagacggagtctcactctgtcaccaggctggagtacagtggtgtgatctcggctcactgcaacctccgcctcccaggttcaagcgattctcctgcctcagcctctcaagtagctgagattacagacgtgtgtcaccatgccctgttaatttttgtttgtttgttttgttttttgttttgttttgtttcgttttttgttttttttttttgagacggagtcttgctctgtcgcccaggctggagtgcagtggccccgatctcggctcaccgcaagctccgcctcgcgggttcatgccattctccggcctcagcctcccgagtagctgggactacaggcatccgccaccacacccagctaattttttgtattttttttagtagagacggggtttcactgtgttagccaggatggtctcgatcccctgaccttgtgatccacccaaggcctcggcctcccaaagtgctgggattacaggcatgagccaccgtgcccggtcaatttttatattttttgtagagacagggtttcaccatgttggccaggctggtgtcgaactcccgacctcaggtgattgtcggccttggcctcccaaagtgctgggattacaggcgtgagccaccgcgcccagccggtgggcagccagttgtgttccgggaggaggaggacaccctggaaagacagtggggccagacactgaactgcctttggaagcaagtaggagcaacagcgaaggtttgctggctcagaagcaaggtctcgctgtgttaccctggctggagtgcagtggctacttacaggcatgatcatagcatactgcagcctcgaactcctggactagagcagttctcctgcctcagcctccagagcagctgggactgcagacacgcaccacagagcccagcctgagtcattttgattctgtaactggcttcctctcggcgggcaggctcacaccctccacccccagctggagatggaaggaggatgctcaccgcccattcctcatgcaggccatcgatggaaatgtcagacagtgcgagtccacgcctgaacacttctggggtccgctctgggactgacactggcagatccatcgatgccgttccattgtttgctgactttcattgattctatgagaagtctgcagtcttttgcagcgttgttttcctatgtataattgtctcctcccaccccactcaccccagctgctttccacattctctctctttgattttcagcagtctgcccatgatgtgcctaaataggactttctttgcattcatcttggctggggctcactgaactttctgaatctgtagattaattttcttttttcaataaaccttggaatattttcagcat

SEQ ID NO: 6419 - protein, 124 aa, Homo sapiens
MLARLVSNSRPQVIVGLGLPKCWDYRREPPRPAGGQPVVFREEEDTLERQWGQTLNCLWKQVGATAKVCWLRSKVSLCYPGWSAVATYRHDHSILQPRTPGLEQFSCLSLQSSWDCRHAPQSPA

SEQ ID NO: 6420 - DNA, 711 bp, Homo sapiens
ccctgagtcatcgccgcccccggccccgacgctggcctgcggcgtctgtttgtgcagagcgaggccccgccggccgggcttgacgtcaggctggcagggcctggaacggccccgcatcgcggccccctgggggcaggacgacaccgctgggggccgagggcagggcacgccttcggaatccggcttcgaagccggccgcctgacctggggcaagtgctttcaactctctgaacttcggttcctcatctgccagttggcagacgctcagcaaatcttcctagactcacggggcgaattgtacagttgggtaaatcgaggcccagagatggcaaaaggaccgtccaaggtcgtacagccacccggaattacaattcttttctgccgggtcacacgctgtcatccacgtgttacctaagagagctttccagcctgtgctaagaaaactgccccacatcatctgcagtaggacgggggagttggagccctggtcaggccactctgctactgaccacagttttctcatctctaaaaaggcgcagtaacaatataattaccgtatgcagtcccccaggatacagggtcaaaggagagcacaaccatcgcagttggaagcccatggggcagacggagtctcactctgtcaccaggctggagtacagtggtgtgatctcggctcactgcaacctccgcctcccaggttcaagcgattct

SEQ ID NO: 6421 - protein, 50 aa, Homo sapiens
MQSPRIQGQRRAQPSQLEAHGADGVSLCHQAGVQWCDLGSLQPPPPRFKR

SEQ ID NO: 6422 - DNA, 1220 bp, Homo sapiens
ccctgagtcatcgccgcccccggccccgacgctggcctgcggcgtctgtttgtgcagagcgaggccccgccggccgggcttgacgtcaggctggcagggcctggaacggccccgcatcgcggccccctgggggcaggacgacaccgctgggggccgagggcagggcacgccttcggaatccggcttcgaagccggccgcctgacctggggcaagtgctttcaactctctgaacttcggttcctcatctgccagttggcagacgctcagcaaatcttcctagactcacggggcgaattgtacagttgggtaaatcgaggcccagagatggcaaaaggaccgtccaaggtcgtacagccacccggaattacaattcttttctgccgggtcacacgctgtcatccacgtgttacctaagagagctttccagcctgtgctaagaaaactgccccacatcatctgcagtaggacgggggagttggagccctggtcaggccactctgctactgaccacagttttctcatctctaaaaaggcgcagtaacaatataattaccgtatgcagtcccccaggatacagggtcaaaggagagcacaaccatcgcagttggaagcccatggggcagggcccaggacacagtgagcatacaatagacattagctgctgtggtgtcttgatttcaagcccagtgcagatgcatctgacttacgaaacttcagtgacacctgctctgtgccagacactgaagatggagcagtgaacagcactgacccagcctgtcctcctgttgcctgcaggccagacggagtctcactctgtcaccaggctggagtacagtggtgtgatctcggctcactgcaacctccgcctcccaggttcaagcgattctcctgcctcagcctctcaagtagctgagattacagacgtgtgtcaccatgccctgttaatttttgtttgtttgttttgttttttgttttgttttgtttcgttttttgttttttttttttgagacggagtcttgctctgtcgcccaggctggagtgcagtggccccgatctcggctcaccgcaagctccgcctcgcgggttcatgccattctccggcctcagcctcccgagtagctgggactacaggcatccgccaccacacccagctaattttttgtattttttttagtagagacggggtttcactgtgttagccaggatggtctcgatcccc

SEQ ID NO: 6423 - protein, 47 aa, Homo sapiens; identical to SEQ ID NO: 6415

SEQ ID NO: 6424 - DNA, 1407 bp, Homo sapiens
ccctgagtcatcgccgcccccggccccgacgctggcctgcggcgtctgtttgtgcagagcgaggccccgccggccgggcttgacgtcaggctggcagggcctggaacggccccgcatcgcggccccctgggggcaggacgacaccgctgggggccgagggcagggcacgccttcggaatccggcttcgaagccggccgcctgacctggggcaagtgctttcaactctctgaacttcggttcctcatctgccagttggcagacgctcagcaaatcttcctagactcacggggcgaattgtacagttgggtaaatcgaggcccagagatggcaaaaggaccgtccaaggtcgtacagccacccggaattacaattcttttctgccgggtcacacgctgtcatccacgtgttacctaagagagctttccagcctgtgctaagaaaactgccccacatcatctgcagtaggacgggggagttggagccctggtcaggccactctgctactgaccacagttttctcatctctaaaaaggcgcagtaacaatataattaccgtatgcagtcccccaggatacagggtcaaaggagagcacaaccatcgcagttggaagcccatggggcagggcccaggacacagtgagcatacaatagacattagctgctgtggtgtcttgatttcaagcccagtgcagatgcatctgacttacgaaacttcagtgacacctgctctgtgccagacactgaagatggagcagtgaacagcactgacccagcctgtcctcctgttgcctgcaggccagaagcaaggtctcgctgtgttaccctggctggagtgcagtggctacttacaggcatgatcatagcatactgcagcctcgaactcctggactagagcagttctcctgcctcagcctccagagcagctgggactgcagacacgcaccacagagcccagcctgagtcattttgattctgtaactggcttcctctcggcgggcaggctcacaccctccacccccagctggagatggaaggaggatgctcaccgcccattcctcatgcaggccatcgatggaaatgtcagacagtgcgagtccacgcctgaacacttctggggtccgctctgggactgacactggcagatccatcggtgagctcccgcctgccacctctgggcctgcattgcggtgatagggccaagggcctgggccttcaattctccagacttgccaaaatgctcagcgcaggcctcgtcggcaactgcagacaagcagaggcagcacctgggctctgcctgtgcctggcacagtgaagcgagggtgggggcaggaatgagggtcctctccatgcaaggggggaagatagaagaacaaaatttcaccctaatgtagtgtctttagaccgtg

SEQ ID NO: 6425 - protein, 47 aa, Homo sapiens; identical to SEQ ID NO: 6415

SEQ ID NO: 6426 - DNA, 1230 bp, Homo sapiens
ccctgagtcatcgccgcccccggccccgacgctggcctgcggcgtctgtttgtgcagagcgaggccccgccggccgggcttgacgtcaggctggcagggcctggaacggccccgcatcgcggccccctgggggcaggacgacaccgctgggggccgagggcagggcacgccttcggaatccggcttcgaagccggccgcctgacctggggcaagtgctttcaactctctgaacttcggttcctcatctgccagttggcagacgctcagcaaatcttcctagactcacggggcgaattgtacagttgggtaaatcgaggcccagagatggcaaaaggaccgtccaaggtcgtacagccacccggaattacaattcttttctgccgggtcacacgctgtcatccacgtgttacctaagagagctttccagcctgtgctaagaaaactgccccacatcatctgcagtaggacgggggagttggagccctggtcaggccactctgctactgaccacagttttctcatctctaaaaaggcgcagtaacaatataattaccgtatgcagtcccccaggatacagggtcaaaggagagcacaaccatcgcagttggaagcccatggggcagaagcaaggtctcgctgtgttaccctggctggagtgcagtggctacttacaggcatgatcatagcatactgcagcctcgaactcctggactagagcagttctcctgcctcagcctccagagcagctgggactgcagacacgcaccacagagcccagcctgagtcattttgattctgtaactggcttcctctcggcgggcaggctcacaccctccacccccagctggagatggaaggaggatgctcaccgcccattcctcatgcaggccatcgatggaaatgtcagacagtgcgagtccacgcctgaacacttctggggtccgctctgggactgacactggcagatccatcggtgagctcccgcctgccacctctgggcctgcattgcggtgatagggccaagggcctgggccttcaattctccagacttgccaaaatgctcagcgcaggcctcgtcggcaactgcagacaagcagaggcagcacctgggctctgcctgtgcctggcacagtgaagcgagggtgggggcaggaatgagggtcctctccatgcaaggggggaagatagaagaacaaaatttcaccctaatgtagtgtctttagaccgtg

SEQ ID NO: 6427 - protein, 52 aa, Homo sapiens
MQSPRIQGQRRAQPSQLEAHGAEARSRCVTLAGVQWLLTGMIIAYCSLELLD

SEQ ID NO: 6428 - DNA, 1736 bp, Homo sapiens
ccctgagtcatcgccgcccccggccccgacgctggcctgcggcgtctgtttgtgcagagcgaggccccgccggccgggcttgacgtcaggctggcagggcctggaacggccccgcatcgcggccccctgggggcaggacgacaccgctgggggccgagggcagggcacgccttcggaatccggcttcgaagccggccgcctgacctggggcaagtgctttcaactctctgaacttcggttcctcatctgccagttggcagacgctcagcaaatcttcctagactcacggggcgaattgtacagttgggtaaatcgaggcccagagatggcaaaaggaccgtccaaggtcgtacagccacccggaattacaattcttttctgccgggtcacacgctgtcatccacgtgttacctaagagagctttccagcctgtgctaagaaaactgccccacatcatctgcagtaggacgggggagttggagccctggtcaggccactctgctactgaccacagttttctcatctctaaaaaggcgcagtaacaatataattaccgtatgcagtcccccaggatacagggtcaaaggagagcacaaccatcgcagttggaagcccatggggcagggcccaggacacagtgagcatacaatagacattagctgctgtggtgtcttgatttcaagcccagtgcagatgcatctgacttacgaaacttcagtgacacctgctctgtgccagacactgaagatggagcagtgaacagcactgacccagcctgtcctcctgttgcctgcaggccagaagcaaggtctcgctgtgttaccctggctggagtgcagtggctacttacaggcatgatcatagcatactgcagcctcgaactcctggactagagcagttctcctgcctcagcctccagagcagctgggactgcagacacgcaccacagagcccagcctgagtcattttgattctgtaactggcttcctctcggcgggcaggctcacaccctccacccccagctggagatggaaggaggatgctcaccgcccattcctcatgcaggccatcgatggaaatgtcagacagtgcgagtccacgcctgaacacttctggggtccgctctgggactgacactggcagatccatcggtgagctcccgcctgccacctctgggcctgcattgcggtgatagggccaagggcctgggccttcaattctccagacttgccaaaatgctcagcgcaggcctcgtcggcaactgcagacaagcagaggcagcacctgggctctgcctgtgcctggcacagtgaagcgagggtgggggcaggaatgagggtcctctccatgcaaggggggaagatagaagaacaaaatttcaccctaatgtagtgtctttagaccgtgcaatgttgtgctcctgttagtctgatatcaggggcttgcagcctggcaaaggaaaaaaaacaggctgaggcacatgatagaagacaggcagggatgccacaatcataaccatggcaaagaccaggatcagaaaggcccaccatctctgaccccaaatccctgggcagatggttccagaactcagaattttcccagttgtagaaagatggggccaggtgcagtggctcacgcctgtaatcccagcattttgggagtacaaggtgggcggatcacctgaggtcaggagttcgagaccagcctggccaacatggtgaaaccctgtctctact

SEQ ID NO: 6429 - protein, 47 aa, Homo sapiens; identical to SEQ ID NO: 6415

SEQ ID NO: 6430 - DNA, 1559 bp, Homo sapiens
ccctgagtcatcgccgcccccggccccgacgctggcctgcggcgtctgtttgtgcagagcgaggccccgccggccgggcttgacgtcaggctggcagggcctggaacggccccgcatcgcggccccctgggggcaggacgacaccgctgggggccgagggcagggcacgccttcggaatccggcttcgaagccggccgcctgacctggggcaagtgctttcaactctctgaacttcggttcctcatctgccagttggcagacgctcagcaaatcttcctagactcacggggcgaattgtacagttgggtaaatcgaggcccagagatggcaaaaggaccgtccaaggtcgtacagccacccggaattacaattcttttctgccgggtcacacgctgtcatccacgtgttacctaagagagctttccagcctgtgctaagaaaactgccccacatcatctgcagtaggacgggggagttggagccctggtcaggccactctgctactgaccacagttttctcatctctaaaaaggcgcagtaacaatataattaccgtatgcagtcccccaggatacagggtcaaaggagagcacaaccatcgcagttggaagcccatggggcagaagcaaggtctcgctgtgttaccctggctggagtgcagtggctacttacaggcatgatcatagcatactgcagcctcgaactcctggactagagcagttctcctgcctcagcctccagagcagctgggactgcagacacgcaccacagagcccagcctgagtcattttgattctgtaactggcttcctctcggcgggcaggctcacaccctccacccccagctggagatggaaggaggatgctcaccgcccattcctcatgcaggccatcgatggaaatgtcagacagtgcgagtccacgcctgaacacttctggggtccgctctgggactgacactggcagatccatcggtgagctcccgcctgccacctctgggcctgcattgcggtgatagggccaagggcctgggccttcaattctccagacttgccaaaatgctcagcgcaggcctcgtcggcaactgcagacaagcagaggcagcacctgggctctgcctgtgcctggcacagtgaagcgagggtgggggcaggaatgagggtcctctccatgcaaggggggaagatagaagaacaaaatttcaccctaatgtagtgtctttagaccgtgcaatgttgtgctcctgttagtctgatatcaggggcttgcagcctggcaaaggaaaaaaaacaggctgaggcacatgatagaagacaggcagggatgccacaatcataaccatggcaaagaccaggatcagaaaggcccaccatctctgaccccaaatccctgggcagatggttccagaactcagaattttcccagttgtagaaagatggggccaggtgcagtggctcacgcctgtaatcccagcattttgggagtacaaggtgggcggatcacctgaggtcaggagttcgagaccagcctggccaacatggtgaaaccctgtctctact

SEQ ID NO: 6431 - protein, 52 aa, Homo sapiens; identical to SEQ ID NO: 6427

SEQ ID NO: 6432 - DNA, 1911 bp, Homo sapiens
ccctgagtcatcgccgcccccggccccgacgctggcctgcggcgtctgtttgtgcagagcgaggccccgccggccgggcttgacgtcaggctggcagggcctggaacggccccgcatcgcggccccctgggggcaggacgacaccgctgggggccgagggcagggcacgccttcggaatccggcttcgaagccggccgcctgacctggggcaagtgctttcaactctctgaacttcggttcctcatctgccagttggcagacgctcagcaaatcttcctagactcacggggcgaattgtacagttgggtaaatcgaggcccagagatggcaaaaggaccgtccaaggtcgtacagccacccggaattacaattcttttctgccgggtcacacgctgtcatccacgtgttacctaagagagctttccagcctgtgctaagaaaactgccccacatcatctgcagtaggacgggggagttggagccctggtcaggccactctgctactgaccacagttttctcatctctaaaaaggcgcagtaacaatataattaccgtatgcagtcccccaggatacagggtcaaaggagagcacaaccatcgcagttggaagcccatggggcagggcccaggacacagtgagcatacaatagacattagctgctgtggtgtcttgatttcaagcccagtgcagatgcatctgacttacgaaacttcagtgacacctgctctgtgccagacactgaagatggagcagtgaacagcactgacccagcctgtcctcctgttgcctgcaggccagaagcaaggtctcgctgtgttaccctggctggagtgcagtggctacttacaggcatgatcatagcatactgcagcctcgaactcctggactagagcagttctcctgcctcagcctccagagcagctgggactgcagacacgcaccacagagcccagcctgagtcattttgattctgtaactggcttcctctcggcgggcaggctcacaccctccacccccagctggagatggaaggaggatgctcaccgcccattcctcatgcaggccatcgatggaaatgtcagacagtgcgagtccacgcctgaacacttctggggtccgctctgggactgacactggcagatccatcggtgagctcccgcctgccacctctgggcctgcattgcggtgatagggccaagggcctgggccttcaattctccagacttgccaaaatgctcagcgcaggcctcgtcggcaactgcagacaagcagaggcagcacctgggctctgcctgtgcctggcacagtgaagcgagggtgggggcaggaatgagggtcctctccatgcaaggggggaagatagaagaacaaaatttcaccctaatgtagtgtctttagaccgtgcaatgttgtgctcctgttagtctgatatcaggggcttgcagcctggcaaaggaaaaaaaacaggctgaggcacatgatagaagacaggcagggatgccacaatcataaccatggcaaagaccaggatcagaaaggcccaccatctctgaccccaaatccctgggcagatggttccagaactcagaattttcccagttgtagaaagatggggccaggtgcagtggctcacgcctgtaatcccagcattttgggagtacaaggtgggcggatcacctgaggtcaggagttcgagaccagcctggccaacatggtgaaaccctgtctctactaaaaaaaaaaaaaaaaattagccgggcgtggcgatgcatgcctgtaatcccagctactcgggaggctgagccaggagaattgcttgaacccgggaggcggaggttgcagtgagccaagatcgcgccactacactccagtccgggcgacagagcaagagtccattcccccaccacc

SEQ ID NO: 6433 - protein, 47 aa, Homo sapiens; identical to SEQ ID NO: 6415

SEQ ID NO: 6434 - DNA, 2382 bp, Homo sapiens
ccctgagtcatcgccgcccccggccccgacgctggcctgcggcgtctgtttgtgcagagcgaggccccgccggccgggcttgacgtcaggctggcagggcctggaacggccccgcatcgcggccccctgggggcaggacgacaccgctgggggccgagggcagggcacgccttcggaatccggcttcgaagccggccgcctgacctggggcaagtgctttcaactctctgaacttcggttcctcatctgccagttggcagacgctcagcaaatcttcctagactcacggggcgaattgtacagttgggtaaatcgaggcccagagatggcaaaaggaccgtccaaggtcgtacagccacccggaattacaattcttttctgccgggtcacacgctgtcatccacgtgttacctaagagagctttccagcctgtgctaagaaaactgccccacatcatctgcagtaggacgggggagttggagccctggtcaggccactctgctactgaccacagttttctcatctctaaaaaggcgcagtaacaatataattaccgtatgcagtcccccaggatacagggtcaaaggagagcacaaccatcgcagttggaagcccatggggcagaagcaaggtctcgctgtgttaccctggctggagtgcagtggctacttacaggcatgatcatagcatactgcagcctcgaactcctggactagagcagttctcctgcctcagcctccagagcagctgggactgcagacacgcaccacagagcccagcctgagtcattttgattctgtaactggcttcctctcggcgggcaggctcacaccctccacccccagctggagatggaaggaggatgctcaccgcccattcctcatgcaggccatcgatggaaatgtcagacagtgcgagtccacgcctgaacacttctggggtccgctctgggactgacactggcagatccatcggtgagctcccgcctgccacctctgggcctgcattgcggtgatagggccaagggcctgggccttcaattctccagacttgccaaaatgctcagcgcaggcctcgtcggcaactgcagacaagcagaggcagcacctgggctctgcctgtgcctggcacagtgaagcgagggtgggggcaggaatgagggtcctctccatgcaaggggggaagatagaagaacaaaatttcaccctaatgtagtgtctttagaccgtgcaatgttgtgctcctgttagtctgatatcaggggcttgcagcctggcaaaggaaaaaaaacaggctgaggcacatgatagaagacaggcagggatgccacaatcataaccatggcaaagaccaggatcagaaaggcccaccatctctgaccccaaatccctgggcagatggttccagaactcagaattttcccagttgtagaaagatggggccaggtgcagtggctcacgcctgtaatcccagcattttgggagtacaaggtgggcggatcacctgaggtcaggagttcgagaccagcctggccaacatggtgaaaccctgtctctactaaaaaaaaaaaaaaaaattagccgggcgtggcgatgcatgcctgtaatcccagctactcgggaggctgagccaggagaattgcttgaacccgggaggcggaggttgcagtgagccaagatcgcgccactacactccagtccgggcgacagagcaagagtccattcccccaccaccaaaaaaaaaaaaaaaagaaagaaagatgatgtgatacatatcacatatttcctaacacccccaaccaaacacatttatgcatatgcataaagcagacgaggaaagattctaaataggctctgaatctcagttttctcatctctacaatggggcagtgatggcatgcacctcccagggctgttctgagaatctgatgcctcccattgcactggtgagcctggcacaggcacaggtcccaccccaggccctttgaactggctgttcctttggcctggaacattcctccccagatacctcctgagagggctccctcacttccttcaaggcactgctcaaatgctacctcttcacagaggctttccctgaccaccccgtctctttcctcttcctgcatagcctctgtcacctgacattttatgtcataaattactcatttattaatttcctgctctcccacagtggcacccgagctctgtgagggcaagactttgttcggttgtgggctatgcccccaacccctcggacagtgcctgcacaggtggacatttttgttggatgaaggattttctgttaaatgtgtctggcacacacagaaaaacaaagcccagcaggtacgatggtgattattattgttactggtggcgctct

SEQ ID NO: 6435 - protein, 52 aa, Homo sapiens; identical to SEQ ID NO: 6427

SEQ ID NO: 6436 - DNA, 1968 bp, Homo sapiens
cacccggaattacaattcttttctgccgggtcacacgctgtcatccacgtgttacctaagagagctttccagcctgtgctaagaaaactgccccacatcatctgcagtaggacgggggagtcaaacacatttatgcatatgcataaagcagacgaggaaagattctaaataggctctgaatctcagttttctcatctctacaatggggcagtgatggcatgcacctcccagggctgttctgagaatctgatgcctcccattgcactggtgagcctggcacaggcacaggtcccaccccaggccctttgaactggctgttcctttggcctggaacattcctccccagatacctcctgagagggctccctcacttccttcaaggcactgctcaaatgctacctcttcacagaggctttccctgaccaccccgtctctttcctcttcctgcatagcctctgtcacctgacattttatgtcataaattactcatttattaatttcctgctctcccacagtggcacccgagctctgtgagggcaagactttgttcggttgtgggctatgcccccaacccctcggacagtgcctgcacaggtggacatttttgttggatgaaggattttctgttaaatgtgtctggcacacacagaaaaacaaagcccagcaggtacgatggtgattattattgttactggtggcgctctattattgttattagtgtctgttgaaaaagaccctgagctataccagcccttggttctccagcctgtgaaatgggcatcctgggcactgaggcactagccttgggaagctgatagggggtccctgcaggagagacaaagaacactgcccacccccccgggggagcctgcgcccctcaccggaaagagaagcaggggggagcagagggagcttgcagccccacacgcagggctgccagaaggccatacataattcattgccaaatggggctgcgggcggctctccgcggcgtgcgctgggggctcactctgcgcctggcacttcgctgactgcgcctcacacgttgcctcattgcatcttcatggatttgcagggtgtgacccttccccctgttttacccagggggatcctgaggctcagaggatggggccaccgtgctagtcacacagcctctctgtggccaagctgggcctcgggccagcagattcggcccccagcggcccccattcactgcctctctgctgagggaaaagacgggcctggggagcgggtgggaggcacaaaggagaccccgctctgagacaggctgcagaagagggagctgggtctcagcagggctggggaaggctctggccccagccctccgcccaaccccctgccctcctctcctggaggagatgctccccaaattagccatcatgagcgctggctctgggggttgggcgttggggagcagtttgctcagctgtaaaatgggaataacagaagccgtccctgggactatgagatcaaggtgctcaagaaaagtggtgtctgctgaggggaaaagccagtcccaaaaggttgcatactctcattctgtttatttgtttttgtttttgagacagggtctcgccctgtcacccaggctggagtacagtggcgcaatatgggctcactgcaacctccacctcctgggctcaagtgatcctcccatctcagaccctcaaggagctggggctacaggcacgtgccaccgtgtccggctaatttttgtattttttgtagagacagggtttcaccatgttgcccaggctggtctcaaactcctgagctcaggtgatccgcctgccttggcctgcgataaaattgcacagaagtaaatacacacacgtgaggatacggaaaaccggggaaacctgagcaagagcagtcagaccccggctgtgatggcgcccagtagttctgcgagatgttaccattggggaaactgagtgaaggcgggta

SEQ ID NO: 6437 - protein, 154 aa, Homo sapiens
MLPKLAIMSAGSGGWALGSSLLSCKMGITEAVPGTMRSRCSRKVVSAEGKSQSQKVAYSHSVYLFLFLRQGLALSPRLEYSGAIWAHCNLHLLGSSDPPISDPQGAGATGTCHRVRLIFVFFVETGFHHVAQAGLKLLSSGDPPALACDKIAQK

SEQ ID NO: 6438 - DNA, 605 bp, Homo sapiens
ctcactccctctattgcctctccagacccagacttcaccctcaggtcaccctcacctggactttggggtgccccacaccccgccccaggccctggcctctggaatatttggaaacttgaactgggccagaggcttaagctcacatctgtctggagcctcaactttctcctctgtaaaatgggctaacactgaaagaaccttgcagaatctcagcaacgtcacagaggacattgttagcacagccagcgggctcctgctgggctgagtttgtgggtaatccaagcctcggcaggtacagttcctccctcagggcccaggacacagtgagcatacaatagacattagctgctgtggtgtcttgatttcaagcccagtgcagatgcatctgacttacgaaacttcagtgacacctgctctgtgccagacactgaagatggagcagtgaacagcactgacccagcctgtcctcctgttgcctgcaggccagacggagtctcactctgtcaccaggctggagtacagtggtgtgatctcggctcactgcaacctccgcctcccaggttcaagcgattctcctgcctcagcctctcaagtagctgagatta

SEQ ID NO: 6439 - protein, 84 aa, Homo sapiens
LLWCLDFKPSADASDLRNFSDTCSVPDTEDGAVNSTDPACPPVACRPDGVSLCHQAGVQWCDLGSLQPPPPRFKRFSCLSLSSS

SEQ ID NO: 6440 - DNA, 921 bp, Homo sapiens
gtaaaatgggctaacactgaaagaaccttgcagaatctcagcaacgtcacagaggacattgttagcacagccagcgggctcctgctgggctgagtttgtgggtaatccaagcctcggcaggtacagttcctccctcagggcccaggacacagtgagcatacaatagacattagctgctgtggtgtcttgatttcaagcccagtgcagatgcatctgacttacgaaacttcagtgacacctgctctgtgccagacactgaagatggagcagtgaacagcactgacccagcctgtcctcctgttgcctgcaggccagaagcaaggtctcgctgtgttaccctggctggagtgcagtggctacttacaggcatgatcatagcatactgcagcctcgaactcctggactagagcagttctcctgcctcagcctccagagcagctgggactgcagacacgcaccacagagcccagcctgagtcattttgattctgtaactggcttcctctcggcgggcaggctcacaccctccacccccagctggagatggaaggaggatgctcaccgcccattcctcatgcaggccatcgatggaaatgtcagacagtgcgagtccacgcctgaacacttctggggtccgctctgggactgacactggcagatccatcggtgagctcccgcctgccacctctgggcctgcattgcggtgatagggccaagggcctgggccttcaattctccagacttgccaaaatgctcagcgcaggcctcgtcggcaactgcagacaagcagaggcagcacctgggctctgcctgtgcctggcacagtgaagcgagggtgggggcaggaatgagggtcctctccatgcaaggggggaagatagaagaacaaaatttcaccctaatgtagtgtctttagaccgtg

SEQ ID NO: 6441 - protein, 50 aa, Homo sapiens
MLTAHSSCRPSMEMSDSASPRLNTSGVRSGTDTGRSIGELPPATSGPALR

SEQ ID NO: 6442 - DNA, 1250 bp, Homo sapiens
gtaaaatgggctaacactgaaagaaccttgcagaatctcagcaacgtcacagaggacattgttagcacagccagcgggctcctgctgggctgagtttgtgggtaatccaagcctcggcaggtacagttcctccctcagggcccaggacacagtgagcatacaatagacattagctgctgtggtgtcttgatttcaagcccagtgcagatgcatctgacttacgaaacttcagtgacacctgctctgtgccagacactgaagatggagcagtgaacagcactgacccagcctgtcctcctgttgcctgcaggccagaagcaaggtctcgctgtgttaccctggctggagtgcagtggctacttacaggcatgatcatagcatactgcagcctcgaactcctggactagagcagttctcctgcctcagcctccagagcagctgggactgcagacacgcaccacagagcccagcctgagtcattttgattctgtaactggcttcctctcggcgggcaggctcacaccctccacccccagctggagatggaaggaggatgctcaccgcccattcctcatgcaggccatcgatggaaatgtcagacagtgcgagtccacgcctgaacacttctggggtccgctctgggactgacactggcagatccatcggtgagctcccgcctgccacctctgggcctgcattgcggtgatagggccaagggcctgggccttcaattctccagacttgccaaaatgctcagcgcaggcctcgtcggcaactgcagacaagcagaggcagcacctgggctctgcctgtgcctggcacagtgaagcgagggtgggggcaggaatgagggtcctctccatgcaaggggggaagatagaagaacaaaatttcaccctaatgtagtgtctttagaccgtgcaatgttgtgctcctgttagtctgatatcaggggcttgcagcctggcaaaggaaaaaaaacaggctgaggcacatgatagaagacaggcagggatgccacaatcataaccatggcaaagaccaggatcagaaaggcccaccatctctgaccccaaatccctgggcagatggttccagaactcagaattttcccagttgtagaaagatggggccaggtgcagtggctcacgcctgtaatcccagcattttgggagtacaaggtgggcggatcacctgaggtcaggagttcgagaccagcctggccaacatggtgaaaccctgtctctact

SEQ ID NO: 6443 - protein, 67 aa, Homo sapiens
MIEDRQGCHNHNHGKDQDQKGPPSLTPNPWADGSRTQNFPSCRKMGPGAVAHACNPSILGVQGGRIT

SEQ ID NO: 6444 - DNA, 1425 bp, Homo sapiens
gtaaaatgggctaacactgaaagaaccttgcagaatctcagcaacgtcacagaggacattgttagcacagccagcgggctcctgctgggctgagtttgtgggtaatccaagcctcggcaggtacagttcctccctcagggcccaggacacagtgagcatacaatagacattagctgctgtggtgtcttgatttcaagcccagtgcagatgcatctgacttacgaaacttcagtgacacctgctctgtgccagacactgaagatggagcagtgaacagcactgacccagcctgtcctcctgttgcctgcaggccagaagcaaggtctcgctgtgttaccctggctggagtgcagtggctacttacaggcatgatcatagcatactgcagcctcgaactcctggactagagcagttctcctgcctcagcctccagagcagctgggactgcagacacgcaccacagagcccagcctgagtcattttgattctgtaactggcttcctctcggcgggcaggctcacaccctccacccccagctggagatggaaggaggatgctcaccgcccattcctcatgcaggccatcgatggaaatgtcagacagtgcgagtccacgcctgaacacttctggggtccgctctgggactgacactggcagatccatcggtgagctcccgcctgccacctctgggcctgcattgcggtgatagggccaagggcctgggccttcaattctccagacttgccaaaatgctcagcgcaggcctcgtcggcaactgcagacaagcagaggcagcacctgggctctgcctgtgcctggcacagtgaagcgagggtgggggcaggaatgagggtcctctccatgcaaggggggaagatagaagaacaaaatttcaccctaatgtagtgtctttagaccgtgcaatgttgtgctcctgttagtctgatatcaggggcttgcagcctggcaaaggaaaaaaaacaggctgaggcacatgatagaagacaggcagggatgccacaatcataaccatggcaaagaccaggatcagaaaggcccaccatctctgaccccaaatccctgggcagatggttccagaactcagaattttcccagttgtagaaagatggggccaggtgcagtggctcacgcctgtaatcccagcattttgggagtacaaggtgggcggatcacctgaggtcaggagttcgagaccagcctggccaacatggtgaaaccctgtctctactaaaaaaaaaaaaaaaaattagccgggcgtggcgatgcatgcctgtaatcccagctactcgggaggctgagccaggagaattgcttgaacccgggaggcggaggttgcagtgagccaagatcgcgccactacactccagtccgggcgacagagcaagagtccattcccccaccacc

SEQ ID NO: 6445 - protein, 67 aa, Homo sapiens; identical to SEQ ID NO: 6443

SEQ ID NO: 6446 - DNA, 888 bp, Homo sapiens
gcgtgagccaccgcgcccagccggtgggcagccagttgtgttccgggaggaggaggacaccctggaaagacagtggggccagacactgaactgcctttggaagcaagtaggagcaacagcgaaggtttgctggctcagaagcaaggtctcgctgtgttaccctggctggagtgcagtggctacttacaggcatgatcatagcatactgcagcctcgaactcctggactagagcagttctcctgcctcagcctccagagcagctgggactgcagacacgcaccacagagcccagcctgagtcattttgattctgtaactggcttcctctcggcgggcaggctcacaccctccacccccagctggagatggaaggaggatgctcaccgcccattcctcatgcaggccatcgatggaaatgtcagacagtgcgagtccacgcctgaacacttctggggtccgctctgggactgacactggcagatccatcgtggcacccgagctctgtgagggcaagactttgttcggttgtgggctatgcccccaacccctcggacagtgcctgcacaggtggacatttttgttggatgaaggattttctgttaaatgtgtctggcacacacagaaaaacaaagcccagcagatgccgttccattgtttgctgactttcattgattctatgagaagtctgcagtcttttgcagcgttgttttcctatgtataattgtctcctcccaccccactcaccccagctgctttccacattctctctctttgattttcagcagtctgcccatgatgtgcctaaataggactttctttgcattcatcttggctggggctcactgaactttctgaatctgtagattaattttcttttttcaataaacc

SEQ ID NO: 6447 - protein, 114 aa, Homo sapiens
MLTAHSSCRPSMEMSDSASPRLNTSGVRSGTDTGRSIVAPELCEGKTLFGCGLCPQPLGQCLHRWTFLLDEGFSVKCVWHTQKNKAQQMPFHCLLTFIDSMRSLQSFAALFSYV

SEQ ID NO: 6448 - DNA, 686 bp, Homo sapiens
accctggaaagacagtggggccagacactgaactgcctttggaagcaagtaggagcaacagcgaaggtttgctggctcagaagcaaggtctcgctgtgttaccctggctggagtgcagtggctacttacaggcatgatcatagcatactgcagcctcgaactcctggactagagcagttctcctgcctcagcctccagagcagctgggactgcagacacgcaccacagagcccagcctgagtcattttgattctgtaactggcttcctctcggcgggcaggctcacaccctccacccccagctggagatggaaggaggatgctcaccgcccattcctcatgcaggccatcgatggaaatgtcagacagtgcgagtccacgcctgaacacttctggggtccgctctgggactgacactggcagatccatcggtgagctcccgcctgccacctctgggcctgcattgcggtgatagggccaagggcctgggccttcaattctccagacttgccaaaatgctcagcgcaggcctcgtcggcaactgcagacaagcagaggcagcacctgggctctgcctgtgcctggcacagtgaagcgagggtgggggcaggaatgagggtcctctccatgcaaggggggaagatagaagaacaaaatttcaccctaatgtagtgtctttagaccgtg

SEQ ID NO: 6449 - protein, 50 aa, Homo sapiens; identical to SEQ ID NO: 6441

SEQ ID NO: 6450 - DNA, 1015 bp, Homo sapiens
accctggaaagacagtggggccagacactgaactgcctttggaagcaagtaggagcaacagcgaaggtttgctggctcagaagcaaggtctcgctgtgttaccctggctggagtgcagtggctacttacaggcatgatcatagcatactgcagcctcgaactcctggactagagcagttctcctgcctcagcctccagagcagctgggactgcagacacgcaccacagagcccagcctgagtcattttgattctgtaactggcttcctctcggcgggcaggctcacaccctccacccccagctggagatggaaggaggatgctcaccgcccattcctcatgcaggccatcgatggaaatgtcagacagtgcgagtccacgcctgaacacttctggggtccgctctgggactgacactggcagatccatcggtgagctcccgcctgccacctctgggcctgcattgcggtgatagggccaagggcctgggccttcaattctccagacttgccaaaatgctcagcgcaggcctcgtcggcaactgcagacaagcagaggcagcacctgggctctgcctgtgcctggcacagtgaagcgagggtgggggcaggaatgagggtcctctccatgcaaggggggaagatagaagaacaaaatttcaccctaatgtagtgtctttagaccgtgcaatgttgtgctcctgttagtctgatatcaggggcttgcagcctggcaaaggaaaaaaaacaggctgaggcacatgatagaagacaggcagggatgccacaatcataaccatggcaaagaccaggatcagaaaggcccaccatctctgaccccaaatccctgggcagatggttccagaactcagaattttcccagttgtagaaagatggggccaggtgcagtggctcacgcctgtaatcccagcattttgggagtacaaggtgggcggatcacctgaggtcaggagttcgagaccagcctggccaacatggtgaaaccctgtctctact

SEQ ID NO: 6451 - protein, 67 aa, Homo sapiens; identical to SEQ ID NO: 6443

SEQ ID NO: 6452 - DNA, 1190 bp, Homo sapiens
accctggaaagacagtggggccagacactgaactgcctttggaagcaagtaggagcaacagcgaaggtttgctggctcagaagcaaggtctcgctgtgttaccctggctggagtgcagtggctacttacaggcatgatcatagcatactgcagcctcgaactcctggactagagcagttctcctgcctcagcctccagagcagctgggactgcagacacgcaccacagagcccagcctgagtcattttgattctgtaactggcttcctctcggcgggcaggctcacaccctccacccccagctggagatggaaggaggatgctcaccgcccattcctcatgcaggccatcgatggaaatgtcagacagtgcgagtccacgcctgaacacttctggggtccgctctgggactgacactggcagatccatcggtgagctcccgcctgccacctctgggcctgcattgcggtgatagggccaagggcctgggccttcaattctccagacttgccaaaatgctcagcgcaggcctcgtcggcaactgcagacaagcagaggcagcacctgggctctgcctgtgcctggcacagtgaagcgagggtgggggcaggaatgagggtcctctccatgcaaggggggaagatagaagaacaaaatttcaccctaatgtagtgtctttagaccgtgcaatgttgtgctcctgttagtctgatatcaggggcttgcagcctggcaaaggaaaaaaaacaggctgaggcacatgatagaagacaggcagggatgccacaatcataaccatggcaaagaccaggatcagaaaggcccaccatctctgaccccaaatccctgggcagatggttccagaactcagaattttcccagttgtagaaagatggggccaggtgcagtggctcacgcctgtaatcccagcattttgggagtacaaggtgggcggatcacctgaggtcaggagttcgagaccagcctggccaacatggtgaaaccctgtctctactaaaaaaaaaaaaaaaaattagccgggcgtggcgatgcatgcctgtaatcccagctactcgggaggctgagccaggagaattgcttgaacccgggaggcggaggttgcagtgagccaagatcgcgccactacactccagtccgggcgacagagcaagagtccattcccccaccacc

SEQ ID NO: 6453 - protein, 67 aa, Homo sapiens; identical to SEQ ID NO: 6443

SEQ ID NO: 6454 - DNA, 2066 bp, Homo sapiens
ccggggctgagctgcggcggcgcctgacaatgccccctcgcgccccggcctcggcgcccgctcccggctccagcgcgcctgcacgtacgtagccttcacgtgtgtgtggatacggagtgcatgtgtggagacagaggaatatgctccaacaaatttcggatagaggcgccgaagacaggacgtggggaagctaaagaagtaaacaggtcatggcacgtttaacaaaaagacgacaggcggatacaaaagctatccagcatctttgggcagccattgagattatacggaaccagaagcagattgccaacattgaccgtattacaaagtatatgtctcgagtccacggtatgcaccctaaagagaccacccgtcagctgagcttagctgtgaaagatggtcttattgtcgaaactctaacagtgggctgcaaaggttcaaaagctggtattgaacaagaaggatattggttgccaggagatgagattgactgggaaacagaaaatcatgactggtattgttttgaatgccatttgcctggagaggtgttgatatgtgacctgtgttttcgtgtgtatcattccaagtgtttgtctgatgagttcaggcttagagacagcagtagtccctggcagtgcccagtttgcaggagcattaagaagaagaatacaaacaaacaggagatgggcacatacctcagattcattgtctcccgcatgaaggagagggctatagatcttaataaaaaggggaaggacaataaacacccgatgtacaggaggctggtgcactcagctgtggacgttcccaccattcaagagaaagtgaatgaagggaaataccgaagttatgaagagttcaaagctgatgcccaattgcttctccacaataccgtgattttctatggagcagacagtgagcaagctgacattgcgaggatgctatataaagacacatgtcatgagctggatgaactgcagctttgcaagaattgcttttacttgtcaaatgctcgtcctgacaactggttctgttatccttgtatacctaatcatgagctggtttgggctaaaatgaaaggttttgggttttggccagccaaagtcatgcagaaagaagacaatcaagtcgacgttcgcttctttggccaccaccaccagagggcctggattccttctgaaaacattcaagatatcacagtcaacattcatcggctgcacgtgaagcgcagtatgggttggaaaaaggcctgtgatgagctggagctgcatcagcgtttcctacgagaagggagattttggaaatctaagaatgaggaccgaggtgaggaagaggcagaatccagtatctcctccaccagtaatgagcagctaaaggtcactcaagaaccaagagcaaagaaaggacgacgtaatcaaagtgtggagcccaaaaaggaagaaccagagcctgaaacagaagcagtaagttctagccaggaaatacccacgatgcctcagcccatcgaaaaagtctccgtgtcaactcagacaaagaagttaagtgcctcttcaccaagaatgctgcatcggagcacccagaccacaaacgacggcgtgtgtcagagcatgtgccatgacaaatacaccaagatcttcaatgacttcaaagaccggatgaagtcggaccacaagcgggagacagagcgtgttgtccgagaagctctggagaagctgcgttctgaaatggaagaagaaaagagacaagctgtaaataaagctgtagccaacatgcagggtgagatggacagaaaatgtaagcaagtaaaggaaaagtgtaaggaagaatttgtagaagaaatcaagaagctggcaacacagcacaagcaactgatttctcagaccaagaagaagcagtgggtaaataccagtcttttttagacccttatttctgaaaatgtaccacaggtatgatgcccgttaattcagaaggtagctgtggcacatgcagaagatgtttctgaaataagatcaaatgtgaaatggtcagctttagttttaaaaattttattaaaagtcctatgatctctc

SEQ ID NO: 6455 - protein, 568 aa, Homo sapiens
MARLTKRRQADTKAIQHLWAAIEIIRNQKQIANIDRITKYMSRVHGMHPKETTRQLSLAVKDGLIVETLTVGCKGSKAGIEQEGYWLPGDEIDWETENHDWYCFECHLPGEVLICDLCFRVYHSKCLSDEFRLRDSSSPWQCPVCRSIKKKNTNKQEMGTYLRFIVSRMKERAIDLNKKGKDNKHPMYRRLVHSAVDVPTIQEKVNEGKYRSYEEFKADAQLLLHNTVIFYGADSEQADIARMLYKDTCHELDELQLCKNCFYLSNARPDNWFCYPCIPNHELVWAKMKGFGFWPAKVMQKEDNQVDVRFFGHHHQRAWIPSENIQDITVNIHRLHVKRSMGWKKACDELELHQRFLREGRFWKSKNEDRGEEEAESSISSTSNEQLKVTQEPRAKKGRRNQSVEPKKEEPEPETEAVSSSQEIPTMPQPIEKVSVSTQTKKLSASSPRMLHRSTQTTNDGVCQSMCHDKYTKIFNDFKDRMKSDHKRETERVVREALEKLRSEMEEEKRQAVNKAVANMQGEMDRKCKQVKEKCKEEFVEEIKKLATQHKQLISQTKKKQWVNTSLF

SEQ ID NO: 6456 - DNA, 4185 bp, Homo sapiens
ccggggctgagctgcggcggcgcctgacaatgccccctcgcgccccggcctcggcgcccgctcccggctccagcgcgcctgcacgtacgtagccttcacgtgtgtgtggatacggagtgcatgtgtggagacagaggaatatgctccaacaaatttcggatagaggcgccgaagacaggacgtggggaagctaaagaagtaaacaggtcatggcacgtttaacaaaaagacgacaggcggatacaaaagctatccagcatctttgggcagccattgagattatacggaaccagaagcagattgccaacattgaccgtattacaaagtatatgtctcgagtccacggtatgcaccctaaagagaccacccgtcagctgagcttagctgtgaaagatggtcttattgtcgaaactctaacagtgggctgcaaaggttcaaaagctggtattgaacaagaaggatattggttgccaggagatgagattgactgggaaacagaaaatcatgactggtattgttttgaatgccatttgcctggagaggtgttgatatgtgacctgtgttttcgtgtgtatcattccaagtgtttgtctgatgagttcaggcttagagacagcagtagtccctggcagtgcccagtttgcaggagcattaagaagaagaatacaaacaaacaggagatgggcacatacctcagattcattgtctcccgcatgaaggagagggctatagatcttaataaaaaggggaaggacaataaacacccgatgtacaggaggctggtgcactcagctgtggacgttcccaccattcaagagaaagtgaatgaagggaaataccgaagttatgaagagttcaaagctgatgcccaattgcttctccacaataccgtgattttctatggagcagacagtgagcaagctgacattgcgaggatgctatataaagacacatgtcatgagctggatgaactgcagctttgcaagaattgcttttacttgtcaaatgctcgtcctgacaactggttctgttatccttgtatacctaatcatgagctggtttgggctaaaatgaaaggttttgggttttggccagccaaagtcatgcagaaagaagacaatcaagtcgacgttcgcttctttggccaccaccaccagagggcctggattccttctgaaaacattcaagatatcacagtcaacattcatcggctgcacgtgaagcgcagtatgggttggaaaaaggcctgtgatgagctggagctgcatcagcgtttcctacgagaagggagattttggaaatctaagaatgaggaccgaggtgaggaagaggcagaatccagtatctcctccaccagtaatgagcagctaaaggtcactcaagaaccaagagcaaagaaaggacgacgtaatcaaagtgtggagcccaaaaaggaagaaccagagcctgaaacagaagcagtaagttctagccaggaaatacccacgatgcctcagcccatcgaaaaagtctccgtgtcaactcagacaaagaagttaagtgcctcttcaccaagaatgctgcatcggagcacccagaccacaaacgacggcgtgtgtcagagcatgtgccatgacaaatacaccaagatcttcaatgacttcaaagaccggatgaagtcggaccacaagcgggagacagagcgtgttgtccgagaagctctggagaagctgcgttctgaaatggaagaagaaaagagacaagctgtaaataaagctgtagccaacatgcagggtgagatggacagaaaatgtaagcaagtaaaggaaaagtgtaaggaagaatttgtagaagaaatcaagaagctggcaacacagcacaagcaactgatttctcagaccaagaagaagcagtggtgctacaactgtgaggaggaggccatgtaccactgctgctggaacacatcctactgctccatcaagtgccagcaggagcactggcacgcggagcacaagcgcacctgccgccggaaaagatgaagctggcccttcccggagtcaccccgatgattactcttttcagacacagcggtttttgtttccaagaagccaaaattgtttagaatttgcttcccattttgcaccagcctttaaacacttttcgtgaagaaattttgcacagtagtttaaatcttttgttaatgctcctccgaagtttttcagggggtaaaagtaacatcagtggagggtattattttaaataaattttaattgagaatttgttgcattttcagcaaattttaaaacatttttaggttttacagagattttaacctttaaacaacagatctttaaaaaacaggtgaatacaagtgagtttaacaaagaaacatttagaatagatctgaatgtaagaactacagaactgtttcagaaataaaacatactaccttgatgtgacatttttttcttaaccttgttgagctggttttgttcagcttaatttactgttcaaaggcattatctgttggtcacaccagtgggtatatgattgaatttagggaacagggttgacacagcagggctagtcctgcatattttttcttaaatatttcccaattgtgtttttcattatttcttttcaatatataacttttataacaaattattagctttgatcttgtagtttaaaattgcagggaactggggtaatcttttactgagctggatcttagagaaaatgaatatttaaattttaaagtttgcacatttcatctttgtcctaacatgagtgcttgtaacaaaataaacaacaaaaacaaagccaaaaactacctttatccatatgtgaaattatagatgaggcatacgaatttgtttaatgcttcccttcccttcccacatatcatctcactgcctattatctggtgtcacctcatgtatcgtaagttaatactaaaagaagagaaagcacttaagtttcacagaagccgttatgtttgtagtaatgggtcattgcctactaatgaactccatcactgtacacagaatgaagaataatgcatgttaattttcttgtattaaagatgccgtgatttgtaaaaagtctgtattttgcggaatgtctggattaagaagcattaccaataggaatggatcgatagttgaataatgattttttatacatagatatataaaatacagccaggaaaacttaaattacttttcttttaaaatatctcacaatttatgtggtatttttaaagactgatcttagaccaagtcaaattcccatttatcatttagttattttttgaggttagagaataatttgtacatatttatttagacctttgatatttattaaagcaattactcacaatggaagtgaaagaatcaggagaaaagccttttaaaaagtattctccaggtttgtcagggtcactctaaagataaaaatgtaactaagtcttctgtgaaatatcatccatctaatcttgatgctgttgcagatggtggtgacacaagttaattgacaaactactgccaaatggtgcacaatattttgtaaaaagtacccagtagccccatttcatacaatgtacctaaattatgcagtaacttggcatcatcgttccctccttgttgctgtgtaattagtcagtgttgccacagtgtgtggcgctgatggagatgtcagaaccgagaacacttaaccttctttgattgtttttcaagttttaagacttcgatccacccctatgagagcaagtaattgtggaaatatttttggtgtaaaatcattccagagtatgtaatatttaactgatagctgcatgaaagtgagattcgtgttactttggcttttctgtctctgttgacacggttgcacatttccaagttactacagcgtgaaaactgtgtgtttaaaaaaaaacaaaattaaaaaaagagattgtggcctggttttgtaaaagttttaggtaaaattacaattgattgttttaggaatcattattaaaaattttctgcaaatcataaagctatatcgaggtgttgagcttagccactatgcacattgtaattattcattgtggctgtccagttctatgatgcattctggcattttgtaagctgctctgactagcaatatatagattcatttaatgtgttaacattggttaataaatgtatttaaaaaaaacta

SEQ ID NO: 6457 - protein, 602 aa, Homo sapiens
MARLTKRRQADTKAIQHLWAAIEIIRNQKQIANIDRITKYMSRVHGMHPKETTRQLSLAVKDGLIVETLTVGCKGSKAGIEQEGYWLPGDEIDWETENHDWYCFECHLPGEVLICDLCFRVYHSKCLSDEFRLRDSSSPWQCPVCRSIKKKNTNKQEMGTYLRFIVSRMKERAIDLNKKGKDNKHPMYRRLVHSAVDVPTIQEKVNEGKYRSYEEFKADAQLLLHNTVIFYGADSEQADIARMLYKDTCHELDELQLCKNCFYLSNARPDNWFCYPCIPNHELVWAKMKGFGFWPAKVMQKEDNQVDVRFFGHHHQRAWIPSENIQDITVNIHRLHVKRSMGWKKACDELELHQRFLREGRFWKSKNEDRGEEEAESSISSTSNEQLKVTQEPRAKKGRRNQSVEPKKEEPEPETEAVSSSQEIPTMPQPIEKVSVSTQTKKLSASSPRMLHRSTQTTNDGVCQSMCHDKYTKIFNDFKDRMKSDHKRETERVVREALEKLRSEMEEEKRQAVNKAVANMQGEMDRKCKQVKEKCKEEFVEEIKKLATQHKQLISQTKKKQWCYNCEEEAMYHCCWNTSYCSIKCQQEHWHAEHKRTCRRKR

SEQ ID NO: 6458 - DNA, 1019 bp, Homo sapiens
atggagtaccacacgcacagctcatatggcagcagggtaccaggcacctactgcacacaataccgggggctgagtgcacagcctaagcgaggaagatacatgtacacaccgtgtatgatagccggacaccgcactgcacaacgagcactggtacacacgaataaaacaggtacggcggtcactctgcaaaagacaccgggcacggcgcacacatcgccagctcctcctcctcccggctcgggagaaaagcgcgaggagagactgcaagtgaaagtccgggtcccggcgccccccctcgtcccagccgcgtcctcagcagcttctccccggagctctgggtgggaggagggcggcggaccccacaggactgtcccggaggtccgcgaggacctgttgaggcggcggcctcgctgccggggtcgctcacagccccgggggaccgacgaatctccgccccgggcctcggggccagccctgcccgccgctcccgggctagcacacgacgtgccgcgccgacaaacgcttcctctccgcccgccacacgcccggagccgcgttccccgccggcccggactgcgcacgggcccaggaggcctgaccgaaagcggggcacagggcccggcgggcggtgctcacgcgactccgcggcttcccggcccgagcaggccccgcgcggtcctccggggcctcatcccggggcctcttccgcggccgcccaaggcgaggaggctaggcggccgggtcgccgcgtgcggggtgagggccgggagggcaccgccgcccgcacttactcgcgtcttcccctggcgccgcgggcctgcggggccggagcgggcggcgggaagttgggcgccgccgcccgggaaagttgggtccccgcgaagccgcggcagccgctcacatggcgatgcgcgcggggcggccgctcggccccaccggcccctcggcccgcccgccctcggagtttattgtgtcgggtcgaggcgccccgcggccgggccgcgcactgggggctctag

SEQ ID NO: 6459 - protein, 338 aa, Homo sapiens [sequence omitted]

SEQ ID NO: 6460 - DNA, 648 bp, Homo sapiens
ggcccgagaggcgccgggcggcgggaaggaggcggcaccggaggggagggccgggcgcggcggcggcggcggtggaggagccggagcataatgctaaagaagtaaacaggtcatggcacgtttaacaaaaagacgacaggcggatacaaaagctatccagcatctttgggcagccattgagattatacggaaccagaagcagattgccaacattgaccgtattacaaagtatatgtctcgagtccacggtatgcaccctaaagagaccacccgtcagctgagcttagctgtgaaagatggtcttattgtcgaaactctaacagtgggctgcaaaggttcaaaagctggtattgaacaagaaggatattggttgccaggagatgagattgactgggaaacagaaaatcatgactggtattgttttgaatgccatttgcctggagaggtgttgatatgtgacctgtgttttcgtgtgtatcattccaagtgtttgtctgatgagttcaggcttagagacagcagtagtccctggcagtgcccagtttgcagggctggagggcagtggcatgatctcggctcactgcaacctccacttcctgggttcaagtgattcttctgcctcagcctcccgagtagctgggattacag

SEQ ID NO: 6461 - protein, 165 aa, Homo sapiens
MARLTKRRQADTKAIQHLWAAIEIIRNQKQIANIDRITKYMSRVHGMHPKETTRQLSLAVKDGLIVETLTVGCKGSKAGIEQEGYWLPGDEIDWETENHDWYCFECHLPGEVLICDLCFRVYHSKCLSDEFRLRDSSSPWQCPVCRAGGQWHDLGSLQPPLPGFK

SEQ ID NO: 6462 - DNA, 3909 bp, Homo sapiens
gcggcgggaaggaggcggcaccggaggggagggccgggcgcggcggcggcggcggtggaggagccggagcataatgctaaagaagtaaacaggtcatggcacgtttaacaaaaagacgacaggcggatacaaaagctatccagcatctttgggcagccattgagattatacggaaccagaagcagattgccaacattgaccgtattacaaagtatatgtctcgagtccacggtatgcaccctaaagagaccacccgtcagctgagcttagctgtgaaagatggtcttattgtcgaaactctaacagtgggctgcaaaggttcaaaagctggtattgaacaagaaggatattggttgccaggagatgagattagcattaagaagaagaatacaaacaaacaggagatgggcacatacctcagattcattgtctcccgcatgaaggagagggctatagatcttaataaaaaggggaaggacaataaacacccgatgtacaggaggctggtgcactcagctgtggacgttcccaccattcaagagaaagtgaatgaagggaaataccgaagttatgaagagttcaaagctgatgcccaattgcttctccacaataccgtgattttctatggagcagacagtgagcaagctgacattgcgaggatgctatataaagacacatgtcatgagctggatgaactgcagctttgcaagaattgcttttacttgtcaaatgctcgtcctgacaactggttctgttatccttgtatacctaatcatgagctggtttgggctaaaatgaaaggttttgggttttggccagccaaagtcatgcagaaagaagacaatcaagtcgacgttcgcttctttggccaccaccaccagagggcctggattccttctgaaaacattcaagatatcacagtcaacattcatcggctgcacgtgaagcgcagtatgggttggaaaaaggcctgtgatgagctggagctgcatcagcgtttcctacgagaagggagattttggaaatctaagaatgaggaccgaggtgaggaagaggcagaatccagtatctcctccaccagtaatgagcagctaaaggtcactcaagaaccaagagcaaagaaaggacgacgtaatcaaagtgtggagcccaaaaaggaagaaccagagcctgaaacagaagcagtaagttctagccaggaaatacccacgatgcctcagcccatcgaaaaagtctccgtgtcaactcagacaaagaagttaagtgcctcttcaccaagaatgctgcatcggagcacccagaccacaaacgacggcgtgtgtcagagcatgtgccatgacaaatacaccaagatcttcaatgacttcaaagaccggatgaagtcggaccacaagcgggagacagagcgtgttgtccgagaagctctggagaagctgcgttctgaaatggaagaagaaaagagacaagctgtaaataaagctgtagccaacatgcagggtgagatggacagaaaatgtaagcaagtaaaggaaaagtgtaaggaagaatttgtagaagaaatcaagaagctggcaacacagcacaagcaactgatttctcagaccaagaagaagcagtggtgctacaactgtgaggaggaggccatgtaccactgctgctggaacacatcctactgctccatcaagtgccagcaggagcactggcacgcggagcacaagcgcacctgccgccggaaaagatgaagctggcccttcccggagtcaccccgatgattactcttttcagacacagcggtttttgtttccaagaagccaaaattgtttagaatttgcttcccattttgcaccagcctttaaacacttttcgtgaagaaattttgcacagtagtttaaatcttttgttaatgctcctccgaagtttttcagggggtaaaagtaacatcagtggagggtattattttaaataaattttaattgagaatttgttgcattttcagcaaattttaaaacatttttaggttttacagagattttaacctttaaacaacagatctttaaaaaacaggtgaatacaagtgagtttaacaaagaaacatttagaatagatctgaatgtaagaactacagaactgtttcagaaataaaacatactaccttgatgtgacatttttttcttaaccttgttgagctggttttgttcagcttaatttactgttcaaaggcattatctgttggtcacaccagtgggtatatgattgaatttagggaacagggttgacacagcagggctagtcctgcatattttttcttaaatatttcccaattgtgtttttcattatttcttttcaatatataacttttataacaaattattagctttgatcttgtagtttaaaattgcagggaactggggtaatcttttactgagctggatcttagagaaaatgaatatttaaattttaaagtttgcacatttcatctttgtcctaacatgagtgcttgtaacaaaataaacaacaaaaacaaagccaaaaactacctttatccatatgtgaaattatagatgaggcatacgaatttgtttaatgcttcccttcccttcccacatatcatctcactgcctattatctggtgtcacctcatgtatcgtaagttaatactaaaagaagagaaagcacttaagtttcacagaagccgttatgtttgtagtaatgggtcattgcctactaatgaactccatcactgtacacagaatgaagaataatgcatgttaattttcttgtattaaagatgccgtgatttgtaaaaagtctgtattttgcggaatgtctggattaagaagcattaccaataggaatggatcgatagttgaataatgattttttatacatagatatataaaatacagccaggaaaacttaaattacttttcttttaaaatatctcacaatttatgtggtatttttaaagactgatcttagaccaagtcaaattcccatttatcatttagttattttttgaggttagagaataatttgtacatatttatttagacctttgatatttattaaagcaattactcacaatggaagtgaaagaatcaggagaaaagccttttaaaaagtattctccaggtttgtcagggtcactctaaagataaaaatgtaactaagtcttctgtgaaatatcatccatctaatcttgatgctgttgcagatggtggtgacacaagttaattgacaaactactgccaaatggtgcacaatattttgtaaaaagtacccagtagccccatttcatacaatgtacctaaattatgcagtaacttggcatcatcgttccctccttgttgctgtgtaattagtcagtgttgccacagtgtgtggcgctgatggagatgtcagaaccgagaacacttaaccttctttgattgtttttcaagttttaagacttcgatccacccctatgagagcaagtaattgtggaaatatttttggtgtaaaatcattccagagtatgtaatatttaactgatagctgcatgaaagtgagattcgtgttactttggcttttctgtctctgttgacacggttgcacatttccaagttactacagcgtgaaaactgtgtgtttaaaaaaaaacaaaattaaaaaaagagattgtggcctggttttgtaaaagttttaggtaaaattacaattgattgttttaggaatcattattaaaaattttctgcaaatcataaagctatatcgaggtgttgagcttagccactatgcacattgtaattattcattgtggctgtccagttctatgatgcattctggcattttgtaagctgctctgactagcaatatatagattcatttaatgtgttaacattggttaataaatgtatttaaaaaaaacta

SEQ ID NO: 6463 - protein, 548 aa, Homo sapiens
MARLTKRRQADTKAIQHLWAAIEIIRNQKQIANIDRITKYMSRVHGMHPKETTRQLSLAVKDGLIVETLTVGCKGSKAGIEQEGYWLPGDEISIKKKNTNKQEMGTYLRFIVSRMKERAIDLNKKGKDNKHPMYRRLVHSAVDVPTIQEKVNEGKYRSYEEFKADAQLLLHNTVIFYGADSEQADIARMLYKDTCHELDELQLCKNCFYLSNARPDNWFCYPCIPNHELVWAKMKGFGFWPAKVMQKEDNQVDVRFFGHHHQRAWIPSENIQDITVNIHRLHVKRSMGWKKACDELELHQRFLREGRFWKSKNEDRGEEEAESSISSTSNEQLKVTQEPRAKKGRRNQSVEPKKEEPEPETEAVSSSQEIPTMPQPIEKVSVSTQTKKLSASSPRMLHRSTQTTNDGVCQSMCHDKYTKIFNDFKDRMKSDHKRETERVVREALEKLRSEMEEEKRQAVNKAVANMQGEMDRKCKQVKEKCKEEFVEEIKKLATQHKQLISQTKKKQWCYNCEEEAMYHCCWNTSYCSIKCQQEHWHAEHKRTCRRKR

SEQ ID NO: 6464 - DNA, 4091 bp, Homo sapiens
gctaaagaagtaaacaggtcatggcacgtttaacaaaaagacgacaggcggatacaaaagctatccagcatctttgggcagccattgagattatacggaaccagaagcagattgccaacattgaccgtattacaaaatgtgaaacaactacattattcttgaacctatggtgatttttacatcattacacagatatgtcattttcattagttgtatcattgttataaactggtatatgtctcgagtccacggtatgcaccctaaagagaccacccgtcagctgagcttagctgtgaaagatggtcttattgtcgaaactctaacagtgggctgcaaaggttcaaaagctggtattgaacaagaaggatattggttgccaggagatgagattgactgggaaacagaaaatcatgactggtattgttttgaatgccatttgcctggagaggtgttgatatgtgacctgtgttttcgtgtgtatcattccaagtgtttgtctgatgagttcaggcttagagacagcagtagtccctggcagtgcccagtttgcaggagcattaagaagaagaatacaaacaaacaggagatgggcacatacctcagattcattgtctcccgcatgaaggagagggctatagatcttaataaaaaggggaaggacaataaacacccgatgtacaggaggctggtgcactcagctgtggacgttcccaccattcaagagaaagtgaatgaagggaaataccgaagttatgaagagttcaaagctgatgcccaattgcttctccacaataccgtgattttctatggagcagacagtgagcaagctgacattgcgaggatgctatataaagacacatgtcatgagctggatgaactgcagctttgcaagaattgcttttacttgtcaaatgctcgtcctgacaactggttctgttatccttgtatacctaatcatgagctggtttgggctaaaatgaaaggttttgggttttggccagccaaagtcatgcagaaagaagacaatcaagtcgacgttcgcttctttggccaccaccaccagagggcctggattccttctgaaaacattcaagatatcacagtcaacattcatcggctgcacgtgaagcgcagtatgggttggaaaaaggcctgtgatgagctggagctgcatcagcgtttcctacgagaagggagattttggaaatctaagaatgaggaccgaggtgaggaagaggcagaatccagtatctcctccaccagtaatgagcagctaaaggtcactcaagaaccaagagcaaagaaaggacgacgtaatcaaagtgtggagcccaaaaaggaagaaccagagcctgaaacagaagcagtaagttctagccaggaaatacccacgatgcctcagcccatcgaaaaagtctccgtgtcaactcagacaaagaagttaagtgcctcttcaccaagaatgctgcatcggagcacccagaccacaaacgacggcgtgtgtcagagcatgtgccatgacaaatacaccaagatcttcaatgacttcaaagaccggatgaagtcggaccacaagcgggagacagagcgtgttgtccgagaagctctggagaagctgcgttctgaaatggaagaagaaaagagacaagctgtaaataaagctgtagccaacatgcagggtgagatggacagaaaatgtaagcaagtaaaggaaaagtgtaaggaagaatttgtagaagaaatcaagaagctggcaacacagcacaagcaactgatttctcagaccaagaagaagcagtggtgctacaactgtgaggaggaggccatgtaccactgctgctggaacacatcctactgctccatcaagtgccagcaggagcactggcacgcggagcacaagcgcacctgccgccggaaaagatgaagctggcccttcccggagtcaccccgatgattactcttttcagacacagcggtttttgtttccaagaagccaaaattgtttagaatttgcttcccattttgcaccagcctttaaacacttttcgtgaagaaattttgcacagtagtttaaatcttttgttaatgctcctccgaagtttttcagggggtaaaagtaacatcagtggagggtattattttaaataaattttaattgagaatttgttgcattttcagcaaattttaaaacatttttaggttttacagagattttaacctttaaacaacagatctttaaaaaacaggtgaatacaagtgagtttaacaaagaaacatttagaatagatctgaatgtaagaactacagaactgtttcagaaataaaacatactaccttgatgtgacatttttttcttaaccttgttgagctggttttgttcagcttaatttactgttcaaaggcattatctgttggtcacaccagtgggtatatgattgaatttagggaacagggttgacacagcagggctagtcctgcatattttttcttaaatatttcccaattgtgtttttcattatttcttttcaatatataacttttataacaaattattagctttgatcttgtagtttaaaattgcagggaactggggtaatcttttactgagctggatcttagagaaaatgaatatttaaattttaaagtttgcacatttcatctttgtcctaacatgagtgcttgtaacaaaataaacaacaaaaacaaagccaaaaactacctttatccatatgtgaaattatagatgaggcatacgaatttgtttaatgcttcccttcccttcccacatatcatctcactgcctattatctggtgtcacctcatgtatcgtaagttaatactaaaagaagagaaagcacttaagtttcacagaagccgttatgtttgtagtaatgggtcattgcctactaatgaactccatcactgtacacagaatgaagaataatgcatgttaattttcttgtattaaagatgccgtgatttgtaaaaagtctgtattttgcggaatgtctggattaagaagcattaccaataggaatggatcgatagttgaataatgattttttatacatagatatataaaatacagccaggaaaacttaaattacttttcttttaaaatatctcacaatttatgtggtatttttaaagactgatcttagaccaagtcaaattcccatttatcatttagttattttttgaggttagagaataatttgtacatatttatttagacctttgatatttattaaagcaattactcacaatggaagtgaaagaatcaggagaaaagccttttaaaaagtattctccaggtttgtcagggtcactctaaagataaaaatgtaactaagtcttctgtgaaatatcatccatctaatcttgatgctgttgcagatggtggtgacacaagttaattgacaaactactgccaaatggtgcacaatattttgtaaaaagtacccagtagccccatttcatacaatgtacctaaattatgcagtaacttggcatcatcgttccctccttgttgctgtgtaattagtcagtgttgccacagtgtgtggcgctgatggagatgtcagaaccgagaacacttaaccttctttgattgtttttcaagttttaagacttcgatccacccctatgagagcaagtaattgtggaaatatttttggtgtaaaatcattccagagtatgtaatatttaactgatagctgcatgaaagtgagattcgtgttactttggcttttctgtctctgttgacacggttgcacatttccaagttactacagcgtgaaaactgtgtgtttaaaaaaaaacaaaattaaaaaaagagattgtggcctggttttgtaaaagttttaggtaaaattacaattgattgttttaggaatcattattaaaaattttctgcaaatcataaagctatatcgaggtgttgagcttagccactatgcacattgtaattattcattgtggctgtccagttctatgatgcattctggcattttgtaagctgctctgactagcaatatatagattcatttaatgtgttaacattggttaataaatgtatttaaaaaaaacta

SEQ ID NO: 6465 - protein, 585 aa, Homo sapiens
MVIFTSLHRYVIFISCIIVINWYMSRVHGMHPKETTRQLSLAVKDGLIVETLTVGCKGSKAGIEQEGYWLPGDEIDWETENHDWYCFECHLPGEVLICDLCFRVYHSKCLSDEFRLRDSSSPWQCPVCRSIKKKNTNKQEMGTYLRFIVSRMKERAIDLNKKGKDNKHPMYRRLVHSAVDVPTIQEKVNEGKYRSYEEFKADAQLLLHNTVIFYGADSEQADIARMLYKDTCHELDELQLCKNCFYLSNARPDNWFCYPCIPNHELVWAKMKGFGFWPAKVMQKEDNQVDVRFFGHHHQRAWIPSENIQDITVNIHRLHVKRSMGWKKACDELELHQRFLREGRFWKSKNEDRGEEEAESSISSTSNEQLKVTQEPRAKKGRRNQSVEPKKEEPEPETEAVSSSQEIPTMPQPIEKVSVSTQTKKLSASSPRMLHRSTQTTNDGVCQSMCHDKYTKIFNDFKDRMKSDHKRETERVVREALEKLRSEMEEEKRQAVNKAVANMQGEMDRKCKQVKEKCKEEFVEEIKKLATQHKQLISQTKKKQWCYNCEEEAMYHCCWNTSYCSIKCQQEHWHAEHKRTCRRKR

SEQ ID NO: 6466 - DNA, 747 bp, Homo sapiens
aggagatgggcacatacctcagattcattgtctcccgcatgaaggagactaaaggtcactcaagaaccaagagcaaagaaaggacgacgtaatcaaagtgtggagcccaaaaaggaagaaccagagcctgaaacagaagcagtaagttctagccaggaaatacccacgatgcctcagcccatcgaaaaagtctccgtgtcaactcagacaaagaagttaagtgcctcttcaccaagaatgctgcatcggagcacccagaccacaaacgacggcgtgtgtcagagcatgtgccatgacaaatacaccaagatcttcaatgacttcaaagaccggatgaagtcggaccacaagcgggagacagagcgtgttgtccgagaagctctggagaagctgcgttctgaaatggaagaagaaaagagacaagctgtaaataaagctgtagccaacatgcagggtgagatggacagaaaatgtaagcaagtaaaggaaaagtgtaaggaagaatttgtagaagaaatcaagaagctggcaacacagcacaagcaactgatttctcagaccaagaagaagcagtgggtaaataccagtcttttttagacccttatttctgaaaatgtaccacaggtatgatgcccgttaattcagaaggtagctgtggcacatgcagaagatgtttctgaaataagatcaaatgtgaaatggtcagctttagttttaaaaattttattaaaagtcctatgatctctc

SEQ ID NO: 6467 - protein, 142 aa, Homo sapiens
MPQPIEKVSVSTQTKKLSASSPRMLHRSTQTTNDGVCQSMCHDKYTKIFNDFKDRMKSDHKRETERVVREALEKLRSEMEEEKRQAVNKAVANMQGEMDRKCKQVKEKCKEEFVEEIKKLATQHKQLISQTKKKQWVNTSLF

SEQ ID NO: 6468 - DNA, 1774 bp, Homo sapiens
gaagccctgcgttcatgcttccagccattgtcggagtgtcagccgtcacaaggcacttccagccagtcgcaacggcgggtcgccagcgccgcagtagctcgcgcggtgcctgtcggtagtcgcgtgcggggcggcggggcggcggggcggccggcggcggccatgggagatatcccagccgtgggcctcagctcctggaaggcttctccagggaaagtgaccgaggcagtgaaagaggccattgacgcagggtaccggcacttcgactgtgcttacttttaccacaatgagagggaggttggagcagggatccgttgcaagatcaaggaaggcgctgtaagacgggaggatctgttcattgccactaagctgtggtgcacctgccataagaagtccttggtggaaacagcatgcagaaagagtctcaaggccttgaagctgaactatttggacctctacctcatacactggcccatgggtttcaagcctcctcatccagaatggatcatgagctgcagtgaactttccttctgcctctcacatcctcgagtgcaggacttgcctctggacgagagcaacatggttattcccagtgacacggacttcctggacacgtgggaggccatggaggacctggtgatcaccgggctggtgaagaacatcggggtgtcaaacttcaaccatgaacagcttgagaggcttttgaataagcctgggttgaggttcaagccactaaccaaccagattttgatccgatttcaaatccagaggaatgtgatagtgatccccggatctatcaccccaagtcacattaaagagaatatccaggctctctttttgcctgctgccatccatgtaagacgcgacttgtttctccttgccttctgtcatgattgtgaggcttccccagacacttggaactgcacaaaaacgtgttttgaacctactctaaccaactgtcaaaaggctgtgttaagtgattctctgacaaggcccaggagcttcaaattgtcttgggacctcaagaggagaggaatttagccaaatcatgcagaaccttggccattctgatgtttaaccaagagttgagctgagtggctctgaccagcgtggaagatgagagcagcctgaacttacactgtgaaaattataagttcaggctgctatcatcttccaccctggtcagagccactcaactcaactcttggttaaatatgagaatggcaaagattctgcaagtaaatggaagccaacatgaatacttggtggcacctttactgtgagattgttggggctggaagtgggaatatcaaccatctaaaccttttctcatgtaagaggttactgtgataccaaaaattagataatgaggaaggatggcttaggaggcataaagtcacaacagagactggattgtgcttgtgtggtccaaggctcttggccccctaaagaatcactgaaaatcaatgacggatgttgctttggagagattgcacccaaaatgacagagaccaatgtgctcagtcttggtagaactatgacatgagagatcaccagataacagctgtcagacagaaccagcttcttttcaatggtataattgtccatctcatccatcgtgaaaacttaagcataagttaagcataagtcttacatacattatgtccaccttttattactgttgttaactacaaaacagagctaaagagaacagaacagaaagtcccacaatttcctggctgacaaaaataaaattaatacatgtgtgcttaaa

SEQ ID NO: 6469 - protein, 292 aa, Homo sapiens
MGDIPAVGLSSWKASPGKVTEAVKEAIDAGYRHFDCAYFYHNEREVGAGIRCKIKEGAVRREDLFIATKLWCTCHKKSLVETACRKSLKALKLNYLDLYLIHWPMGFKPPHPEWIMSCSELSFCLSHPRVQDLPLDESNMVIPSDTDFLDTWEAMEDLVITGLVKNIGVSNFNHEQLERLLNKPGLRFKPLTNQILIRFQIQRNVIVIPGSITPSHIKENIQALFLPAAIHVRRDLFLLAFCHDCEASPDTWNCTKTCFEPTLTNCQKAVLSDSLTRPRSFKLSWDLKRRGI

SEQ ID NO: 6470 - DNA, 1363 bp, Homo sapiens
attcatgattggacatgtcctagacatcacttagaggattttgttgttgttgtttattaaacaaggtcttctgtcacacaagatggcacgttggacattccttatttcccttaataaagggaaaaaaaccctctgctttgcaggaaaagtaaaagaagatgagttttaacagactcctttctgtaaaactgaatgatggaaagttcatgcctattctggggtttggcacctctgttgctaggaaggttgctatgagtaatgtagaagaagccgtccaggtagcaattgatgtaggctaccgccatattgactcagcttatacacacctgaatgaagaaggcatcgggcaggccatccgaaagaagattgccaacggcactgtgaagagaaaagatatattctataccacaaaggtgtggggcaccttttcccgcccagaattggtccaaagaggccttgaaatgtcactgaagaaacttcagctgagctacatggatctttacctttttcatttcccagtacctttgcagcctgggaggagcttttgctgacggatgcacagggaaagatcatgtttgacacagtgggtctctgcagcacatgggaggccctggagaagtgtaaggatgcaggattggccaagtccatcagggtgtccaacttcaaccgcaggcaactggaaatgatcctcaacaagccagggctcaagcacaagcctgtctgcaaccaggtggaatatcacccttacctcaaccaaagcaaactcctggagtactgtaagtccaaggacattgtcatgactgcatattctgccttggggtctgactcagacaaagactgggtgaaaaaaggaaacccagttctccaggaggatccaatactcaatgccattgctgaaaagcccaggcgaactccagcccaggttgccttgtgctaccagctgcagcgcggggtggtggtcctggtgaagagcttcaatgagaagagaatcaaagaaaacttccaggtttttgacttctagctgacaccagaggacatgaaaaccacagatggcttgaacaagaatatatgccatttgtaaatgtctatcttttctcatcacccagattatccatttcttgatgaatataaagaaaagagtctgtggttgttccagagtttattgatttgggttgagatgaatagagaatatctcatggatgggaagttttctagtttattccagattgattagcctgctcagtcacaagttggcctaagaccccggatcagaaaataaaagtatctaaacctagttttctcttgattcccgcccccaccccacccccacaactgccaaaataaagatgtatttgaaataacc

SEQ ID NO: 6471 - protein, 149 aa, Homo sapiens
MFDTVGLCSTWEALEKCKDAGLAKSIRVSNFNRRQLEMILNKPGLKHKPVCNQVEYHPYLNQSKLLEYCKSKDIVMTAYSALGSDSDKDWVKKGNPVLQEDPILNAIAEKPRRTPAQVALCYQLQRGVVVLVKSFNEKRIKENFQVFDF

SEQ ID NO: 6472 - DNA, 1039 bp, Homo sapiens
attcatgattggacatgtcctagacatcacttagaggattttgttgttgttgtttattaaacaaggtcttctgtcacacaagatggcacgttggacattccttatttcccttaataaagggaaaaaaaccctctgctttgcaggaaaagtaaaagaagatgagttttaacagactcctttctgtaaaactgaatgatggaaagttcatgcctattctggggtttggcacctctgttgctaggaaggttgctatgagtaatgtagaagaagccgtccaggtagcaattgatgtaggctaccgccatattgactcagcttatacacacctgaatgaagaaggcatcgggcaggccatccgaaagaagattgccaacggcactgtgaagagaaaagatatattctataccacaaaggtgtggggcaccttttcccgcccagaattggtccaaagaggccttgaaatgtcactgaagaaacttcagctgagctacatggatctttacctttttcatttcccagtacctttgcagcctgggaggagcttttgctgacggatgcacagggaaagatcatgtttgacacagtgggtctctgcagcacatgggaggccctggagaagtgtaaggatgcaggattggccaagtccatcagggtgtccaacttcaaccgcaggcaactggaaatgatcctcaacaagccagggctcaagcacaagcctgtctgcaaccaggtggaatatcacccttacctcaaccaaagcaaactcctggagtactgtaagtccaaggacattgtcatgactgcatattctgccttggggtctgactcagacaaagactgggtgaaaaaaggaaacccagttctccaggaggatccaatactcaatgccattgctgaaaagcccaggcgaactccagcccaggttgccttgtgctaccagctgcagcgcggggtggtggtcctggtgaagagcttcaatgagaagagaatcaaagaaaacttccaggtacagggcatggtggtggcagcaggggattga

SEQ ID NO: 6473 - protein, 155 aa, Homo sapiens
MFDTVGLCSTWEALEKCKDAGLAKSIRVSNFNRRQLEMILNKPGLKHKPVCNQVEYHPYLNQSKLLEYCKSKDIVMTAYSALGSDSDKDWVKKGNPVLQEDPILNAIAEKPRRTPAQVALCYQLQRGVVVLVKSFNEKRIKENFQVQGMVVAAGD

SEQ ID NO: 6474 - DNA, 570 bp, Homo sapiens
aatggtttctccctttacacccgctgtgaagttcagtgtttttctattcatgattggacatgtcctagacatcacttagagatttcccttaataaagggaaaaaaaccctctgctttgcaggaaaagtaaaagaagatgagttttaacagactcctttctgtaaaactgaatgatggaaagttcatgcctattctggggtttggcacctctgttgctaggaaggttgctatgagtaatgtagaagaagccgtccaggtagcaattgatgtaggctaccgccatattgactcagcttatacacacctgaatgaagaaggcatcgggcaggccatccgaaagaagattgccaacggcactgtgaagagaaaagatatattctataccacaaaggtgtggggcaccttttcccgcccagaattggtccaaagaggccttgaaatgtcactgaagaaacttcagctgagctacatggatctttacctttttcatttcccagtacctttgcaggttagctcaagttgttttactttagtgatcaacataaatattagtaactgaacgcaagagag

SEQ ID NO: 6475 - protein, 140 aa, Homo sapiens
MSFNRLLSVKLNDGKFMPILGFGTSVARKVAMSNVEEAVQVAIDVGYRHIDSAYTHLNEEGIGQAIRKKIANGTVKRKDIFYTTKVWGTFSRPELVQRGLEMSLKKLQLSYMDLYLFHFPVPLQVSSSCFTLVININISN

SEQ ID NO: 6476 - DNA, 2038 bp, Homo sapiens
agaaagccatgtaaccatgaaggcagagattgaagtgattcaactataagccaaggcatgccaactgctactgggagccaccaaaagctagtcaaaggcaagggaaccatcttcccgagagctttcatggggagcatggccctataaacaactggatttttgactcaagtctccagaactggaagagaatacaatcctcttttgttgttctaaaccatccaatttgcacaaaaacgtgttttgaacctactctaaccaactgtcaaaaggctgtgttaagtgattctctgacaagaaccgggatttagctgaactaagaagcaaaaattctgcatcattttggtggcgtgtacagggacatgaggaaggaaccttggccattctgatgtttaaccaagagttgagctgagtggctctgaccagcgtggaagatgagagcagcctgaacttacactgtgaaaatgccctggagaaatgcagagatgcaggtttaatgaagtccatcagggtgtccagtttcaatcactaactgttggaactgatcctcagacaagccaggactcaagtacaagcccatctacaaccagatgagcccttagggccactggggccatttctgactttgtgctcttcacacacttccttacattagaataatgtaagaaacggttgaactggatgcaatttttatcacagcttgtgtaagactgcctctgtccctcctctcacatgccattggttaaccagcagacagtgtgctcaggggcgttgccagctcattgctcttatagcctgtgagggaggaagaaagaaacatttgccagccaggctagtgacagaaatggattcgaaatatcagtgtgtgaagctgaatgatggtcacttcatgcctgtcctgggatttggcacctatgcgcctgcagaggttcctaaaagtaaagctttagaggccaccaaattggcaattgaagctggcttccgccatattgattctgctcatttatacaataatgaggagcaggttggactggccatccgaagcaagattgcagatggcagtgtgaagagagaagacatattctacacttcaaagctttggtgcaattcccatcgaccagagttggtccgaccagccttggaaaggtcactgaaaaatcttcaattggattatgttgacctctaccttattcattttccagtgtctgtaaagccaggtgaggaagtgatcccaaaagatgaaaatggaaaaatactatttgacacagtggatctctgtgccacatgggaggccgtggagaagtgtaaagatgcaggattggccaagtccatcggggtgtccaacttcaaccgcaggcagctggagatgatcctcaacaagccagggctcaagtacaagcctgtctgcaaccaggtggaatgtcatccttacttcaaccagagaaaactgctggatttctgcaagtcaaaagacattgttctggttgcctatagtgctctgggatcccaccgagaagaaccatgggtggacccgaactccccggtgctcttggaggacccagtcctttgtgccttggcaaaaaagcacaagcgaaccccagccctgattgccctgcgctaccagctacagcgtggggttgtggtcctggccaagagctacaatgagcagcgcatcagacagaacgtgcaggtgtttgaattccagttgacttcagaggagatgaaagccatagatggcctaaacagaaatgtgcgatatttgacccttgatatttttgctggcccccctaattatccattttctgatgaatattaacatggagggcattgcatgaggtctgccagaaggccctgcgtgtggatggtgacacagaggatggctctatgctggtgactggacacatcgcctctggttaaatctctcctgcttggtgatttcagcaagctacagcaaagcccattggccagaaaggaaagacaataattttgttttttcattttgaaaaaattaaatgctctctcctaaagattcttcacctac

SEQ ID NO: 6477 - protein, 323 aa, Homo sapiens; identical to SEQ ID NO: 875

SEQ ID NO: 6478 - DNA, 726 bp, Homo sapiens
gtaagaaacggttgaactggatgcaatttttatcacagcttgtgtaagactgcctctgtccctcctctcacatgccattggttaaccagcagacagtgtgctcaggggcgttgccagctcattgctcttatagcctgtgagggaggaagaaagaaacatttgccagccaggctagtgacagaaatggattcgaaatatcagtgtgtgaagctgaatgatggtcacttcatgcctgtcctgggatttggcacctatgcgcctgcagaggttcctaaaagtaaagctttagaggccaccaaattggcaattgaagctggcttccgccatattgattctgctcatttatacaataatgaggagcaggttggactggccatccgaagcaagattgcagatggcagtgtgaagagagaagacatattctacacttcaaagctttggtgcaattcccatcgaccagagttggtccgaccagccttggaaaggtcactgaaaaatcttcaattggattatgttgacctctaccttattcattttccagtgtctgtaaaggtaggcagcttgtgtgatcaaattaatttcacttttgttctcagcataaatattgtttttatggatatttgaactaagcattttcttaggaggacatagggattataacatagaagaagaatcctaaatctaactcctaattcctttctatgggatacattttgaatccatact

SEQ ID NO: 6479 - protein, 146 aa, Homo sapiens
MDSKYQCVKLNDGHFMPVLGFGTYAPAEVPKSKALEATKLAIEAGFRHIDSAHLYNNEEQVGLAIRSKIADGSVKREDIFYTSKLWCNSHRPELVRPALERSLKNLQLDYVDLYLIHFPVSVKVGSLCDQINFTFVLSINIVFMDI

SEQ ID NO: 6480 - DNA, 694 bp, Homo sapiens
gtaagaaacggttgaactggatgcaatttttatcacagcttgtgtaagactgcctctgtccctcctctcacatgccattggttaaccagcagacagtgtgctcaggggcgttgccagctcattgctcttatagcctgtgagggaggaagaaagaaacatttgccagccaggctagtgacagaaatggattcgaaatatcagtgtgtgaagctgaatgatggtcacttcatgcctgtcctgggatttggcacctatgcgcctgcagagctttggtgcaattcccatcgaccagagttggtccgaccagccttggaaaggtcactgaaaaatcttcaattggattatgttgacctctaccttattcattttccagtgtctgtaaagccaggtgaggaagtgatcccaaaagatgaaaatggaaaaatactatttgacacagtggatctctgtgccacatgggaggccgtggagaagtgtaaagatgcaggattggccaagtccatcggggtgtccaacttcaaccgcaggcagctggagatgatcctcaacaagccagggctcaagtacaagcctgtctgcaaccaggtggaatgtcatccttacttcaaccagagaaaactgctggatttctgcaagtcaaaagacattgttctggttgcctatagtgctctgggatcccaccgagaagaaccat

SEQ ID NO: 6481 - protein, 169 aa, Homo sapiens
MDSKYQCVKLNDGHFMPVLGFGTYAPAELWCNSHRPELVRPALERSLKNLQLDYVDLYLIHFPVSVKPGEEVIPKDENGKILFDTVDLCATWEAVEKCKDAGLAKSIGVSNFNRRQLEMILNKPGLKYKPVCNQVECHPYFNQRKLLDFCKSKDIVLVAYSALGSHREE

SEQ ID NO: 6482 - DNA, 3377 bp, Homo sapiens
gtaagaaacggttgaactggatgcaatttttatcacagcttgtgtaagactgcctctgtccctcctctcacatgccattggttaaccagcagacagtgtgctcaggggcgttgccagctcattgctcttatagcctgtgagggaggaagaaagaaacatttgccagccaggctagtgacagaaatggattcgaaatatcagtgtgtgaagctgaatgatggtcacttcatgcctgtcctgggatttggcacctatgcgcctgcagaggttcctaaaagtaaagctttagaggccaccaaattggcaattgaagctggcttccgccatattgattctgctcatttatacaataatgaggagcaggttggactggccatccgaagcaagattgcagatggcagtgtgaagagagaagacatattctacacttcaaagctttggtgcaattcccatcgaccagagttggtccgaccagccttggaaaggtcactgaaaaatcttcaattggattatgttgacctctaccttattcattttccagtgtctgtaaagccaggtgaggaagtgatcccaaaagatgaaaatggaaaaatactatttgacacagtggatctctgtgccacatgggaggccgtggagaagtgtaaagatgcaggattggccaagtccatcggggtgtccaacttcaaccgcaggcagctggagatgatcctcaacaagccagggctcaagtacaagcctgtctgcaaccaggtggaatgtcatccttacttcaaccagagaaaactgctggatttctgcaagtcaaaagacattgttctggttgcctatagtgctctgggatcccaccgagaagaaccatgggtggacccgaactccccggtgctcttggaggacccagtcctttgtgccttggcaaaaaagcacaagcgaaccccagccctgattgccctgcgctaccagctacagcgtggggttgtggtcctggccaagagctacaatgagcagcgcatcagacagaacgtgcaggtgtttgaattccagttgacttcagaggagatgaaagccatagatggcctaaacagaaatgtgcgatatttgacccttgatatttttgctggcccccctaattatccattttctgatgaatattaacatggagggcattgcatgaggtctgccagaaggccctgcgtgtggatggtgacacagaggatggctctatgctggtgactggacacatcgcctctggttaaatctctcctgcttggtgatttcagcaagctacagcaaagcccattggccagaaaggaaagacaataattttgttttttcattttgaaaaaattaaatgctctctcctaaagattcttcacctactttggtctccataacttctatgttttctttccttctgacacactagtgcccctaaattgtgatttgcctatacgtttagggccggggttggaagatgttaacaaccatttaagattcatttctgcagtgggagtgggtggagtttcaccctctgggaaaggggcaggtgacaggtatttatcagtcagtgcctctctagctcttgtaggaagaagcacacgcaggatggagtctagaggatgagcgatattgactagcaattcatgggctccctccagcagtgcgagggtcagagtttctggagccttgggaggaggcatccctgtgagggggggttagggagatgggagggcaccaggaaaagtgattagaagtcaggtatgggaaggctaaataggacagagtcgagtacatctctgcttggaaaaacatatcaacacccttttttttgaacattatatcttgctcataaaagaaaactttccacattgttttaacaaaccccacagctgagagtcaggcctgaatctttgatgtgtgcccattcacaacgttgaccctattggtttgtggtggggcagggcatcaaagacatcattgactaatcacattcccctgaatagctcatatttagaaaatattcttagattctaaaaatgtactattaatttgtgatattcagtcttttaaatattttatacattaaacaggcatagttacaaatataaaacaaaaatatcccaaagccattatgcatggcactcaagattaaaatgggaaataatacatctaataaatcaaatgttccaagacttcaaaggtcttttggaaacaggctatgtaaaacagcacactggtttcaaactttggtaaattttaagaacaactcttacaaaggcatttaattcttatacataattttcaggggacctaagttaatcagctaatcatgaagacatgattttcattttagaaaacacttttgaaaacttgggataatctcatgccttaatgatcaaagcattatgagaaggacagtggtttttaacctgggcatatgttctaacacatttactctccactattcgtactctggtagccatgttaaccccatcagagattccttctcaagccatgtctcagagctgagaggcatcccagcaagttttgcagctcacagttttttccgtaaattacttattctataaaattggagtaggccataaactttggagggccctagaccaattttttggattatttttcgtcttctatcattccgctgatcttagatattctctgcattaaatattaaatatcacttctaggctgaaaaatccccctaaaaatatttctagctcagatttttcctccaaattctgcaatagaagatcacaatgtgaactctgcatctccatgttaaagtctaatggacattcacacttagcatgtctcaaagaaatctcatgtaaaccatggccatcctgttctaccttaactttctgagtctatggaatgataatttcacatctcataaacttgactgatgtaagtgtcaagaaaagattgacattttgttaaaagttagtagtgaagtgtgtaacgcttaagcaaactttcatatttcaaatctctttagcaagtgtaactcttttttcaagatgtgaaataatcattaggtcagtcatttgtaaatagtacatctgctatggactttttccagttcttcaccatccatttttataaaactcttattgttaaaaaaaaagttactcagaatttcataaagccaaacacctgatttcaggaacacttgagatgtaagaaaattttatagggacctccaatcactaattttcctattttttctctcaaagaaatgctgaagggaggaattcaggttgaatgaaaggaaatagtaacttacagccatatagagttataaagacttcttgtaaatgtgaacatatggtaaaatataaaaacatgtatttttg

SEQ ID NO: 6483 - protein, 323 aa, Homo sapiens; identical to SEQ ID NO: 875

SEQ ID NO: 6484 - DNA, 3755 bp, Homo sapiens
gtaagaaacggttgaactggatgcaatttttatcacagcttgtgtaagactgcctctgtccctcctctcacatgccattggttaaccagcagacagtgtgctcaggggcgttgccagctcattgctcttatagcctgtgagggaggaagaaagaaacatttgccagccaggctagtgacagaaatggattcgaaatatcagtgtgtgaagctgaatgatggtcacttcatgcctgtcctgggatttggcacctatgcgcctgcagaggttcctaaaagtaaagctttagaggccaccaaattggcaattgaagctggcttccgccatattgattctgctcatttatacaataatgaggagcaggttggactggccatccgaagcaagattgcagatggcagtgtgaagagagaagacatattctacacttcaaagctttggtgcaattcccatcgaccagagttggtccgaccagccttggaaaggtcactgaaaaatcttcaattggattatgttgacctctaccttattcattttccagtgtctgtaaagccaggtgaggaagtgatcccaaaagatgaaaatggaaaaatactatttgacacagtggatctctgtgccacatgggaggccgtggagaagtgtaaagatgcaggattggccaagtccatcggggtgtccaacttcaaccgcaggcagctggagatgatcctcaacaagccagggctcaagtacaagcctgtctgcaaccaggtggaatgtcatccttacttcaaccagagaaaactgctggatttctgcaagtcaaaagacattgttctggttgcctatagtgctctgggatcccaccgagaagaaccatgggtggacccgaactccccggtgctcttggaggacccagtcctttgtgccttggcaaaaaagcacaagcgaaccccagccctgattgccctgcgctaccagctacagcgtggggttgtggtcctggccaagagctacaatgagcagcgcatcagacagaacgtgcaggtgtttgaattccagttgacttcagaggagatgaaagccatagatggcctaaacagaaatgtgcgatatttgacccttgatatttttgctggcccccctaattatccattttctgatgaatattaacatggagggcattgcatgaggtctgccagaaggccctgcgtgtggatggtgacacagaggatggctctatgctggtgactggacacatcgcctctggttaaatctctcctgcttggtgatttcagcaagctacagcaaagcccattggccagaaaggaaagacaataattttgttttttcattttgaaaaaattaaatgctctctcctaaagattcttcacctactttggtctccataacttctatgttttctttccttctgacacactagtgcccctaaattgtgatttgcctatacgtttagggccggggttggaagatgttaacaaccatttaagattcatttctgcagtgggagtgggtggagtttcaccctctgggaaaggggcaggtgacaggtatttatcagtcagtgcctctctagctcttgtaggaagaagcacacgcaggatggagtctagaggatgagcgatattgactagcaattcatgggctccctccagcagtgcgagggtcagagtttctggagccttgggaggaggcatccctgtgagggggggttagggagatgggagggcaccaggaaaagtgattagaagtcaggtatgggaaggctaaataggacagagtcgagtacatctctgcttggaaaaacatatcaacacccttttttttgaacattatatcttgctcataaaagaaaactttccacattgttttaacaaaccccacagctgagagtcaggcctgaatctttgatgtgtgcccattcacaacgttgaccctattggtttgtggtggggcagggcatcaaagacatcattgactaatcacattcccctgaatagctcatatttagaaaatattcttagattctaaaaatgtactattaatttgtgatattcagtcttttaaatattttatacattaaacaggcatagttacaaatataaaacaaaaatatcccaaagccattatgcatggcactcaagattaaaatgggaaataatacatctaataaatcaaatgttccaagacttcaaaggtcttttggaaacaggctatgtaaaacagcacactggtttcaaactttggtaaattttaagaacaactcttacaaaggcatttaattcttatacataattttcaggggacctaagttaatcagctaatcatgaagacatgattttcattttagaaaacacttttgaaaacttgggataatctcatgccttaatgatcaaagcattatgagaaggacagtggtttttaacctgggcatatgttctaacacatttactctccactattcgtactctggtagccatgttaaccccatcagagattccttctcaagccatgtctcagagctgagaggcatcccagcaagttttgcagctcacagttttttccgtaaattacttattctataaaattggagtaggccataaactttggagggccctagaccaattttttggattatttttcgtcttctatcattccgctgatcttagatattctctgcattaaatattaaatatcacttctaggctgaaaaatccccctaaaaatatttctagctcagatttttcctccaaattctgcaatagaagatcacaatgtgaactctgcatctccatgttaaagtctaatggacattcacacttagcatgtctcaaagaaatctcatgtaaaccatggccatcctgttctaccttaactttctgagtctatggaatgataatttcacatctcataaacttgactgatgtaagtgtcaagaaaagattgacattttgttaaaagttagtagtgaagtgtgtaacgcttaagcaaactttcatatttcaaatctctttagcaagtgtaactcttttttcaagatgtgaaataatcattaggtcagtcatttgtaaatagtacatctgctatggactttttccagttcttcaccatccatttttataaaactcttattgttaaaaaaaaagttactcagaatttcataaagccaaacacctgatttcaggaacacttgagatgtaagaaaattttatagggacctccaatcactaattttcctattttttctctcaaagaaatgctgaagggaggaattcaggttgaatgaaaggaaatagtaacttacagccatatagagttataaagacttcttgtaaatgtgaacatatggtaaaatataaaaacatgtatttttgaaattttggattctactcattattttacttcaatttaagatataaatgtatagaaataagtataattctaagctaatacgtatgcaatgtaggaagctgtaattactgaccaaaactatgtgaagtggagaaaacctggggaagtggatggttttagatgaaactgaagttaaattcatattgatttaaagtaaattgttataactttataaagtttttcatcatcaccacagcaatcacaaagagaataattatgaatatacgcaagaggaaatgagaagggaatccaaatgtcattaaaaaaaaatcacgccacctcacaaaatggtaacagtggatataaaggatagaaagctataaacctggtaggaaaacatt

SEQ ID NO: 6485 - protein, 323 aa, Homo sapiens; identical to SEQ ID NO: 875

SEQ ID NO: 6486 - DNA, 1343 bp, Homo sapiens
gtaagaaacggttgaactggatgcaatttttatcacagcttgtgtaagactgcctctgtccctcctctcacatgccattggttaaccagcagacagtgtgctcaggggcgttgccagctcattgctcttatagcctgtgagggaggaagaaagaaacatttgccagccaggctagtgacagaaatggattcgaaatatcagtgtgtgaagctgaatgatggtcacttcatgcctgtcctgggatttggcacctatgcgcctgcagaggttcctaaaagtaaagctttagaggccaccaaattggcaattgaagctggcttccgccatattgattctgctcatttatacaataatgaggagcaggttggactggccatccgaagcaagattgcagatggcagtgtgaagagagaagacatattctacacttcaaagctttggtccacttttcatcgaccagagttggtccgaccagccttggaaaactcactgaagaaagctcaattggactatgttgacctctatcttattcattctccaatgtctctaaagccaggtgaggaactttcaccaacagatgaaaatggaaaagtaatatttgacatagtggatctctgtaccacctgggaggccatggagaagtgtaaggatgcaggattggccaagtccattggggtgtcaaacttcaaccgcaggcagctggagatgatcctcaacaagccaggactcaagtacaagcctgtctgcaaccaggtagaatgtcatccgtatttcaaccggagtaaattgctagatttctgcaagtcgaaagatattgttctggttgcctatagtgctctgggatctcaacgagacaaacgatgggtggacccgaactccccggtgctcttggaggacccagtcctttgtgccttggcaaaaaagcacaagcgaaccccagccctgattgccctgcgctaccagctgcagcgtggggttgtggtcctggccaagagctacaatgagcagcgcatcagacagaacgtgcaggtttttgagttccagttgactgcagaggacatgaaagccatagatggcctagacagaaatctccactattttaacagtgatagttttgctagccaccctaattatccatattcagatgaatattaacatggagggctttgcctgatgtctaccagaagccctgtgtgtggatggtgacgcagaggacgtctctatgccggtgactggacatatcacctctacttaaatccgtcctgtttagcgacttcagtcaactacagctgagtccataggccagaaagacaataaatttttatcattttgaaataattgaa

SEQ ID NO: 6487 - protein, 323 aa, Homo sapiens
MDSKYQCVKLNDGHFMPVLGFGTYAPAEVPKSKALEATKLAIEAGFRHIDSAHLYNNEEQVGLAIRSKIADGSVKREDIFYTSKLWSTFHRPELVRPALENSLKKAQLDYVDLYLIHSPMSLKPGEELSPTDENGKVIFDIVDLCTTWEAMEKCKDAGLAKSIGVSNFNRRQLEMILNKPGLKYKPVCNQVECHPYFNRSKLLDFCKSKDIVLVAYSALGSQRDKRWVDPNSPVLLEDPVLCALAKKHKRTPALIALRYQLQRGVVVLAKSYNEQRIRQNVQVFEFQLTAEDMKAIDGLDRNLHYFNSDSFASHPNYPYSDEY

SEQ ID NO: 6488 - DNA, 1556 bp, Homo sapiens
agtagagatggagttgttaaccaggatggccttgatctcctgatctcatgatccgcccagctcggcctcccaaagtgctgggattacaggttcctaaaagtaaagctttagaggccaccaaattggcaattgaagctggcttccgccatattgattctgctcatttatacaataatgaggagcaggttggactggccatccgaagcaagattgcagatggcagtgtgaagagagaagacatattctacacttcaaagctttggtgcaattcccatcgaccagagttggtccgaccagccttggaaaggtcactgaaaaatcttcaattggattatgttgacctctaccttattcattttccagtgtctgtaaagccaggtgaggaagtgatcccaaaagatgaaaatggaaaaatactatttgacacagtggatctctgtgccacatgggaggccgtggagaagtgtaaagatgcaggattggccaagtccatcggggtgtccaacttcaaccgcaggcagctggagatgatcctcaacaagccagggctcaagtacaagcctgtctgcaaccaggtggaatgtcatccttacttcaaccagagaaaactgctggatttctgcaagtcaaaagacattgttctggttgcctatagtgctctgggatcccaccgagaagaaccatgggtggacccgaactccccggtgctcttggaggacccagtcctttgtgccttggcaaaaaagcacaagcgaaccccagccctgattgccctgcgctaccagctacagcgtggggttgtggtcctggccaagagctacaatgagcagcgcatcagacagaacgtgcaggtgaggagcggggctgtgggcctcaggtctcctgcacagtgtccttcacacgtgtgcttcttgtaaggctctcaggacagccttgggccagctccatttccctgtatttcctatgcatgaactctttgtgtacgtcataagggtttcttctactctagcacaggagaggcaacagaggtggagagaaataggatgggatcaaaactacagatttgggttagcgttaagtcagtgatatccatatccctctgctggggccatgtccttttctttattttttataatgaagcattgattagatgttctttagtctccaactcatggcggatttttcttcttgtatgtttatgtagtataaattccttatatttattctcttagaattttatctttgcgaagtgcttgtttaactctgcctttttttttttggcgaggtggttgtgtgtctttatttttatgtgtaggagaccatatttataccaataccttaggatataagacaaacccacttaatatagaggcttaatgcaaaagcatttattgagctcaaggttccatggttagaaaattagcctgggctcagcctaaactcagtccattccttctgttcctggctgggctctcatgtgtgttcagggcagtgaggcagctctgcttcaggatgtccctggggcatctgtgtgagcgcccccctctcccatgcag

SEQ ID NO: 6489 - protein, 289 aa, Homo sapiens
MIRPARPPKVLGLQVPKSKALEATKLAIEAGFRHIDSAHLYNNEEQVGLAIRSKIADGSVKREDIFYTSKLWCNSHRPELVRPALERSLKNLQLDYVDLYLIHFPVSVKPGEEVIPKDENGKILFDTVDLCATWEAVEKCKDAGLAKSIGVSNFNRRQLEMILNKPGLKYKPVCNQVECHPYFNQRKLLDFCKSKDIVLVAYSALGSHREEPWVDPNSPVLLEDPVLCALAKKHKRTPALIALRYQLQRGVVVLAKSYNEQRIRQNVQVRSGAVGLRSPAQCPSHVCFL

SEQ ID NO: 6490 - DNA, 1848 bp, Homo sapiens
cagaaagaggtatttatttatacatgtaatagttgtaagagattagagggagcctgtcacctgaagacattccttataccttcatatgtagtacactctgtacataccactctctggagcactgcatcacctacctcatggaggattagtgtccttaaatgtacctcagagcatggctatgtgtggagaaattgacttgtgacatcactaaactgactgcttctacttcagccaggtgaggaagtgatcccaaaagatgaaaatggaaaaatactatttgacacagtggatctctgtgccacatgggaggtgagtgtttggaggtgagagaacggataagaaagatgaggtaggatacatctgtttcctatcttcttagtacaagtatggaaaatgcaccattggatcaaaaacttaggaactttacaaaggtagtttttgtgagcagtgaggaaaaagaaatgacaggcatacaaaagagagaagtggaggagaagaattgggggtaaggaggactgggatttatttccttgccttttcactaatctctccagtttcccaaggaggaaacagaaatacttactcttgcaatcactatcttcttccccaattttctgttttattttttcccttttaagaaccacggctagctagttttattgtcatatctagacagttgttactttcacagttctgtgtcacatttatcttgatcttccacacctcacaattcctttttcccaggccgtggagaagtgtaaagatgcaggattggccaagtccatcggggtgtccaacttcaaccgcaggcagctggagatgatcctcaacaagccagggctcaagtacaagcctgtctgcaaccaggtggaatgtcatccttacttcaaccagagaaaactgctggatttctgcaagtcaaaagacattgttctggttgcctatagtgctctgggatcccaccgagaagaaccatgggtggacccgaactccccggtgctcttggaggacccagtcctttgtgccttggcaaaaaagcacaagcgaaccccagccctgattgccctgcgctaccagctacagcgtggggttgtggtcctggccaagagctacaatgagcagcgcatcagacagaacgtgcaggtgaggagcggggctgtgggcctcaggtctcctgcacagtgtccttcacacgtgtgcttcttgtaaggctctcaggacagccttgggccagctccatttccctgtatttcctatgcatgaactctttgtgtacgtcataagggtttcttctactctagcacaggagaggcaacagaggtggagagaaataggatgggatcaaaactacagatttgggttagcgttaagtcagtgatatccatatccctctgctggggccatgtccttttctttattttttataatgaagcattgattagatgttctttagtctccaactcatggcggatttttcttcttgtatgtttatgtagtataaattccttatatttattctcttagaattttatctttgcgaagtgcttgtttaactctgcctttttttttttggcgaggtggttgtgtgtctttatttttatgtgtaggagaccatatttataccaataccttaggatataagacaaacccacttaatatagaggcttaatgcaaaagcatttattgagctcaaggttccatggttagaaaattagcctgggctcagcctaaactcagtccattccttctgttcctggctgggctctcatgtgtgttcagggcagtgaggcagctctgcttcaggatgtccctggggcatctgtgtgagcgcccccctctcccatgcag

SEQ ID NO: 6491 - protein, 129 aa, Homo sapiens
MILNKPGLKYKPVCNQVECHPYFNQRKLLDFCKSKDIVLVAYSALGSHREEPWVDPNSPVLLEDPVLCALAKKHKRTPALIALRYQLQRGVVVLAKSYNEQRIRQNVQVRSGAVGLRSPAQCPSHVCFL

SEQ ID NO: 6492 - DNA, 330 bp, Homo sapiens
gccgtggagaagtgtaaagatgcaggattggccaagtccatcggggtgtccaacttcaaccgcaggcagctggagatgatcctcaacaagccagggctcaagatgacattccacctgcagacgagcaagatggaaaagcatcagataatccaaaagttacattaatattaaaatcaccaaagtaaaagaagctgaataatgtagagcattaaatttgaactgagaatattattgtcaaaaatgatctttttcataaaaataaattttatgcccctctctcctaagaaaatagaaatgctatttctgagcacaagcaactccatgaaccct

SEQ ID NO: 6493 - protein, 55 aa, Homo sapiens
RCRIGQVHRGVQLQPQAAGDDPQQARAQDDIPPADEQDGKASDNPKVTLILKSPK

SEQ ID NO: 6494 - DNA, 586 bp, Homo sapiens
tggaatgtcatccttacttcaaccagagaaaactgctggatttctgcaagtcaaaagacattgttctggttgcctatagtgctctgggatcccaccgagaagaaccggtggacccgaactccccggtgctcttggaggacccagtcctttgtgccttggcaaaaaagcacaagcgaaccccagccctgattgccctgcgctaccagctgcagcgtggggttgtggtcctggccaagagctacaatgagcagcgcatcagacagaacgtgcaggtttttgagttccagttgactgcagaggacatgaaagccatagatggcctagacagaaatctccactattttaacagtgatagttttgctagccaccctaattatccatattcagatgaatattaacatggagggctttgcctgatgtctaccagaagccctgtgtgtggatggtgacgcagaggacgtctctatgccggtgactggacatatcacctctacttaaatccgtcctgtttagcgacttcagtcaactacagctgagtccataggccagaaagacaataaatttttatcattttgaaataattgaa

SEQ ID NO: 6495 - protein, 31 aa, Homo sapiens
MKAIDGLDRNLHYFNSDSFASHPNYPYSDEY

SEQ ID NO: 6496 - DNA, 1550 bp, Homo sapiens
tcataaaagaaaactttccacattgttttaacaaaccccacagctgagagtcaggcctgaatctttgatgtgtgcccattcacaacgttgaccctattggtttgtggtggggcaggacatcgaagatatcattgactcatcacattcccctgaatagctcatatttagaaaatattcttagattgtaaaaatgtactgttcatttgttatatgcaatcttttaaatgttttatactttaaacaaggcatagttacaagtataaaacataaatatcccaaagccattatgcatggcactcaagattaaaatgggaaataatacatctaataaatcaaatgttccaagacttcaaatgtcttttggaaacaggctatgtaaaacagcacactggtttcaaactttggtaaattttaagaagaactcttacaaaggcatttaattcttatacataattttcaggggaactaatcaaatcagctaatcatgaagacatgattttcgttttagaaaacacttttgaaaacttgggataatctcatgtcttaatgatcaaagcattatgagaaggacagtggttttttacctggaccaattttttggattatttctggtctactctcattccgttgatgatcttagatattctctgcattaaatatcacctctaggctgagaaatccaccaaaaaatatttctagctcagcgttttcctccaaatcttcaatggaagatcataatgtgaactctgcatctccatgttaaagtttaatggacattcacacttagcatgtctcaaagaaatctcatgtaaaccatggccatcctgttctaccttaactttctgagtctatggaatgataatttcacatctcataaacttgactgatgtaagtgtcaagaaaagattgacattttgttaaaacttcgtagccaagtgtgtaacgcttaagcagactttcatatttcaaatctctatagcacgtgtaactcttttttcaagatgtgaaataatcattaggtcagtcatttgtaaatagtacggctgctgtgggctttttccagttcttcaccatccatttttataaaactcttattgttaaaaaaaaaaagttactcagaatttcataaagccaaacacctgatttcaggaacacttgagatgtaagaaaattttatagggacctccaatcactaattttcctattttttctctcaaagaaatgctgaagggaggaattcaggttgaatgaaaggaaatagtaacttacagccatatagagttataaagacttcttgtaaatgtgaacatatggtaaaatataaaaacatgtatttttgaaattttggattctactcattattttacttcaatttaagatataaatgtatagaaataagtataattctaagctaatacgtatgcaatgtaggaagctgtaattactgaccaaaactatgtgaagtggagaaaacctggggaagtggatggttttagatgaaactgaagttaaattcatattgatttaaagtaaattgtcataactttata

SEQ ID NO: 6497 - protein, 31 aa, Homo sapiens
MRRTVVFYLDQFFGLFLVYSHSVDDLRYSLH

SEQ ID NO: 6498 - DNA, 1339 bp, Homo sapiens
tcataaaagaaaactttccacattgttttaacaaaccccacagctgagagtcaggcctgaatctttgatgtgtgcccattcacaacgttgaccctattggtttgtggtggggcaggacatcgaagatatcattgactcatcacattcccctgaatagctcatatttagaaaatattcttagattgtaaaaatgtactgttcatttgttatatgcaatcttttaaatgttttatactttaaacaaggcatagttacaagtataaaacataaatatcccaaagccattatgcatggcactcaagattaaaatgggaaataatacatctaataaatcaaatgttccaagacttcaaatgtcttttggaaacaggctatgtaaaacagcacactggtttcaaactttggtaaattttaagaagaactcttacaaaggcatttaattcttatacataattttcaggggaactaatcaaatcagctaatcatgaagacatgattttcgttttagaaaacacttttgaaaacttgggataatctcatgtcttaatgatcaaagcattatgagaaggacagtggttttttacctggaccaattttttggattatttctggtctactctcattccgttgatgatcttagatattctctgcattaaatatcacctctaggctgagaaatccaccaaaaaatatttctagctcagcgttttcctccaaatcttcaatggaagatcataatgtgaactctgcatctccatgttaaagtttaatggacattcacacttagcatgtctcaaagaaatctcatgtaaaccatggccatcctgttctaccttaactttctgagtctatggaatgataatttcacatctcataaacttgactgatgtaagtgtcaagaaaagattgacattttgttaaaacttcgtagccaagtgtgtaacgcttaagcagactttcatatttcaaatctctatagcacgtgtaactcttttttcaagatgtgaaataatcattaggtcagtcatttgtaaatagtacggctgctgtgggctttttccagttcttcaccatccatttttataaaactcttattgttaaaaaaaaaaagttactcagaatttcataaagccaaacacctgatttcaggaacacttgagatgtaagaaaattttatagggacctccaatcactaattttcctattttttctctcaaagaaatgctgaagggaggaattcaggttgaatgaaaggaaatagtaacttacagccatatagagttataaagacttcttgtaaatgtgaacatatggtaaaatataaaaacatgtatttttg

SEQ ID NO: 6499 - protein, 31 aa, Homo sapiens; identical to SEQ ID NO: 6497

SEQ ID NO: 6500 - DNA, 1045 bp, Homo sapiens
gaaccaccgtgcctggcctgtatgccttgttattttatttaactgggcatttgaaaaaataaacatcttttttactgtatatagatttgttctatgtcatgacagtcattaacttatatgtgcggcaggttctcagtcaaggcatcagccctacgtaaaactcaagtccttcttagtttgtttctgaacatgtacctatgtggactgtgtttgcccttttatatttccccaaataaccaatggcttttgaattgcttactattatgaaattttgcatcccagtttctcctcaatagcttagatggactattgcatgtctcttcccctggccttttgcctataacatctgtatgtgtatagtcaccctgaatctctactgagccactccagaaataaataagtttatttcagtcaattttaggtattttctgatgtttccatgagttatatgggaatcttagaatccaccatcttgttgaaattactctgtgaaaaatttcaatatctttataatattacatttatgtcaatgataacaatttacctatttttcaatttctgtttgttttatgagaaagcaaatagaagcaatcagggcactgcaagttgtgactactccaagatgtgaatcatggatcatgcaaattacaatcttgttttaacctgacctccaaagggagaataaagtaaaaattatcccatgtgaggattattcaccagtttatatgtcattagttaccagtttttctttatgaataatgtttagcaatattataaagtatatctaatagttatcaggtttttggcttgttactttttggtagtaacttataaaactgactggaaaagaccaataaggcactgtttgcatgttacaaattatatccaaagaccaaaagtaattttcctattttttctctcaaagaaatgctgaagggaggaattcaggttgaatgaaaggaaatagtaacttacagccatatagagttataaagacttcttgtaaatgtgaacatatggtaaaatataaaaacatgtatttttg

SEQ ID NO: 6501 - protein, 62 aa, Homo sapiens
MSYMGILESTILLKLLCEKFQYLYNITFMSMITIYLFFNFCLFYEKANRSNQGTASCDYSKM

SEQ ID NO: 6502 - DNA, 886 bp, Homo sapiens
gcgttgccggtgggcgctttaggaaattggtaggaggaaaagcggcttcttttgaaaagaattctcttaggaatctctggcttcattgaggacacaggtgtaagcagaagctgtgttctcagctccaagaggccgaccccacgaaagcctaagcaggtgaatttcgtaaagacgttgacagttggaaaacctgtgctttcagcacgtgataaatctgcagagtcagcagacaatgaagatttggcattcaagaactcctcaaatacttctcgatagtagctattcagagcctgccttgatagaccgaacttgctcatatttaaatcattaagatagaggaaagaatgtaacaactttttaaaatgtttcttaccccataaatacttgaagaagatatgttatattggaccatggatctttctgggggggaggggagaagaaagcaaaagtaaagtttaaatttacattcaaccttaatttgattgtatatatttgtgaccaaatgaattagtgcacagttgaccatacaactgattatgcaacagtgagtgtaactgacttttcttttggctaagctaatgatgactaaagaaggtccttctgttgctctgtcttcaagtcatcagggggtcatactacctatatttttgaaccaatatgaaataaccctttttctttatttttctgagacaatctcaccctgtcgtccaggctggagtgcagcggtgtaatcatgcctcactgcagccttgatctcctgggctcaagccatcctcccacctcagtctccccagtagcagggacaagaggtacaggccaccacacctgactattggcccttttttttttattagcaataacaataaagagcttttttcacaattgc

SEQ ID NO: 6503 - protein, 50 aa, Homo sapiens
MMTKEGPSVALSSSHQGVILPIFLNQYEITLFLYFSETISPCRPGWSAAV

SEQ ID NO: 6504 - DNA, 2144 bp, Homo sapiens
ggggcggagcccaggaacgccggcccccaggggctggaggctggggcggccctgaggacgcgtgcggggcaggtcacgcttgggcctggctgcctcaggagccaccctgcacggcgccgggcgaggctgtgcgcgccctcccggaccctccactttggggctttgcggtgtagcggcgcgccccactcccttacgtgttcagtcccgaatcacgtacgggccgctgcagctccaggacggcggacgccagcgctctcggatccccaggcccctccgtgctcatcccggaccgctccgtccctgaggaaaaaccgccccgtgcccggaaccgcggcttctcccacgcggggcaggccggggctgtgagggggcagcccgcctgcggactaggccgggggtttgaggaggcggctctgccggggacaaagccgggggcgtgaggggcggttctgccgggttcggggcgcgcggggcaggttgcgtgaagaggcggaaagtcccactcgccctcggcttctccctgcccggccgccggtgtcccgcccgccgcctccccgcgcagcccggcccgacccgcggcgatggcccagcccggggacccgcggcgcctctgcaggctggtgcaggagggccggctgcgcgccctgaaggaggagctgcaggcggccgggggctgcccggggccggccggggataccctcctgcactgcgccgcgcgccacgggcatcgggacgtgctggcctatctggccgaggcctggggcatggacatcgaggccaccaaccgagactacaagcggcctctgcacgaggcggcctccatgggccaccgagactgcgtgcgctacctgctgggccggggggcagcggtcgactgcctgaagaaggccgactggactcctctgatgatggcctgcacaaggaagaacctgggggtgatccaggagctggtggaacatggcgccaatccactcctgaagaacaaagatggctggaacagtttccacattgccagtcgagaaggcgaccctctgatcctccagtacctgctcactgtttgcccaggtgcctggaagacagagagcaaaattagaaggactcctctgcatactgcagcaatgcatggccatttggaggcagtcaaggtgcttcttaagaggtgccaatatgaaccagactacagagacaactgtggcgtcaccgccttgatggacgcaatccagtgtgggcacatcgacgtcgctaggctgctcctcgatgaacatggggcttgcctttcagcagaagacagcctgggtgcccaggctctgcacagggcagctgtcacagggcaggacgaagccatccgattcttggtctctgaacttggcgtcgatgtagatgtgagagccacatcaacccacctcacagcacttcattatgcagctaaggtttgttacttctgagcacctttcgtttttcggctcagagaaagccaagtgcaacttgcttcagtcatcctgaacctgagttcaaccaaccgcagccacctacgtttgaccccagcgagatcaaagttgtatatctgaggtgtaccagtggtgaagtcagtgccacatctgcactggcccccaaggtcagctccctgggtctgtctccaaaaatggttgctgatgacatcaccaaccattgactggaagagtctgaggatgatagtgaaactgaccagccacagcagacaggcccagattgaggtggtgccttctgcctctgccctgatcgtcacaaccctcaggaaccaccgacagaaagaaagaaacacaaaaacatgaaacacagtggtagcaccacttctgatgagattgtcaacattgcctaacagatgcagcagcagtctttagccagagaactctctggaaccattaaagaattcctgggtgggtcagttactgtatcttacgcaccttacaaaccccagaaggctgcacacagctcctgcacatggtatgccttcaaggaattacccatggatttgaataaggttatatatgatgtaacactcatgcgctttatttcatttttaatgagtttatattctaaaatatttgcttctggggaaaaataattcagacagtacaaataaagattattccaaataggatcat

SEQ ID NO: 6505 - protein, 287 aa, Homo sapiens
MAQPGDPRRLCRLVQEGRLRALKEELQAAGGCPGPAGDTLLHCAARHGHRDVLAYLAEAWGMDIEATNRDYKRPLHEAASMGHRDCVRYLLGRGAAVDCLKKADWTPLMMACTRKNLGVIQELVEHGANPLLKNKDGWNSFHIASREGDPLILQYLLTVCPGAWKTESKIRRTPLHTAAMHGHLEAVKVLLKRCQYEPDYRDNCGVTALMDAIQCGHIDVARLLLDEHGACLSAEDSLGAQALHRAAVTGQDEAIRFLVSELGVDVDVRATSTHLTALHYAAKVCYF

SEQ ID NO: 6506 - DNA, 2664 bp, Homo sapiens
ggggcggagcccaggaacgccggcccccaggggctggaggctggggcggccctgaggacgcgtgcggggcaggtcacgcttgggcctggctgcctcaggagccaccctgcacggcgccgggcgaggctgtgcgcgccctcccggaccctccactttggggctttgcggtgtagcggcgcgccccactcccttacgtgttcagtcccgaatcacgtacgggccgctgcagctccaggacggcggacgccagcgctctcggatccccaggcccctccgtgctcatcccggaccgctccgtccctgaggaaaaaccgccccgtgcccggaaccgcggcttctcccacgcggggcaggccggggctgtgagggggcagcccgcctgcggactaggccgggggtttgaggaggcggctctgccggggacaaagccgggggcgtgaggggcggttctgccgggttcggggcgcgcggggcaggttgcgtgaagaggcggaaagtcccactcgccctcggcttctccctgcccggccgccggtgtcccgcccgccgcctccccgcgcagcccggcccgacccgcggcgatggcccagcccggggacccgcggcgcctctgcaggctggtgcaggagggccggctgcgcgccctgaaggaggagctgcaggcggccgggggctgcccggggccggccggggataccctcctgcactgcgccgcgcgccacgggcatcgggacgtgctggcctatctggccgaggcctggggcatggacatcgaggccaccaaccgagactacaagcggcctctgcacgaggcggcctccatgggccaccgagactgcgtgcgctacctgctgggccggggggcagcggtcgactgcctgaagaaggccgactggactcctctgatgatggcctgcacaaggaagaacctgggggtgatccaggagctggtggaacatggcgccaatccactcctgaagaacaaagatggctggaacagtttccacattgccagtcgagaaggcgaccctctgatcctccagtacctgctcactgtttgcccaggtgcctggaagacagagagcaaaattagaaggactcctctgcatactgcagcaatgcatggccatttggaggcagtcaaggtgcttcttaagaggtgccaatatgaaccagactacagagacaactgtggcgtcaccgccttgatggacgcaatccagtgtgggcacatcgacgtcgctaggctgctcctcgatgaacatggggcttgcctttcagcagaagacagcctgggtgcccaggctctgcacagggcagctgtcacagggcaggacgaagccatccgattcttggtctctgaacttggcgtcgatgtagatgtgagagccacatcaacccacctcacagcacttcattatgcagctaaggaaggacatacaagtacaattcagactctcttatccttgggagctgacatcaattctaaagatgaaaaaaatcgatcagccctgcatctggcctgtgcaggtcagcacttggcctgtgccaagtttctcctgcagtcgggactgaaggattctgaagacatcacgggcaccctggctcagcagctcccaaggagagcagatgtccttcagggctctggccatagcgcaatgacataaggatgtttccaagaggaggcaataaagtgcatgagttgctgggagcctgagcacctttcgtttttcggctcagagaaagccaagtgcaacttgcttcagtcatcctgaacctgagttcaaccaaccgcagccacctacgtttgaccccagcgagatcaaagttgtatatctgaggtgtaccagtggtgaagtcagtgccacatctgcactggcccccaaggtcagctccctgggtctgtctccaaaaatggttgctgatgacatcaccaaccattgactggaagagtctgaggatgatagtgaaactgaccagccacagcagacaggcccagattgaggtggtgccttctgcctctgccctgatcgtcacaaccctcaggaaccaccgacagaaagaaagaaacacaaaaacatgaaacacagtggtagcaccacttctgatgagattgtcaacattgcctaacagatgcagcagcagtctttagccagagaactctctggaaccattaaagaattcctgggggccggttgcggtggctcatgcctgtaatcccagcactttgggaggccgaggcgggaggatcatgaggtcaggagatcgagaccatcctggctaacgtggtgaaaccccgtctcttactaaaaatacaaaaaaattagccaggcatggtggtgggcgcctgtagtcccagctactcaggaggctgaggcaggagaatgctgtgaaccctggaggcagagcttgcagtgagccgaatatgcgccactgcactccagcctgggcaacagagcaagactccgtctccaaaaaaaaaaaaaaaaaaaaagaattcctggggcctgcccagtctgtgagctgccatgttgatagtatcacagatgataccaacagtgaagctgtggaatgcccagctagttaaagaatgcaaaggaaaatattttcacaaagggttatctgataaccaaaaaaaaaaaagacatttcatctaagccactt

SEQ ID NO: 6507 - protein, 361 aa, Homo sapiens; identical to SEQ ID NO: 877

SEQ ID NO: 6508 - DNA, 677 bp, Homo sapiens
aggaagccagcggtgagggagtgagggctctgtgggataaggctcttcggaaggtgtgggaagtaggcttagaagcccttggggagctcagctccagatgcagaaggagagtttccttctcagaggcatgaaggaaagaagaagggcaagaaggaagaaaagttcagggcagagcccacgtgggcgcctcattcaatgccagtatctaggagggtgggggatttgtggagcacatttattacgtttcctacaagaatggataataatgtggacttacatttggcagtttttacacttttttaaattacactctttcagttggaaagagtgatgtggtgtgatatttatttatttatttatttatttatttatttatttatttgagttggagtctagctctgtcgcccaggctagagtgcaatggctcaatctcggctcacagcaacctctgcctcccgggttcaagcgattctcctgcctctacaaaaaatacaaaaaattagctgggcgtggtgtgcctgtagtcccagctaccaaggaagctgaggtgggagaattccttgagcccaggaggtcaaggctgcagtgagctatgattgcacttttgtattccagcctgggtgacagagcaaaaccctgtttcaaaaaaaaaaaaaaaaagcagtagggagggaatg

SEQ ID NO: 6509 - protein, 41 aa, Homo sapiens
MAQSRLTATSASRVQAILLPLQKIQKISWAWCACSPSYQGS

SEQ ID NO: 6510 - DNA, 2099 bp, Homo sapiens
ggggcggagcccaggaacgccggcccccaggggctggaggctggggcggccctgaggacgcgtgcggggcaggtcacgcttgggcctggctgcctcaggagccaccctgcacggcgccgggcgaggctgtgcgcgccctcccggaccctccactttggggctttgcggtgtagcggcgcgccccactcccttacgtgttcagtcccgaatcacgtacgggccgctgcagctccaggacggcggacgccagcgctctcggatccccaggcccctccgtgctcatcccggaccgctccgtccctgaggaaaaaccgccccgtgcccggaaccgcggcttctcccacgcggggcaggccggggctgtgagggggcagcccgcctgcggactaggccgggggtttgaggaggcggctctgccggggacaaagccgggggcgtgaggggcggttctgccgggttcggggcgcgcggggcaggttgcgtgaagaggcggaaagtcccactcgccctcggcttctccctgcccggccgccggtgtcccgcccgccgcctccccgcgcagcccggcccgacccgcggcgatggcccagcccggggacccgcggcgcctctgcaggctggtgcaggagggccggctgcgcgccctgaaggaggagctgcaggcggccgggggctgcccggggccggccggggataccctcctgcactgcgccgcgcgccacgggcatcgggacgtgctggcctatctggccgaggcctggggcatggacatcgaggccaccaaccgagactacaagcggcctctgcacgaggcggcctccatgggccaccgagactgcgtgcgctacctgctgggccggggggcagcggtcgactgcctgaagaaggccgactggactcctctgatgatggcctgcacaaggaagaacctgggggtgatccaggagctggtggaacatggcgccaatccactcctgaagaacaaagatggctggaacagtttccacattgccagtcgagaaggcgaccctctgatcctccagtacctgctcactgtttgcccaggtgcctggaagacagagagcaaaattagaaggactcctctgcatactgcagcaatgcatggccatttggaggcagtcaaggtgcttcttaagaggtgccaatatgaaccagactacagagacaactgtggcgtcaccgccttgatggacgcaatccagtgtgggcacatcgacgtcgctaggctgctcctcgatgaacatggggcttgcctttcagcagaagacagcctgggtgcccaggctctgcacagggcagctgtcacagggcaggacgaagccatccgattcttggtctctgaacttggcgtcgatgtagatgtgagagccacatcaacccacctcacagcacttcattatgcagctaagccctgcatctggcctgtgcaggtcagcacttggcctgtgccaagtttctcctgcagtcgggactgaaggattctgaagacatcacgggcaccctggctcagcagctcccaaggagagcagatgtccttcagggctctggccatagcgcaatgacataaggatgtttccaagaggaggcaataaagtgcatggtaattcatatcctgcttcttaagtcagtcacagattcagcgaaaccagttggaagccagttttccatctcctccacttcctcccttccctcatcctgcatgttccactcctgctgaggagttcccagtgatcagggggctgagttcccagctccatgacaggcacattatggagtcccaagcacagtcataatcttcccgtagtccatatttcactctttgtactcttaaagtagaatagataacgtttgcgcgatcaggctgtgggatccttagagaagcatgtaccatgcatgaatataatatagcatacacactttcacaaacatatgaaatatcttatagtaactgctgcatggtaaggctgtgataataataacaaaaatatcacatacgttgctattagcttgagctataaaatgcagttggcccatttaatttcttccttcataagcttttacttggccattacaatggt

SEQ ID NO: 6511 - protein, 304 aa, Homo sapiens; identical to SEQ ID NO: 881

SEQ ID NO: 6512 - DNA, 1628 bp, Homo sapiens
ggggcggagcccaggaacgccggcccccaggggctggaggctggggcggccctgaggacgcgtgcggggcaggtcacgcttgggcctggctgcctcaggagccaccctgcacggcgccgggcgaggctgtgcgcgccctcccggaccctccactttggggctttgcggtgtagcggcgcgccccactcccttacgtgttcagtcccgaatcacgtacgggccgctgcagctccaggacggcggacgccagcgctctcggatccccaggcccctccgtgctcatcccggaccgctccgtccctgaggaaaaaccgccccgtgcccggaaccgcggcttctcccacgcggggcaggccggggctgtgagggggcagcccgcctgcggactaggccgggggtttgaggaggcggctctgccggggacaaagccgggggcgtgaggggcggttctgccgggttcggggcgcgcggggcaggttgcgtgaagaggcggaaagtcccactcgccctcggcttctccctgcccggccgccggtgtcccgcccgccgcctccccgcgcagcccggcccgacccgcggcgatggcccagcccggggacccgcggcgcctctgcaggctggtgcaggagggccggctgcgcgccctgaaggaggagctgcaggcggccgggggctgcccggggccggccggggataccctcctgcactgcgccgcgcgccacgggcatcgggacgtgctggcctatctggccgaggcctggggcatggacatcgaggccaccaaccgagactacaagcggcctctgcacgaggcggcctccatgggccaccgagactgcgtgcgctacctgctgggccggggggcagcggtcgactgcctgaagaaggccgactggactcctctgatgatggcctgcacaaggaagaacctgggggtgatccaggagctggtggaacatggcgccaatccactcctgaagaacaaagatggctggaacagtttccacattgccagtcgagaaggcgaccctctgatcctccagtacctgctcactgtttgcccaggtgcctggaagacagagagcaaaattagaaggactcctctgcatactgcagcaatgcatggccatttggaggcagtcaaggtgcttcttaagaggtgccaatatgaaccagactacagagacaactgtggcgtcaccgccttgatggacgcaatccagtgtgggcacatcgacgtcgctaggctgctcctcgatgaacatggggcttgcctttcagcagaagacagcctgggtgcccaggctctgcacagggcagctgtcacagggcaggacgaagccatccgattcttggtctctgaacttggcgtcgatgtagatgtgagagccacatcaacccacctcacagcacttcattatgcagctaagccctgcatctggcctgtgcaggtcagcacttggcctgtgccaagtttctcctgcagtcgggactgaaggattctgaagacatcacgggcaccctggctcagcagctcccaaggagagcagatgtccttcagggctctggccatagcgcaatgacataaggatgtttccaagaggaggcaataaagtgcatggtaattc

SEQ ID NO: 6513 - protein, 304 aa, Homo sapiens; identical to SEQ ID NO: 881

SEQ ID NO: 6514 - DNA, 1602 bp, Homo sapiens
ggggcggagcccaggaacgccggcccccaggggctggaggctggggcggccctgaggacgcgtgcggggcaggtcacgcttgggcctggctgcctcaggagccaccctgcacggcgccgggcgaggctgtgcgcgccctcccggaccctccactttggggctttgcggtgtagcggcgcgccccactcccttacgtgttcagtcccgaatcacgtacgggccgctgcagctccaggacggcggacgccagcgctctcggatccccaggcccctccgtgctcatcccggaccgctccgtccctgaggaaaaaccgccccgtgcccggaaccgcggcttctcccacgcggggcaggccggggctgtgagggggcagcccgcctgcggactaggccgggggtttgaggaggcggctctgccggggacaaagccgggggcgtgaggggcggttctgccgggttcggggcgcgcggggcaggttgcgtgaagaggcggaaagtcccactcgccctcggcttctccctgcccggccgccggtgtcccgcccgccgcctccccgcgcagcccggcccgacccgcggcgatggcccagcccggggacccgcggcgcctctgcaggctggtgcaggagggccggctgcgcgccctgaaggaggagctgcaggcggccgggggctgcccggggccggccggggataccctcctgcactgcgccgcgcgccacgggcatcgggacgtgctggcctatctggccgaggcctggggcatggacatcgaggccaccaaccgagactacaagcggcctctgcacgaggcggcctccatgggccaccgagactgcgtgcgctacctgctgggccggggggcagcggtcgactgcctgaagaaggccgactggactcctctgatgatggcctgcacaaggaagaacctgggggtgatccaggagctggtggaacatggcgccaatccactcctgaagaacaaagatggctggaacagtttccacattgccagtcgagaaggcgaccctctgatcctccagtacctgctcactgtttgcccaggtgcctggaagacagagagcaaaattagaaggactcctctgcatactgcagcaatgcatggccatttggaggcagtcaaggtgcttcttaagaggtgccaatatgaaccagactacagagacaactgtggcgtcaccgccttgatggacgcaatccagtgtgggcacatcgacgtcgctaggctgctcctcgatgaacatggggcttgcctttcagcagaagacagcctgggtgcccaggctctgcacagggcagctgtcacaggacatacaagtacaattcagactctcttatccttgggagctgacatcaattctaaagatgaaaaaaatcgatcagccctgcatctggcctgtgcaggtcagcacttggcctgtgccaagtttctcctgcagtcgggactgaaggattctgaagacatcacgggcaccctggctcagcagctcccaaggagagcagatgtccttcagggctctggccatagcgcaatgacataaggatgtttccaagaggaggcaataaagtgcatggtaattc

SEQ ID NO: 6515 - protein, 326 aa, Homo sapiens; identical to SEQ ID NO: 879

SEQ ID NO: 6516 - DNA, 1700 bp, Homo sapiens
ggggcggagcccaggaacgccggcccccaggggctggaggctggggcggccctgaggacgcgtgcggggcaggtcacgcttgggcctggctgcctcaggagccaccctgcacggcgccgggcgaggctgtgcgcgccctcccggaccctccactttggggctttgcggtgtagcggcgcgccccactcccttacgtgttcagtcccgaatcacgtacgggccgctgcagctccaggacggcggacgccagcgctctcggatccccaggcccctccgtgctcatcccggaccgctccgtccctgaggaaaaaccgccccgtgcccggaaccgcggcttctcccacgcggggcaggccggggctgtgagggggcagcccgcctgcggactaggccgggggtttgaggaggcggctctgccggggacaaagccgggggcgtgaggggcggttctgccgggttcggggcgcgcggggcaggttgcgtgaagaggcggaaagtcccactcgccctcggcttctccctgcccggccgccggtgtcccgcccgccgcctccccgcgcagcccggcccgacccgcggcgatggcccagcccggggacccgcggcgcctctgcaggctggtgcaggagggccggctgcgcgccctgaaggaggagctgcaggcggccgggggctgcccggggccggccggggataccctcctgcactgcgccgcgcgccacgggcatcgggacgtgctggcctatctggccgaggcctggggcatggacatcgaggccaccaaccgagactacaagcggcctctgcacgaggcggcctccatgggccaccgagactgcgtgcgctacctgctgggccggggggcagcggtcgactgcctgaagaaggccgactggactcctctgatgatggcctgcacaaggaagaacctgggggtgatccaggagctggtggaacatggcgccaatccactcctgaagaacaaagatggctggaacagtttccacattgccagtcgagaaggcgaccctctgatcctccagtacctgctcactgtttgcccaggtgcctggaagacagagagcaaaattagaaggactcctctgcatactgcagcaatgcatggccatttggaggcagtcaaggtgcttcttaagaggtgccaatatgaaccagactacagagacaactgtggcgtcaccgccttgatggacgcaatccagtgtgggcacatcgacgtcgctaggctgctcctcgatgaacatggggcttgcctttcagcagaagacagcctgggtgcccaggctctgcacagggcagctgtcacagggcaggacgaagccatccgattcttggtctctgaacttggcgtcgatgtagatgtgagagccacatcaacccacctcacagcacttcattatgcagctaaggaaggacatacaagtacaattcagactctcttatccttgggagctgacatcaattctaaagatgaaaaaaatcgatcagccctgcatctggcctgtgcaggtcagcacttggcctgtgccaagtttctcctgcagtcgggactgaaggattctgaagacatcacgggcaccctggctcagcagctcccaaggagagcagatgtccttcagggctctggccatagcgcaatgacataaggatgtttccaagaggaggcaataaagtgcatg

SEQ ID NO: 6517 - protein, 361 aa, Homo sapiens; identical to SEQ ID NO: 877

SEQ ID NO: 6518 - DNA, 1219 bp, Homo sapiens
gagttccttcgagctccccgagtccccgcggagcagcggcggtcgaggggcggggacgggggcggagcccaggaacgccggcccccaggggctggaggctggggcggccctgaggacgcgtgcggggcaggtcacgcttgggcctggctgcctcaggagccaccctgcacggcgccgggcgaggctgtgcgcgccctcccggaccctccactttggggctttgcggtgtagcggcgcgccccactcccttacgtgttcagtcccgaatcacgtacgggccgctgcagctccaggacggcggacgccagcgctctcggatccccaggcccctccgtgctcatcccggaccgctccgtccctgaggaaaaaccgccccgtgcccggaaccgcggcttctcccacgcggggcaggccggggctgtgagggggcagcccgcctgcggactaggccgggggtttgaggaggcggctctgccggggacaaagccgggggcgtgaggggcggttctgccgggttcggggcgcgcggggcaggttgcgtgaagaggcggaaagtcccactcgccctcggcttctccctgcccggccgccggtgtcccgcccgccgcctccccgcgcagcccggcccgacccgcggcgatggcccagcccggggacccgcggcgccctcctgcactgcgccgcgcgccacgggcatcgggacgtgctggcctatctggccgaggcctggggcatggacatcgaggccaccaaccgagactacaagcggcctctgcacgaggcggcctccatgggccaccgagactgcgtgcgctacctgctgggccggggggcagcggtcgactgcctgaagaaggccgacagggtcctcacagaaggcacagaggttgccggtcaaagctgttttcctgcctgccagacccctgaatcctctaggttttccatctgtgccaaggatgtgtgtgttttgaagacctggcccctggcttctaatgtctcagctgcctccatctgacagcttctcctggttggccttaggactcctctgatgatggcctgcacaaggaagaacctgggggtgatccaggagctggtggaacatggcgccaatccactcctgaagaacaaagatggctggaacagtttccacattgccagtcgagaaggcgaccctctgatcctccagtacctgctcactgtttgcccaggtgcctggaag

SEQ ID NO: 6519 - protein, 95 aa, Homo sapiens [sequence omitted]

SEQ ID NO: 6520 - DNA, 3667 bp, Homo sapiens
acagccccggcctgccccgcgtgggagaagccgcggttccgggcacggggcggtttttcctcagggacggagcggtccgggatgagcacggaggggcctggggatccgagagcgctggcgtccgccgtcctggagctgcagcggcccgtacgtgattcgggactgaacactgagacggtttaagcggaagcatcttactgccattgactgccagcatttggctcggagtcacttggctgtgacccagcccttcggtcaaagatggacaaacagagatccgaaccatggtctctatcctaaaccgagaacaaaaagagggagtaggggtcagggaagtcaaagatgcatccctgagttcttcctagcaggcaagcagccgtgcaccaatgacatggccaaaagcaattctgttggccaggacagctgtcaggactctgagggtgacatgatctttcctgcagagagcagctgtgcactgcctcaggaaggcagtgcagggccgggctcaccagggtctgccccgccctccaggaagcggtcttggtcctctgaggaagagagtaaccaggctaccgggaccagccggtgggatggagtttctaagaaagctccacggcaccatttgtctgtgccatgcacaaggcctagggaggccaggcaagaagcagaggacagtacgtctcggctctctgcggagtctggtgaaaccgaccaagatgctggggacgtgggtcctgatcccattcctgactcatactatgggcttcttgggaccttgccctgccaggaagcactgagccacatttgcagcctgcctagtgaggtcctgaggcacgtgtttgccttcctcccggtggaagacctctattggaacctgagcttggtgtgccacttgtggagggagatcatcagtgacccgctgttcattccttggaagaagctgtaccatcgatacctgatgaatgaagagcaagctgtcagcaaagtggacggcatcctgtctaactgtggcatagaaaaggagtcagacctgtgtgtgctgaacctcatacgatacacagccaccactaagtgctctccgagtgtggatcccgagagggtgctgtggagtctgagggaccaccccctcctccccgaggctgaggcgtgtgtgcggcaacacctccccgacctctacgctgctgccgggggtgtcaacatctgggccctggtggcggctgtggtgctcctctccagcagtgtgaatgacatccagcgactgctcttctgcctccggagacccagctccacggtgaccatgccagatgtcaccgagaccctgtactgcatagccgtgcttctctacgccatgagggagaaggggattaacatcagcaataggattcactacaacattttctattgcctatatcttcaggagaattcctgcactcaggccacaaaagttaaagaggagccatctgtctggccaggcaagaaaaccatccaacttacacatgaacaacagctgattctgaatcacaagatggaacctctccaggtggtgaaaattatggcctttgccggcactgggaagacctcaacgctggtcaagtatgcagagaagtggtctcagagcaggtttctgtatgtgacattcaacaagagcatcgcaaagcaggccgaacgcgtcttccccagcaacgtcatctgcaaaaccttccactccatggcctacgggcacatagggcggaagtaccagtcaaagaagaagttgaatctcttcaagttaacacccttcatggtcaactccgtccttgctgaagggaagggtggattcataagagccaagcttgtgtgtaagactctagaaaacttctttgcctcggctgacgaagagctgaccattgatcacgtgcctatttggtgtaagaacagccaaggacagagagtcatggttgagcagagtgaaaaactgaatggtgtccttgaagcgagccgcctctgggataacatgcggaagctgggggagtgcacagaagaggcgcaccagatgactcatgacggctacttgaaactctggcagctgagcaagccttcgctggcctcttttgacgccatctttgtggatgaggcccaggactgcacaccagctatcatgaacatagttctgtctcagccatgtgggaaaatctttgtaggggacccgcaccagcagatctataccttccggggtgcggtcaacgccctgttcacagtgccccacacccacgtcttctatctcacgcagagttttcggtttggtgtggaaatagcttatgtgggagctactatcttggatgtttgcaagagagtcaggaaaaagactttggttggaggaaaccatcagagtggcattagaggtgacgcaaaggggcaagtggccttgttgtcccggaccaacgccaacgtgtttgatgaggccgtacgggtgacggaaggggaattcccttcaaggatacatttgattggggggattaaatcatttggattggacagaatcattgatatttggatccttcttcagccagaggaagaacggaggaaacaaaacctcgtcattaaagacaaatttatcagaagatgggtgcacaaagaaggctttagtggcttcaagaggtatgtgaccgctgccgaggacaaggagcttgaagccaagatcgcagttgttgaaaagtataacatcaggattccagagctggtgcaaaggatagaaaaatgccatatagaagatttggactttgcagagatggagtctcaccatgttggccaggctggtctcgaactcccaacctcagagtacattctgggcactgtgcacaaagccaaaggcctggagtttgacactgtgcatgttttggatgattttgtgaaagtgccttgtgcccggcataacctgccccagcttccgcacttcagagttgagtcattttctgaggatgaatggaatttactgtatgttgcagtaactcgagccaagaagcgtctcatcatgaccaaatcattggaaaacattttgactttggctggggagtacttcttgcaagcagagctgacaagcaacgtcttaaaaacaggcgtggtgcgctgctgcgtgggacagtgcaacaatgccatccctgttgacaccgtccttaccatgaagaagctgcccatcacctatagcaacaggaaggaaaacaaggggggctacctctgccactcctgtgcggagcagcgcatcgggcccctggcgttcctgacagcctccccggagcaggtgcgcgccatggagcgcactgtggagaacatcgtactgccccggcatgaggccctgctcttcctcgtcttctgaggacaaggcgcacgttctccgcagtgcagagcagcttgccgaggaccccgcgtgaagaaagccagcgaggggggcttctgctccctgagactctgggttcacccacagcactttctgaggaagaggacaccagcccaagctggacctgccatttctccactccctacagacagccagtctccacttgcctcccctctggatgtatctggtcagggaagtgggggatgttcttttgataaaaaaaaaaaaaaaaatttatgtatttaaacttttattacaagatttcaattaaacaggcaccatagcactggcata

SEQ ID NO: 6521 - protein, 986 aa, Homo sapiens
MAKSNSVGQDSCQDSEGDMIFPAESSCALPQEGSAGPGSPGSAPPSRKRSWSSEEESNQATGTSRWDGVSKKAPRHHLSVPCTRPREARQEAEDSTSRLSAESGETDQDAGDVGPDPIPDSYYGLLGTLPCQEALSHICSLPSEVLRHVFAFLPVEDLYWNLSLVCHLWREIISDPLFIPWKKLYHRYLMNEEQAVSKVDGILSNCGIEKESDLCVLNLIRYTATTKCSPSVDPERVLWSLRDHPLLPEAEACVRQHLPDLYAAAGGVNIWALVAAVVLLSSSVNDIQRLLFCLRRPSSTVTMPDVTETLYCIAVLLYAMREKGINISNRIHYNIFYCLYLQENSCTQATKVKEEPSVWPGKKTIQLTHEQQLILNHKMEPLQVVKIMAFAGTGKTSTLVKYAEKWSQSRFLYVTFNKSIAKQAERVFPSNVICKTFHSMAYGHIGRKYQSKKKLNLFKLTPFMVNSVLAEGKGGFIRAKLVCKTLENFFASADEELTIDHVPIWCKNSQGQRVMVEQSEKLNGVLEASRLWDNMRKLGECTEEAHQMTHDGYLKLWQLSKPSLASFDAIFVDEAQDCTPAIMNIVLSQPCGKIFVGDPHQQIYTFRGAVNALFTVPHTHVFYLTQSFRFGVEIAYVGATILDVCKRVRKKTLVGGNHQSGIRGDAKGQVALLSRTNANVFDEAVRVTEGEFPSRIHLIGGIKSFGLDRIIDIWILLQPEEERRKQNLVIKDKFIRRWVHKEGFSGFKRYVTAAEDKELEAKIAVVEKYNIRIPELVQRIEKCHIEDLDFAEMESHHVGQAGLELPTSEYILGTVHKAKGLEFDTVHVLDDFVKVPCARHNLPQLPHFRVESFSEDEWNLLYVAVTRAKKRLIMTKSLENILTLAGEYFLQAELTSNVLKTGVVRCCVGQCNNAIPVDTVLTMKKLPITYSNRKENKGGYLCHSCAEQRIGPLAFLTASPEQVRAMERTVENIVLPRHEALLFLVF

SEQ ID NO: 6522 - DNA, 3600 bp, Homo sapiens
gcggcggggcggagctcgcggaggaagtcggcgggcgtctcgggctccaggtcccggccagaggaggagctcgctgccgggggacgctgggctgagcggccggcggcgcgggcccggcggcggcggcagcggggtccgggtccggagcgccacatgagacggtttaagcggaagcatcttactgccattgactgccagcatttggctcggagtcacttggctgtgacccagcccttcggtcaaagatggacaaacagagatccgaaccatggtctctatcctaaaccgagaacaaaaagagggagtaggggtcagggaagtcaaagatgcatccctgagttcttcctagcaggcaagcagccgtgcaccaatgacatggccaaaagcaattctgttggccaggacagctgtcaggactctgagggtgacatgatctttcctgcagagagcagctgtgcactgcctcaggaaggcagtgcagggccgggctcaccagggtctgccccgccctccaggaagcggtcttggtcctctgaggaagagagtaaccaggctaccgggaccagccggtgggatggagtttctaagaaagctccacggcaccatttgtctgtgccatgcacaaggcctagggaggccaggcaagaagcagaggacagtacgtctcggctctctgcggagtctggtgaaaccgaccaagatgctggggacgtgggtcctgatcccattcctgactcatactatgggcttcttgggaccttgccctgccaggaagcactgagccacatttgcagcctgcctagtgaggtcctgaggcacgtgtttgccttcctcccggtggaagacctctattggaacctgagcttggtgtgccacttgtggagggagatcatcagtgacccgctgttcattccttggaagaagctgtaccatcgatacctgatgaatgaagagcaagctgtcagcaaagtggacggcatcctgtctaactgtggcatagaaaaggagtcagacctgtgtgtgctgaacctcatacgatacacagccaccactaagtgctctccgagtgtggatcccgagagggtgctgtggagtctgagggaccaccccctcctccccgaggctgaggcgtgtgtgcggcaacacctccccgacctctacgctgctgccgggggtgtcaacatctgggccctggtggcggctgtggtgctcctctccagcagtgtgaatgacatccagcgactgctcttctgcctccggagacccagctccacggtgaccatgccagatgtcaccgagaccctgtactgcatagccgtgcttctctacgccatgagggagaaggggattaacatcagcaataggattcactacaacattttctattgcctatatcttcaggagaattcctgcactcaggccacaaaagttaaagaggagccatctgtctggccaggcaagaaaaccatccaacttacacatgaacaacagctgattctgaatcacaagatggaacctctccaggtggtgaaaattatggcctttgccggcactgggaagacctcaacgctggtcaagtatgcagagaagtggtctcagagcaggtttctgtatgtgacattcaacaagagcatcgcaaagcaggccgaacgcgtcttccccagcaacgtcatctgcaaaaccttccactccatggcctacgggcacatagggcggaagtaccagtcaaagaagaagttgaatctcttcaagttaacacccttcatggtcaactccgtccttgctgaagggaagggtggattcataagagccaagcttgtgtgtaagactctagaaaacttctttgcctcggctgacgaagagctgaccattgatcacgtgcctatttggtgtaagaacagccaaggacagagagtcatggttgagcagagtgaaaaactgaatggtgtccttgaagcgagccgcctctgggataacatgcggaagctgggggagtgcacagaagaggcgcaccagatgactcatgacggctacttgaaactctggcagctgagcaagccttcgctggcctcttttgacgccatctttgtggatgaggcccaggactgcacaccagctatcatgaacatagttctgtctcagccatgtgggaaaatctttgtaggggacccgcaccagcagatctataccttccggggtgcggtcaacgccctgttcacagtgccccacacccacgtcttctatctcacgcagagttttcggtttggtgtggaaatagcttatgtgggagctactatcttggatgtttgcaagagagtcaggaaaaagactttggttggaggaaaccatcagagtggcattagaggtgacgcaaaggggcaagtggccttgttgtcccggaccaacgccaacgtgtttgatgaggccgtacgggtgacggaaggggaattcccttcaaggatacatttgattggggggattaaatcatttggattggacagaatcattgatatttggatccttcttcagccagaggaagaacggaggaaacaaaacctcgtcattaaagacaaatttatcagaagatgggtgcacaaagaaggctttagtggcttcaagaggtatgtgaccgctgccgaggacaaggagcttgaagccaagatcgcagttgttgaaaagtataacatcaggattccagagctggtgcaaaggatagaaaaatgccatatagaagatttggactttgcagagtacattctgggcactgtgcacaaagccaaaggcctggagtttgacactgtgcatgttttggatgattttgtgaaagtgccttgtgcccggcataacctgccccagcttccgcacttcagagttgagtcattttctgaggatgaatggaatttactgtatgttgcagtaactcgagccaagaagcgtctcatcatgaccaaatcattggaaaacattttgactttggctggggagtacttcttgcaagcagagctgacaagcaacgtcttaaaaacaggcgtggtgcgctgctgcgtgggacagtgcaacaatgccatccctgttgacaccgtccttaccatgaagaagctgcccatcacctatagcaacaggaaggaaaacaaggggggctacctctgccactcctgtgcggagcagcgcatcgggcccctggcgttcctgacagcctccccggagcaggtgcgcgccatggagcgcactgtggagaacatcgtactgccccggcatgaggccctgctcttcctcgtcttctgaggacaaggcgcacgttctccgcagtgcagagcagcttgccgaggaccccgcgtgaagaaagccagcgaggggggcttctgctccctgagactctgggttcacccacagcactttctgaggaagaggacaccagcccaagctggacctgccatttctccactccctacagacagccagtctccacttgcctcccctctggatgtatctggtcagggaagtgggggatgttcttttgataaaaaaaaaaaaaaaaatttatgtatttaaacttttattacaagatttcaattaaacaggcaccatagcactggcata

SEQ ID NO: 6523 - protein, 1043 aa, Homo sapiens; identical to SEQ ID NO: 887

SEQ ID NO: 6524 - DNA, 3760 bp, Homo sapiens
agaggaggagctcgctgccgggggacgctgggctgagcggccggcggcgcgggcccggcggcggcggcagcggggtccgggtccggagcgccacagaaaaacatagaacggaaagcccagcccatccttgttggctgtcatacacgagtgctgtctccaagggagtcacaggtgtctcagatgctgccattggacctgtcaagtgcctgagtcatgtgataatgggctacattgcgcagggcccctgggccatctccacaggagatgccagaggacgagtgcccacttgctggtcttcacagagcacgctgaaatgagacggtttaagcggaagcatcttactgccattgactgccagcatttggctcggagtcacttggctgtgacccagcccttcggtcaaagatggacaaacagagatccgaaccatggtctctatcctaaaccgagaacaaaaagagggagtaggggtcagggaagtcaaagatgcatccctgagttcttcctagcaggcaagcagccgtgcaccaatgacatggccaaaagcaattctgttggccaggacagctgtcaggactctgagggtgacatgatctttcctgcagagagcagctgtgcactgcctcaggaaggcagtgcagggccgggctcaccagggtctgccccgccctccaggaagcggtcttggtcctctgaggaagagagtaaccaggctaccgggaccagccggtgggatggagtttctaagaaagctccacggcaccatttgtctgtgccatgcacaaggcctagggaggccaggcaagaagcagaggacagtacgtctcggctctctgcggagtctggtgaaaccgaccaagatgctggggacgtgggtcctgatcccattcctgactcatactatgggcttcttgggaccttgccctgccaggaagcactgagccacatttgcagcctgcctagtgaggtcctgaggcacgtgtttgccttcctcccggtggaagacctctattggaacctgagcttggtgtgccacttgtggagggagatcatcagtgacccgctgttcattccttggaagaagctgtaccatcgatacctgatgaatgaagagcaagctgtcagcaaagtggacggcatcctgtctaactgtggcatagaaaaggagtcagacctgtgtgtgctgaacctcatacgatacacagccaccactaagtgctctccgagtgtggatcccgagagggtgctgtggagtctgagggaccaccccctcctccccgaggctgaggcgtgtgtgcggcaacacctccccgacctctacgctgctgccgggggtgtcaacatctgggccctggtggcggctgtggtgctcctctccagcagtgtgaatgacatccagcgactgctcttctgcctccggagacccagctccacggtgaccatgccagatgtcaccgagaccctgtactgcatagccgtgcttctctacgccatgagggagaaggggattaacatcagcaataggattcactacaacattttctattgcctatatcttcaggagaattcctgcactcaggccacaaaagttaaagaggagccatctgtctggccaggcaagaaaaccatccaacttacacatgaacaacagctgattctgaatcacaagatggaacctctccaggtggtgaaaattatggcctttgccggcactgggaagacctcaacgctggtcaagtatgcagagaagtggtctcagagcaggtttctgtatgtgacattcaacaagagcatcgcaaagcaggccgaacgcgtcttccccagcaacgtcatctgcaaaaccttccactccatggcctacgggcacatagggcggaagtaccagtcaaagaagaagttgaatctcttcaagttaacacccttcatggtcaactccgtccttgctgaagggaagggtggattcataagagccaagcttgtgtgtaagactctagaaaacttctttgcctcggctgacgaagagctgaccattgatcacgtgcctatttggtgtaagaacagccaaggacagagagtcatggttgagcagagtgaaaaactgaatggtgtccttgaagcgagccgcctctgggataacatgcggaagctgggggagtgcacagaagaggcgcaccagatgactcatgacggctacttgaaactctggcagctgagcaagccttcgctggcctcttttgacgccatctttgtggatgaggcccaggactgcacaccagctatcatgaacatagttctgtctcagccatgtgggaaaatctttgtaggggacccgcaccagcagatctataccttccggggtgcggtcaacgccctgttcacagtgccccacacccacgtcttctatctcacgcagagttttcggtttggtgtggaaatagcttatgtgggagctactatcttggatgtttgcaagagagtcaggaaaaagactttggttggaggaaaccatcagagtggcattagaggtgacgcaaaggggcaagtggccttgttgtcccggaccaacgccaacgtgtttgatgaggccgtacgggtgacggaaggggaattcccttcaaggatacatttgattggggggattaaatcatttggattggacagaatcattgatatttggatccttcttcagccagaggaagaacggaggaaacaaaacctcgtcattaaagacaaatttatcagaagatgggtgcacaaagaaggctttagtggcttcaagaggtatgtgaccgctgccgaggacaaggagcttgaagccaagatcgcagttgttgaaaagtataacatcaggattccagagctggtgcaaaggatagaaaaatgccatatagaagatttggactttgcagagtacattctgggcactgtgcacaaagccaaaggcctggagtttgacactgtgcatgttttggatgattttgtgaaagtgccttgtgcccggcataacctgccccagcttccgcacttcagagttgagtcattttctgaggatgaatggaatttactgtatgttgcagtaactcgagccaagaagcgtctcatcatgaccaaatcattggaaaacattttgactttggctggggagtacttcttgcaagcagagctgacaagcaacgtcttaaaaacaggcgtggtgcgctgctgcgtgggacagtgcaacaatgccatccctgttgacaccgtccttaccatgaagaagctgcccatcacctatagcaacaggaaggaaaacaaggggggctacctctgccactcctgtgcggagcagcgcatcgggcccctggcgttcctgacagcctccccggagcaggtgcgcgccatggagcgcactgtggagaacatcgtactgccccggcatgaggccctgctcttcctcgtcttctgaggacaaggcgcacgttctccgcagtgcagagcagcttgccgaggaccccgcgtgaagaaagccagcgaggggggcttctgctccctgagactctgggttcacccacagcactttctgaggaagaggacaccagcccaagctggacctgccatttctccactccctacagacagccagtctccacttgcctcccctctggatgtatctggtcagggaagtgggggatgttcttttgataaaaaaaaaaaaaaaaatttatgtatttaaacttttattacaagatttcaattaaacaggcaccatagcactggcata

SEQ ID NO: 6525 - protein, 1043 aa, Homo sapiens; identical to SEQ ID NO: 887

SEQ ID NO: 6526 - DNA, 3613 bp, Homo sapiens
gctgggctgagcggccggcggcgcgggcccggcggcggcggcagcggggtccgggtccggagcgccacatctgtggtccgaagacaaccctatgaggcatcagtagggttttacaggtggggaagtggaggcctaaccaagtcagtgactttcttacagaattacagtgagacggtttaagcggaagcatcttactgccattgactgccagcatttggctcggagtcacttggctgtgacccagcccttcggtcaaagatggacaaacagagatccgaaccatggtctctatcctaaaccgagaacaaaaagagggagtaggggtcagggaagtcaaagatgcatccctgagttcttcctagcaggcaagcagccgtgcaccaatgacatggccaaaagcaattctgttggccaggacagctgtcaggactctgagggtgacatgatctttcctgcagagagcagctgtgcactgcctcaggaaggcagtgcagggccgggctcaccagggtctgccccgccctccaggaagcggtcttggtcctctgaggaagagagtaaccaggctaccgggaccagccggtgggatggagtttctaagaaagctccacggcaccatttgtctgtgccatgcacaaggcctagggaggccaggcaagaagcagaggacagtacgtctcggctctctgcggagtctggtgaaaccgaccaagatgctggggacgtgggtcctgatcccattcctgactcatactatgggcttcttgggaccttgccctgccaggaagcactgagccacatttgcagcctgcctagtgaggtcctgaggcacgtgtttgccttcctcccggtggaagacctctattggaacctgagcttggtgtgccacttgtggagggagatcatcagtgacccgctgttcattccttggaagaagctgtaccatcgatacctgatgaatgaagagcaagctgtcagcaaagtggacggcatcctgtctaactgtggcatagaaaaggagtcagacctgtgtgtgctgaacctcatacgatacacagccaccactaagtgctctccgagtgtggatcccgagagggtgctgtggagtctgagggaccaccccctcctccccgaggctgaggcgtgtgtgcggcaacacctccccgacctctacgctgctgccgggggtgtcaacatctgggccctggtggcggctgtggtgctcctctccagcagtgtgaatgacatccagcgactgctcttctgcctccggagacccagctccacggtgaccatgccagatgtcaccgagaccctgtactgcatagccgtgcttctctacgccatgagggagaaggggattaacatcagcaataggattcactacaacattttctattgcctatatcttcaggagaattcctgcactcaggccacaaaagttaaagaggagccatctgtctggccaggcaagaaaaccatccaacttacacatgaacaacagctgattctgaatcacaagatggaacctctccaggtggtgaaaattatggcctttgccggcactgggaagacctcaacgctggtcaagtatgcagagaagtggtctcagagcaggtttctgtatgtgacattcaacaagagcatcgcaaagcaggccgaacgcgtcttccccagcaacgtcatctgcaaaaccttccactccatggcctacgggcacatagggcggaagtaccagtcaaagaagaagttgaatctcttcaagttaacacccttcatggtcaactccgtccttgctgaagggaagggtggattcataagagccaagcttgtgtgtaagactctagaaaacttctttgcctcggctgacgaagagctgaccattgatcacgtgcctatttggtgtaagaacagccaaggacagagagtcatggttgagcagagtgaaaaactgaatggtgtccttgaagcgagccgcctctgggataacatgcggaagctgggggagtgcacagaagaggcgcaccagatgactcatgacggctacttgaaactctggcagctgagcaagccttcgctggcctcttttgacgccatctttgtggatgaggcccaggactgcacaccagctatcatgaacatagttctgtctcagccatgtgggaaaatctttgtaggggacccgcaccagcagatctataccttccggggtgcggtcaacgccctgttcacagtgccccacacccacgtcttctatctcacgcagagttttcggtttggtgtggaaatagcttatgtgggagctactatcttggatgtttgcaagagagtcaggaaaaagactttggttggaggaaaccatcagagtggcattagaggtgacgcaaaggggcaagtggccttgttgtcccggaccaacgccaacgtgtttgatgaggccgtacgggtgacggaaggggaattcccttcaaggatacatttgattggggggattaaatcatttggattggacagaatcattgatatttggatccttcttcagccagaggaagaacggaggaaacaaaacctcgtcattaaagacaaatttatcagaagatgggtgcacaaagaaggctttagtggcttcaagaggtatgtgaccgctgccgaggacaaggagcttgaagccaagatcgcagttgttgaaaagtataacatcaggattccagagctggtgcaaaggatagaaaaatgccatatagaagatttggactttgcagagtacattctgggcactgtgcacaaagccaaaggcctggagtttgacactgtgcatgttttggatgattttgtgaaagtgccttgtgcccggcataacctgccccagcttccgcacttcagagttgagtcattttctgaggatgaatggaatttactgtatgttgcagtaactcgagccaagaagcgtctcatcatgaccaaatcattggaaaacattttgactttggctggggagtacttcttgcaagcagagctgacaagcaacgtcttaaaaacaggcgtggtgcgctgctgcgtgggacagtgcaacaatgccatccctgttgacaccgtccttaccatgaagaagctgcccatcacctatagcaacaggaaggaaaacaaggggggctacctctgccactcctgtgcggagcagcgcatcgggcccctggcgttcctgacagcctccccggagcaggtgcgcgccatggagcgcactgtggagaacatcgtactgccccggcatgaggccctgctcttcctcgtcttctgaggacaaggcgcacgttctccgcagtgcagagcagcttgccgaggaccccgcgtgaagaaagccagcgaggggggcttctgctccctgagactctgggttcacccacagcactttctgaggaagaggacaccagcccaagctggacctgccatttctccactccctacagacagccagtctccacttgcctcccctctggatgtatctggtcagggaagtgggggatgttcttttgataaaaaaaaaaaaaaaaatttatgtatttaaacttttattacaagatttcaattaaacaggcaccatagcactggcata

SEQ ID NO: 6527 - protein, 969 aa, Homo sapiens
MAKSNSVGQDSCQDSEGDMIFPAESSCALPQEGSAGPGSPGSAPPSRKRSWSSEEESNQATGTSRWDGVSKKAPRHHLSVPCTRPREARQEAEDSTSRLSAESGETDQDAGDVGPDPIPDSYYGLLGTLPCQEALSHICSLPSEVLRHVFAFLPVEDLYWNLSLVCHLWREIISDPLFIPWKKLYHRYLMNEEQAVSKVDGILSNCGIEKESDLCVLNLIRYTATTKCSPSVDPERVLWSLRDHPLLPEAEACVRQHLPDLYAAAGGVNIWALVAAVVLLSSSVNDIQRLLFCLRRPSSTVTMPDVTETLYCIAVLLYAMREKGINISNRIHYNIFYCLYLQENSCTQATKVKEEPSVWPGKKTIQLTHEQQLILNHKMEPLQVVKIMAFAGTGKTSTLVKYAEKWSQSRFLYVTFNKSIAKQAERVFPSNVICKTFHSMAYGHIGRKYQSKKKLNLFKLTPFMVNSVLAEGKGGFIRAKLVCKTLENFFASADEELTIDHVPIWCKNSQGQRVMVEQSEKLNGVLEASRLWDNMRKLGECTEEAHQMTHDGYLKLWQLSKPSLASFDAIFVDEAQDCTPAIMNIVLSQPCGKIFVGDPHQQIYTFRGAVNALFTVPHTHVFYLTQSFRFGVEIAYVGATILDVCKRVRKKTLVGGNHQSGIRGDAKGQVALLSRTNANVFDEAVRVTEGEFPSRIHLIGGIKSFGLDRIIDIWILLQPEEERRKQNLVIKDKFIRRWVHKEGFSGFKRYVTAAEDKELEAKIAVVEKYNIRIPELVQRIEKCHIEDLDFAEYILGTVHKAKGLEFDTVHVLDDFVKVPCARHNLPQLPHFRVESFSEDEWNLLYVAVTRAKKRLIMTKSLENILTLAGEYFLQAELTSNVLKTGVVRCCVGQCNNAIPVDTVLTMKKLPITYSNRKENKGGYLCHSCAEQRIGPLAFLTASPEQVRAMERTVENIVLPRHEALLFLVF

SEQ ID NO: 6528 - DNA, 3286 bp, Homo sapiens
cctgcccttgtactctcacctaacattaactacttccttattccacacaccacattggggtagcgcttcaacacaggaatttcaagggacacacttcagtccatggcagtatgtatgttgatttttgttgcgtttctttgtttcttcctgttttttctgggagataatataatcacatctgaaatgttggattattaaaggtatttgttgcattggagaggtcgaggcttggagatgggctcttttcgctctggggatggggggcagtgcactcgattgttgggggagcgagtccaagctcacccccggtctcccccacagtccaggggagacttggagaggctttggaacggcgtgtgccagctgagtctgacgagtctgacgatgtcctgtgcctctgctgattgaactttgtcatctttggtccctcttggtgacttggagcctactgttttcaggtccttagtagtcagatcttgttatccatagtgtagtcccttttcttgggaccttaaaagatagaatgtgttcatgcgtctaaagcaatgtcatgtcataagaggtagacagtggagcgaccgaggctcagaaagaggctggtgttttatccacaggtgtagtaagtatcattcaaacaagagtctcagtgctaggagcagtgtttccctttgccttccactggtccttacagtttttcaggttgtttgtctcttcaagtcacagctggcgcccctcattccctgaagagcccgtcctggtctcttcctcctcttggagatatacatagaaactacacctttcccaggactgtgttatctgagaatgctttgccagccatagatatatttaaatccttttctttcttttttccattaaatggtggtaggtattttctttttagaaatgggaaggagtttaaatccatctgaggaaaaataagatgcagattgtgacttgaatttgagactttctaaatctacttttttttctggtaggattcactacaacattttctattgcctatatcttcaggagaattcctgcactcaggccacaaaagttaaagaggagccatctgtctggccaggcaagaaaaccatccaacttacacatgaacaacagctgattctgaatcacaagatggaacctctccaggtggtgaaaattatggcctttgccggcactgggaagacctcaacgctggtcaagtatgcagagaagtggtctcagagcaggtttctgtatgtgacattcaacaagagcatcgcaaagcaggccgaacgcgtcttccccagcaacgtcatctgcaaaaccttccactccatggcctacgggcacatagggcggaagtgagtactgctgtcactagtggcactgttgctgctggcacggtcgcgtcttactgttttcccgtgacgatcacatgtgagcttacaccacagtgaccccgaggagtgtagtgctgttatctccacttacaggcaggaaacaaatacataggtttagccatttgtacttttatcctgtagcaacatattgtttacatataatgccgtcttgccaagaggggtgttctcatggaagtgaggcacagaaagtcaaaatgacttgcttaaagttcagagtctcacaaatcctgatcagttgtaggcttttcttggaagggagtgaggaagactcagccgaggcacacttgacccaggtctcctggatgtagaggcatcagggaactccaagggtccctccggggaccttctggagcccagcttcatggtggaatagcagtgtctgccgaaagctggttcctattctgggttggtacatgtgagtcctgaaagccatttccagtcagacatggaccatgcagaactttttcgctttaaaacattaacactcgcctgtgtgtggcacttgaagctacctcctggtgacattagagagaatggaggggacgttcaatagcaccaagccaggagagccacgtgctgttcatttgggatgggtattgcaggtaccagtcaaagaagaagttgaatctcttcaagttaacacccttcatggtcaactccgtccttgctgaagggaagggtggattcataagagccaagcttgtgtgtaagactctagaaaacttctttgcctcggctgacgaagagctgaccattgatcacgtgcctatttggtgtaagaacagccaaggacagagagtcatggttgagcagagtgaaaaactggtgagtgtctaagtgtctgaagtgttagggatctgaggatgggggaacaggggaagtgttagggatctgaggatggggaaacaggggaagtgttaggggtctgaggatggggaaacaggggaagtgttaggggtctgaggatggggaaacgggaagtgttagggatctgaggatggggaaatgggaagtgttaggggtctgaggatgggggatcaggggaagtgttagggatctgaggatgggggaacgggaagtgttagggatctgaggatgggcaaacagggagtgtgggacagcattatttcttctttcatttcttcagacctggtcataggaggttgaaggtgggagggtgaggctgtaggcccatggtgatggctgtgaattgttgggtattttctcctgtgaaggacactggtgaccatctcacttaagcctcggaatagtcctcccatttaacagagaaggcagacatggaacgacccgcctcagtttataagagcttgtcactggggctcctggacctcaaaactgatcttaactgaaggctggaatctctcctgattttcttgggttattggttctatggaatagattttgctagtgggaaagtctgtttctttttttcatcaagtcttttcaatcatgtgccattgtttttgtgaattaagcatcagtcataaatctagaagaacaatttggccttttctggttcacctaactgttatgatctctgtcctgtcacgggcatggcacggcccggctgcttcctgtctcagcactggagaccctctggcgtggagaggctgttgaggagacccaggaggttagggtggtgtctgcggtcccccttctgtgaggatgccctggctccactgctgtatgggagttgacagtgtgaccgcagggtgctgcctttgccagggtctcaaactctgggttaccatatgctttacttcctagaatggtgtccttgaagcgagccgcctctgggataacatgcggaagctgggggagtgcacagaagaggcgcaccagatgactcatgacgg

SEQ ID NO: 6529 - protein, 70 aa, Homo sapiens [sequence omitted]

SEQ ID NO: 6530 - DNA, 691 bp, Homo sapiens
tttcttggaagggagtgaggaagactcagccgaggcacacttgacccaggtctcctggatgtagaggcatcagggaactccaagggtccctccggggaccttctggagcccagcttcatggtggaatagcagtgtctgccgaaagctggttcctattctgggttggtacatgtgagtcctgaaagccatttccagtcagacatggaccatgcagaactttttcgctttaaaacattaacactcgcctgtgtgtggcacttgaagctacctcctggtgacattagagagaatggaggggacgttcaatagcaccaagccaggagagccacgtgctgttcatttgggatgggtattgcaggtaccagtcaaagaagaagttgaatctcttcaagttaacacccttcatggtcaactccgtccttgctgaagggaagggtggattcataagagccaagcttgtgtgtaagactctagaaaacttctttgcctcggctgacgaagagctgaccattgatcacgtgcctatttggtgtaagaacagccaaggacagagagtcatggttgagcagatttagagtcattttctgaggatgaatggaatttactgtatgttgcagtaactcgagccaagaagcgtctcatcatgaccaaatcattggaaaacattttgactttggctggggtaagcaga

SEQ ID NO: 6531 - protein, 56 aa, Homo sapiens
MVNSVLAEGKGGFIRAKLVCKTLENFFASADEELTIDHVPIWCKNSQGQRVMVEQI

SEQ ID NO: 6532 - DNA, 670 bp, Homo sapiens
tccttcagtatttctttatgcaagtattagcaaattcgtaggtattttcatattctccttttccacagaaggtagcatttcagatacactgttgtgtactttgctttgtcacttagaagccatgggaatcactcttttatttattttttactcttttattttttgcccttttattcttttatttgttgtcctacccaaattaggaaatccctctttatcagctcacagagctctctcgcctcttggtcagctgcatagtgttctgtaggttgcagtaggctgaaatcgtgccactgcactccagtgtgggcaacaaagtgagactctgtctcaaaacaaacaaacaaaaaagtgaagtagactttttaaagctgattggaaggttgtcagttggttgctgcatgcattttgttttccccatagaagaaaagaatacagaatctagagaaatacttccccattactgagactggggtgggctgtctgccctcaggggtcctgcgaggaagtcccagaaaaactgcctatttgtgggaacagattttttaaggctgtaagaccttgttagaagtggaggcactctgctgttttttttttttttttaaaaaacagagtctcactctgtcgcccaggctggagggcagtggtgtgatcttggctcaccgcaacc

SEQ ID NO: 6533 - protein, 48 aa, Homo sapiens
MGITLLFIFYSFIFCPFILLFVVLPKLGNPSLSAHRALSPLGQLHSVL

SEQ ID NO: 6534 - DNA, 488 bp, Homo sapiens
tgcttgtgagctctgtgcttatctgggttgtaggtgaggagataagagagagctgtgtgatcctttattaggggcttttcatatgagaggcacaagaggtgcgcgccatggagcgcactgtggagaacatcgtactgccccggcatgaggccctgctcttcctcgtcttctgaggacaaggcgcacgttctccgcagtgcagagcagcttgccgaggaccccgcgtgaagaaagccagcgaggggggcttctgctccctgagactctgggttcacccacagcactttctgaggaagaggacaccagcccaagctggacctgccatttctccactccctacagacagccagtctccacttgcctcccctctggatgtatctggtcagggaagtgggggatgttcttttgataaaaaaaaaaaaaaaaatttatgtatttaaacttttattacaagatttcaattaaacaggcaccatagcactggcata

SEQ ID NO: 6535 - protein, 30 aa, Homo sapiens
MYLVREVGDVLLIKKKKKIYVFKLLLQDFN

SEQ ID NO: 6536 - DNA, 561 bp, Homo sapiens
agactgatccaggctttatgagtggctgcgaccatgctgtccaattagtatggtgtcaccaatatatggatccatgcgattgattatctgtggagtgtccggatggtccaggacccttcagattatattacgatggagaacaggaaaattaaccaaaacctgggcaagactgcgaatgtgtgctactatccatcccagttctggaggccggagttggaaatcagtttcactgggcacacatggaggtgtttgaagggctgcccgtgccagaggctctcagggagaatcccttccttgtctgttccagctctacctcctcctctgctgtgtggggctgagctgttgttctagaagaaaaaaggatgtcttgtcctgtgtgaactggaacagcgcttagaaatcgaggagcgtggccctgggaacagaggctgtgtgctgttgtttttgcttcctcattaatgagcatgggccttcagtgagctcctttcccttgctggccttcatttgtaaaatgttggctgacggctaagggtgtttattcctctaaaatcacctaattag

SEQ ID NO: 6537 - protein, 82 aa, Homo sapiens; identical to SEQ ID NO: 889

SEQ ID NO: 6538 - DNA, 401 bp, Homo sapiens
gagagtttaactggctaagaccaggccagtacatgagcgcaggcccaagatccgaaagggaaagtcctgaacgcccccttccccctgtcttttcggcggggctttgggagtttgcagggtgttctgagtgtttgggcctcagggattctcacctccgggagattccaggagctgtagggggtggaatgcgagtaggaggagagttgcagatggatatcgtggcctgctgatggttttggagcccaggtccagacatttcttgattgaagtagacattcaagaagtgtgaaatgcacagtcagaaaatctgggacttctctttttccttgtcagaatcaggattgaaaaatgattcagcggggaatagcttctttacagtgagagcccgtgttattgatttt

SEQ ID NO: 6539 - protein, 65 aa, Homo sapiens
MSAGPRSERESPERPLPPVFSAGLWEFAGCSECLGLRDSHLREIPGAVGGGMRVGGELQMDIVAC

SEQ ID NO: 6540 - DNA, 601 bp, Homo sapiens
tgcagaggagataagcaagtcctggggagaacatggacgtttggcagccagcgagaaagaaaggaggggaaggcctggagattggggtgacagcccttattggtgtcactgaaacgtgtgtggttaatctcagtccttgggatccacataaaaccacgtgaatgtgcttctcatctaataaattatatatgaaggatgctgaaagcagggccttggagagagatgtgtgtacccgtgttcacagttcacagcagcattcctccagttaccaagaggtggaagcaacccaaagtccatcgatggaaaaatggtaagcagatatagtatgaatagatacagacagtgggatattattctgctttagaaaggaaggaaattctgatacataccaccgcatggatgcaccttgaggacattatgctgagtgaaatgagccagtcacaaaagacaaatattgcatgattctatgtatgtgaggtccctagagtagtaatagagacagaaagtgcaatggtggtggccagtgatttcaaggagagcggaaaggagagttactgtttaatgggtgcagagtttccattttaaatgacaaaaagttcta

SEQ ID NO: 6541 - protein, 42 aa, Homo sapiens
MDVWQPARKKGGEGLEIGVTALIGVTETCVVNLSPWDPHKTT

SEQ ID NO: 6542 - DNA, 1688 bp, Homo sapiens
tacacaggacaactccatgtggttgattttactggcatgtcttggtgacgaagagttggccaagtgaatgatgcatcttttacttggagctctccagcctttgtcatagttcccagaccttttttccttgtggtcatccaggaggtgatcaattacatgtgcacagtgctaggacgggaggcagagccggctcagagcaggtccaccagcccacctatagcaggaagcgtgtcggtgcttaggaaatctaggacttccagcttccctcatgtcagatagaaaaaaagtcaggaaaccagctcgtggacaggggctttggttccaaaacttggacaaacctgatgccttaaggaaaaggttaagatgagaggggacttccagagtcaatgaacgtcacccttcagcggacggataccgggagcgcttgggcgaaacagcagagaaagaaagactgtggtcggggaagtggaatgcttcgatgcaggccagagttcaaggctctggggctggcctcacaagaggcttcttccacggggcttgacaccagagcagcccccgcgtgaaatgagaaggcatgcttagcactgggaggaaaagctgagttaagaaaattctttatcatgtttgccttccctggggaaacattcaggcagtaaaatgacatccacgtgttcctgtcggacgcagcggcttcgggaacaagttagcgctgggggactatctgggctcgtctctctctgcttcgtgaacccaccacaccagggcctgtctgctgtgctatttatttgccttccgtcttcccaacctcagctgcctgtattcatgccagaggtgcaaaggctgccagccagtgctgctgacagatgctttcagactgtagagctcagagaaagggagcggcagctagaggtagccagggagctggccaggctccccggggccttcctattatgtaaatcccagctggacagacagccctggagccaggtggccctgtcccctgtggagcacttggagcagtgatctgttgttccaggtgtaagtctcgacatgcactccagctggagtgacagagccaaactccgtcaaaaaaaaacaaaacaaaacaaaaaaaagacatgggagagatggtgtttttcctctccaccacctggggatacgatgagaagatggccacctgcaagccaggaagacggccctcaccagacaccatgtctgctggcaccttgatcttggacctcccagcctccagaactgtgagaaataaatgtgttttgtttaagctactcaagtctgtggtattcttgttaaggcagcccaagctgactaagacaccaaatcattcaaaacgttaattctttttctgttctttaagcttcccagaatgtacacaaacaatgctgttattaaaatttaaaggactcttggaactgtaggacatgatccagctaaaataaataacaaataacacagctaagcaaatacttataaatgtagctttaaatatttattttagttttaaataattagtggggtacgagacagttcacattcaagagacattttacttagacaaaaaatttataagagaacgatgcataaaaacaaacaacatattggtctgtttatttttctaagggaaaatggaattggagctgttgagaataaaacttgaagaatctaactgc

SEQ ID NO: 6543 - protein, 59 aa, Homo sapiens
MHSSWSDRAKLRQKKTKQNKKKTWERWCFSSPPPGDTMRRWPPASQEDGPHQTPCLLAP

SEQ ID NO: 6544 - DNA, 6748 bp, Homo sapiens
gaccgcggggtgggcggccccgagagcgtcccgcagtggctggagccctgggcgctgcaaagcgtgtcccgccgggtccccgagcgtcccgcgccctcgccccgccatgctcctgctgctggggctgtgcctggggctgtccctgtgtgtggggtcgcaggaagaggcgcagagctggggccactcttcggagcaggatggactcagggtcccgaggcaagtcagactgttgcagaggctgaaaaccaaacctttgatgacagaattctcagtgaagtctaccatcatttcccgttatgccttcactacggtttcctgcagaatgctgaacagagcttctgaagaccaggacattgagttccagatgcagattccagctgcagctttcatcaccaacttcactatgcttattggagacaaggtgtatcagggcgaaattacagagagagaaaagaagagtggtgatagggtaaaagagaaaaggaataaaaccacagaagaaaatggagagaaggggactgaaatattcagagcttctgcagtgattcccagcaaggacaaagccgcctttttcctgagttatgaggagcttctgcagaggcgcctgggcaagtacgagcacagcatcagcgtgcggccccagcagctgtccgggaggctgagcgtggacgtgaatatcctggagagcgcgggcatcgcatccctggaggtgctgccgcttcacaacagcaggcagaggggcagtgggcgcggggaagatgattctgggcctcccccatctactgtcattaaccaaaatgaaacatttgccaacataatttttaaacctactgtagtacaacaagccaggattgcccagaatggaattttgggagactttatcattagatatgacgtcaatagagaacagagcattggggacatccaggttctaaatggctattttgtgcactactttgctcctaaagaccttcctcctttacccaagaatgtggtattcgtgcttgacagcagtgcttctatggtgggaaccaaactccggcagaccaaggatgccctcttcacaattctccatgacctccgaccccaggaccgtttcagtatcattggattttccaaccggatcaaagtatggaaggaccacttgatatcagtcactccagacagcatcagggatgggaaagtgtacattcaccatatgtcacccactggaggcacagacatcaacggggccctgcagagggccatcaggctcctcaacaagtacgtggcccacagtggcattggagaccggagcgtgtccctcatcgtcttcctgacggatgggaagcccacggtcggggagacgcacaccctcaagatcctcaacaacacccgagaggccgcccgaggccaagtctgcatcttcaccattggcatcggcaacgacgtggacttcaggctgctggagaaactgtcgctggagaactgtggcctcacacggcgcgtgcacgaggaggaggacgcaggctcgcagctcatcgggttctacgatgaaatcaggaccccgctcctctctgacatccgcatcgattatccccccagctcagtggtgcaggccaccaagaccctgttccccaactacttcaacggctcggagatcatcattgcggggaagctggtggacaggaagctggatcacctgcacgtggaggtcaccgccagcaacagtaagaaattcatcatcctgaagacagatgtgcctgtgcggcctcagaaggcagggaaagatgtcacaggaagccccaggcctggaggcgatggagagggggacaccaaccacatcgagcgtctctggagctacctcaccacaaaggagctgctgagctcctggctgcaaagtgacgatgaaccggagaaggagcggctgcggcagcgggcccaggccctggctgtgagctaccgcttcctcactcccttcacctccatgaagctgagggggccggtcccacgcatggatggcctggaggaggcccacggcatgtcggctgccatgggacccgaaccggtggtgcagagcgtgcgaggagctggcacgcagccaggacctttgctcaagaagccataccagccaagaattaaaatctctaaaacatcagtggatggtgatccccactttgttgtggatttccccctgagcagactcaccgtgtgcttcaacattgatgggcagcccggggacatcctcaggctggtctctgatcacagggactctggtgtcacagtgaacggagagttaattggggcacccgcccctccaaatggccacaagaaacagcgcacttacttgcgcactatcaccatcctcatcaacaagccagagagatcttatctcgagatcacaccgagcagagtcatcttggatggtggggacagactggtgctcccctgcaaccagagtgtggtggtggggagctgggggctggaggtgtccgtgtctgccaacgccaatgtcaccgtcaccatccagggctccatagcctttgtcatcctcatccacctctacaaaaagccggcgcccttccagcgacaccacctgggtttctacattgccaacagcgagggcctttccagcaactgccacggactgctgggtcagttcctgaatcaggatgccagactcacagaagaccctgcagggcccagccagaacctcactcaccctctgctccttcaggtgggagaggggcctgaggccgtcctaacagtgaaaggccaccaagtcccagtggtctggaagcaaaggaagatttacaacggggaagagcagatagactgctggtttgccaggaacaatgccgccaaactgattgacggggagtacaaggattacctggcattccatccatttgacacagggatggacacttggccggggaatgtccagggagctctgaagctggcagccttaaagatgcaagtgcatgaaggacagtgatgtggggaggccgtggggcagctcttttcatggcttgtacacgcctcagctcctggcaattagctggactccatgacccacccctggtgcagcatagatccgacgtctgtctgggcgaagggtaggggtgggtaggggcgggaagcctgagtgcaaatgtcatttccctctactgcctcttcctgcctctccccaccctgcccacatccacagaggggagagaagggtcatagctaaatgcaacaaagtctgtatcttgtcccaacctgcttttctgttctgttagcatatcataaagtaagcctttctggtgaaggaaggttgctatgaaactttttttcttggtggaaatggacaagtttaggcactctgctttttgccttacactaatgcttagaaagctgtcttttcagtggtgttgcagcccccagatgtgtggccaacctctgctgcaaaggaatctcttgctgagtccaggccaccaatcaggcaaatagcccatacatttgatcgttgtaaaccatgaagtcttttcttgcaagacgtttttcttctgctgtggtatcttgcccttaaaaattagttttcattaaaaagaaatttgattgaaaatagaaacatctacagctcagatactgatctctttctaatgggctttgtaaaccacttgactttgctaatggctattctccaatttgttccaataagctaagggcttttcatacacaggacaactccatgtggttgattttactggcatgtcttggtgacgaagagttggccaagtgaatgatgcatcttttacttggagctctccagcctttgtcatagttcccagaccttttttccttgtggtcatccaggaggtgatcaattacatgtgcacagtgctaggacgggaggcagagccggctcagagcaggtccaccagcccacctatagcaggaagcgtgtcggtgcttaggaaatctaggacttccagcttccctcatgtcagatagaaaaaaagtcaggaaaccagctcgtggacaggggctttggttccaaaacttggacaaacctgatgccttaaggaaaaggttaagatgagaggggacttccagagtcaatgaacgtcacccttcagcggacggataccgggagcgcttgggcgaaacagcagagaaagaaagactgtggtcggggaagtggaatgcttcgatgcaggccagagttcaaggctctggggctggcctcacaagaggcttcttccacggggcttgacaccagagcagcccccgcgtgaaatgagaaggcatgcttagcactgggaggaaaagctgagttaagaaaattctttatcatgtttgccttccctggggaaacattcaggcagtaaaatgacatccacgtgttcctgtcggacgcagcggcttcgggaacaagttagcgctgggggactatctgggctcgtctctctctgcttcgtgaacccaccacaccagggcctgtctgctgtgctatttatttgccttccgtcttcccaacctcagctgcctgtattcatgccagaggtgcaaaggctgccagccagtgctgctgacagatgctttcagactgtagagctcagagaaagggagcggcagctagaggtagccagggagctggccaggctccccggggccttcctattatgtaaatcccagctggacagacagccctggagccaggtggccctgtcccctgtggagcacttggagcagtgatctgttgttccaggtgtaagtctcgacactgcagaaatgaggacgttattaggaaagaccagttcctactgcctgtgttgctactttaagagctgagaaaaacattccaatgagctatccatagctaacttgcttgctcagaaaaacataagtaacaaagttgagctttcatttttaaaaattatattttactttagaaaaatatcaccttttttcttcctcttctttacgtgtagatcttttttttttttttcaaatggggtcagtacctgaaagcccgaaaccccataccaagcttatagttaggacctttgcatttgataaaaaaaaaatatagtattttctgttgtccagaaaatcttcccagatagggaaactgaggcagagagtgccgtggagtggtttttgccaagtcatacaacatacttaatgcagggctacactgaacctccagaatcattttgtttgctttgaccctgtttcaccatctgggcaatcatttattttccttgagcatttataaaccagggcgagggttgttccaaaatgagtaattgaatgagatgaagaaatatgtcataattagaggagataaatctccttgttatcacaatagttaatgtgtcatgatcactgactaactgggaccttgaacaagtcagcatctctgcctttcaaaatgaaggaacattgttctctatcctcccctgacccccgacggccccatgctaggtgcaccatcttcctccatttgactttttaatgctttacaacttcaggctaaagggaggggatgttgggaggagaaaccatcacaagattccctcggtgccacagctgtgctgaggaggccggggactgggaatcggagtgggcacctctgtgtttctctagggagtaacattcaacatttaattgaatcgtgtgtcctgataggtggattaggaacaggattcattcctttaactttaacttttggctaaacgacatgccttggattgagtgtatatgtcttccccaaattcatatgttgaagcttaaatcctgaatgtgatggttcttggaattgggacctttggaaggttattgggtcttgagggcagagccctcacgaatgggattaaggcccttataagaagagacatggggccaggtgcagtggctcacacctgtaatcccaacattttgggaggccgagaagggtggatcatgaggtcaggagatggagaccatcctggccaacatggtgaaacctcgtctctactaaaaatacaaaaattagctgggcgtggtggtgcgtgcctgtagttccagctacttgggaggctgaggcaggagaatcgcttgaaccaggcagtcggaacttgtagtgagccaagatcacgccactgcactccagctggagtgacagagccaaactccgtcaaaaaaaaacaaaacaaaacaaaaaaaagacatgggagagatggtgtttttcctctccaccacctggggatacgatgagaagatggccacctgcaagccaggaagacggccctcaccagacaccatgtctgctggcaccttgatcttggacctcccagcctccagaactgtgagaaataaatgtgttttgtttaagctactcaagtctgtggtattcttgttaaggcagcccaagctgactaagacaccaaatcattcaaaacgttaattctttttctgttctttaagcttcccagaatgtacacaaacaatgctgttattaaaatttaaaggactcttggaactgtaggacatgatccagctaaaataaataacaaataacacagctaagcaaatacttataaatgtagctttaaatatttattttagttttaaataattagtggggtacgagacagttcacattcaagagacattttacttagacaaaaaatttataagagaacgatgcataaaaacaaacaacatattggtctgtttatttttctaagggaaaatggaattggagctgttgagaataaaacttgaagaatctaactgc

SEQ ID NO: 6545 - protein, 956 aa, Homo sapiens; identical to SEQ ID NO: 893

SEQ ID NO: 6546 - DNA, 5680 bp, Homo sapiens
ctctcgctcctgccgccttgtagacgtgttcgctttgcgtttgccttctgcgtgattgtaagtttcccgaggcttccccagccatgcggaactatgattctgggcctcccccatctactgtcattaaccaaaatgaaacatttgccaacataatttttaaacctactgtagtacaacaagccaggattgcccagaatggaattttgggagactttatcattagatatgacgtcaatagagaacagagcattggggacatccaggttctaaatggctattttgtgcactactttgctcctaaagaccttcctcctttacccaagaatgtggtattcgtgcttgacagcagtgcttctatggtgggaaccaaactccggcagaccaaggatgccctcttcacaattctccatgacctccgaccccaggaccgtttcagtatcattggattttccaaccggatcaaagtatggaaggaccacttgatatcagtcactccagacagcatcagggatgggaaagtgtacattcaccatatgtcacccactggaggcacagacatcaacggggccctgcagagggccatcaggctcctcaacaagtacgtggcccacagtggcattggagaccggagcgtgtccctcatcgtcttcctgacggatgggaagcccacggtcggggagacgcacaccctcaagatcctcaacaacacccgagaggccgcccgaggccaagtctgcatcttcaccattggcatcggcaacgacgtggacttcaggctgctggagaaactgtcgctggagaactgtggcctcacacggcgcgtgcacgaggaggaggacgcaggctcgcagctcatcgggttctacgatgaaatcaggaccccgctcctctctgacatccgcatcgattatccccccagctcagtggtgcaggccaccaagaccctgttccccaactacttcaacggctcggagatcatcattgcggggaagctggtggacaggaagctggatcacctgcacgtggaggtcaccgccagcaacagtaagaaattcatcatcctgaagacagatgtgcctgtgcggcctcagaaggcagggaaagatgtcacaggaagccccaggcctggaggcgatggagagggggacaccaaccacatcgagcgtctctggagctacctcaccacaaaggagctgctgagctcctggctgcaaagtgacgatgaaccggagaaggagcggctgcggcagcgggcccaggccctggctgtgagctaccgcttcctcactcccttcacctccatgaagctgagggggccggtcccacgcatggatggcctggaggaggcccacggcatgtcggctgccatgggacccgaaccggtggtgcagagcgtgcgaggagctggcacgcagccaggacctttgctcaagaagccataccagccaagaattaaaatctctaaaacatcagtggatggtgatccccactttgttgtggatttccccctgagcagactcaccgtgtgcttcaacattgatgggcagcccggggacatcctcaggctggtctctgatcacagggactctggtgtcacagtgaacggagagttaattggggcacccgcccctccaaatggccacaagaaacagcgcacttacttgcgcactatcaccatcctcatcaacaagccagagagatcttatctcgagatcacaccgagcagagtcatcttggatggtggggacagactggtgctcccctgcaaccagagtgtggtggtggggagctgggggctggaggtgtccgtgtctgccaacgccaatgtcaccgtcaccatccagggctccatagcctttgtcatcctcatccacctctacaaaaagccggcgcccttccagcgacaccacctgggtttctacattgccaacagcgagggcctttccagcaactgccacggactgctgggtcagttcctgaatcaggatgccagactcacagaagaccctgcagggcccagccagaacctcactcaccctctgctccttcaggtgggagaggggcctgaggccgtcctaacagtgaaaggccaccaagtcccagtggtctggaagcaaaggaagatttacaacggggaagagcagatagactgctggtttgccaggaacaatgccgccaaactgattgacggggagtacaaggattacctggcattccatccatttgacacagggatggacacttggccggggaatgtccagggagctctgaagctggcagccttaaagatgcaagtgcatgaaggacagtgatgtggggaggccgtggggcagctcttttcatggcttgtacacgcctcagctcctggcaattagctggactccatgacccacccctggtgcagcatagatccgacgtctgtctgggcgaagggtaggggtgggtaggggcgggaagcctgagtgcaaatgtcatttccctctactgcctcttcctgcctctccccaccctgcccacatccacagaggggagagaagggtcatagctaaatgcaacaaagtctgtatcttgtcccaacctgcttttctgttctgttagcatatcataaagtaagcctttctggtgaaggaaggttgctatgaaactttttttcttggtggaaatggacaagtttaggcactctgctttttgccttacactaatgcttagaaagctgtcttttcagtggtgttgcagcccccagatgtgtggccaacctctgctgcaaaggaatctcttgctgagtccaggccaccaatcaggcaaatagcccatacatttgatcgttgtaaaccatgaagtcttttcttgcaagacgtttttcttctgctgtggtatcttgcccttaaaaattagttttcattaaaaagaaatttgattgaaaatagaaacatctacagctcagatactgatctctttctaatgggctttgtaaaccacttgactttgctaatggctattctccaatttgttccaataagctaagggcttttcatacacaggacaactccatgtggttgattttactggcatgtcttggtgacgaagagttggccaagtgaatgatgcatcttttacttggagctctccagcctttgtcatagttcccagaccttttttccttgtggtcatccaggaggtgatcaattacatgtgcacagtgctaggacgggaggcagagccggctcagagcaggtccaccagcccacctatagcaggaagcgtgtcggtgcttaggaaatctaggacttccagcttccctcatgtcagatagaaaaaaagtcaggaaaccagctcgtggacaggggctttggttccaaaacttggacaaacctgatgccttaaggaaaaggttaagatgagaggggacttccagagtcaatgaacgtcacccttcagcggacggataccgggagcgcttgggcgaaacagcagagaaagaaagactgtggtcggggaagtggaatgcttcgatgcaggccagagttcaaggctctggggctggcctcacaagaggcttcttccacggggcttgacaccagagcagcccccgcgtgaaatgagaaggcatgcttagcactgggaggaaaagctgagttaagaaaattctttatcatgtttgccttccctggggaaacattcaggcagtaaaatgacatccacgtgttcctgtcggacgcagcggcttcgggaacaagttagcgctgggggactatctgggctcgtctctctctgcttcgtgaacccaccacaccagggcctgtctgctgtgctatttatttgccttccgtcttcccaacctcagctgcctgtattcatgccagaggtgcaaaggctgccagccagtgctgctgacagatgctttcagactgtagagctcagagaaagggagcggcagctagaggtagccagggagctggccaggctccccggggccttcctattatgtaaatcccagctggacagacagccctggagccaggtggccctgtcccctgtggagcacttggagcagtgatctgttgttccaggtgtaagtctcgacactgcagaaatgaggacgttattaggaaagaccagttcctactgcctgtgttgctactttaagagctgagaaaaacattccaatgagctatccatagctaacttgcttgctcagaaaaacataagtaacaaagttgagctttcatttttaaaaattatattttactttagaaaaatatcaccttttttcttcctcttctttacgtgtagatcttttttttttttttcaaatggggtcagtacctgaaagcccgaaaccccataccaagcttatagttaggacctttgcatttgataaaaaaaaaatatagtattttctgttgtccagaaaatcttcccagatagggaaactgaggcagagagtgccgtggagtggtttttgccaagtcatacaacatacttaatgcagggctacactgaacctccagaatcattttgtttgctttgaccctgtttcaccatctgggcaatcatttattttccttgagcatttataaaccagggcgagggttgttccaaaatgagtaattgaatgagatgaagaaatatgtcataattagaggagataaatctccttgttatcacaatagttaatgtgtcatgatcactgactaactgggaccttgaacaagtcagcatctctgcctttcaaaatgaaggaacattgttctctatcctcccctgacccccgacggccccatgctaggtgcaccatcttcctccatttgactttttaatgctttacaacttcaggctaaagggaggggatgttgggaggagaaaccatcacaagattccctcggtgccacagctgtgctgaggaggccggggactgggaatcggagtgggcacctctgtgtttctctagggagtaacattcaacatttaattgaatcgtgtgtcctgataggtggattaggaacaggattcattcctttaactttaacttttggctaaacgacatgccttggattgagtgtatatgtcttccccaaattcatatgttgaagcttaaatcctgaatgtgatggttcttggaattgggacctttggaaggttattgggtcttgagggcagagccctcacgaatgggattaaggcccttataagaagagacatggggccaggtgcagtggctcacacctgtaatcccaacattttgggaggccgagaagggtggatcatgaggtcaggagatggagaccatcctggccaacatggtgaaacctcgtctctactaaaaatacaaaaattagctgggcgtggtggtgcgtgcctgtagttccagctacttgggaggctgaggcaggagaatcgcttgaaccaggcagtcggaacttgtagtgagccaagatcacgccactgcactccagctggagtgacagagccaaactccgtcaaaaaaaaacaaaacaaaacaaaaaaaagacatgggagagatggtgtttttcctctccaccacctggggatacgatgagaagatggccacctgcaagccaggaagacggccctcaccagacaccatgtctgctggcaccttgatcttggacctcccagcctccagaactgtgagaaataaatgtgttttgtttaagct

SEQ ID NO: 6547 - protein, 742 aa, Homo sapiens; identical to SEQ ID NO: 895

SEQ ID NO: 6548 - DNA, 2222 bp, Homo sapiens
ctgggcgctgcaaagcgtgtcccgccgggtccccgagcgtcccgcgccctcgccccgccatgctcctgctgctggggctgtgcctggggctgtccctgtgtgtggggtcgcaggaagaggcgcagagctggggccactcttcggagcagggaaaaccaaacctttgatgacagaattctcagtgaagtctaccatcatttcccgttatgccttcactacggtttcctgcagaatgctgaacagagcttctgaagaccaggacattgagttccagatgcagattccagctgcagctttcatcaccaacttcactatgcttattggagacaaggtgtatcagggcgaaattacagagagagaaaagaagagtggtgatagggtaaaagagaaaaggaataaaaccacagaagaaaatggagagaaggggactgaaatattcagagcttctgcagtgattcccagcaaggacaaagccgcctttttcctgagttatgaggagcttctgcagaggcgcctgggcaagtacgagcacagcatcagcgtgcggccccagcagctgtccgggaggctgagcgtggacgtgaatatcctggagagcgcgggcatcgcatccctggaggtgctgccgcttcacaacagcaggcagaggggcagtgggcgcggggaagatgattctgggcctcccccatctactgtcattaaccaaaatgaaacatttgccaacataatttttaaacctactgtagtacaacaagccaggattgcccagaatggaattttgggagactttatcattagatatgacgtcaatagagaacagagcattggggacatccaggttctaaatggctattttgtgcactactttgctcctaaagaccttcctcctttacccaagaatgtggtattcgtgcttgacagcagtgcttctatggtgggaaccaaactccggcagaccaaggatgccctcttcacaattctccatgacctccgaccccaggaccgtttcagtatcattggattttccaaccggatcaaagtatggaaggaccacttgatatcagtcactccagacagcatcagggatgggaaagtgtacattcaccatatgtcacccactggaggcacagacatcaacggggccctgcagagggccatcaggctcctcaacaagtacgtggcccacagtggcattggagaccggagcgtgtccctcatcgtcttcctgacggatgggaagcccacggtcggggagacgcacaccctcaagatcctcaacaacacccgagaggccgcccgaggccaagtctgcatcttcaccattggcatcggcaacgacgtggacttcaggctgctggagaaactgtcgctggagaactgtggcctcacacggcgcgtgcacgaggaggaggacgcaggctcgcagctcatcgggttctacgatgaaatcaggaccccgctcctctctgacatccgcatcgattatccccccagctcagtggtgcaggccaccaagaccctgttccccaactacttcaacggctcggagatcatcattgcggggaagctggtggacaggaagctggatcacctgcacgtggaggtcaccgccagcaacagtaagaaattcatcatcctgaagacagatgtgcctgtgcggcctcagaaggcagggaaagatgtcacaggaagccccaggcctggaggcgatggagagggggacaccaaccacatcgagcgtctctggagctacctcaccacaaaggagctgctgagctcctggctgcaaagtgacgatgaaccggagaaggagcggctgcggcagcgggcccaggccctggctgtgagctaccgcttcctcactcccttcacctccatgaagctgagggggccggtcccacgcatggatggcctggaggaggcccacggcatgtcggctgccatgggacccgaaccggtggtgcagagcgtgcgaggagctggcacgcagccaggacctttgctcaagaaagccaaactccgtcaaaaaaaaacaaaacaaaacaaaaaaaagacatgggagagatggtgtttttcctctccaccacctggggatacgatgagaagatggccacctgcaagccaggaagacggccctcaccagacaccatgtctgctggcaccttgatcttggacctcccagcctccagaactgtgagaaataaatgtgttttgtttaagct

SEQ ID NO: 6549 - protein, 666 aa, Homo sapiens
MTEFSVKSTIISRYAFTTVSCRMLNRASEDQDIEFQMQIPAAAFITNFTMLIGDKVYQGEITEREKKSGDRVKEKRNKTTEENGEKGTEIFRASAVIPSKDKAAFFLSYEELLQRRLGKYEHSISVRPQQLSGRLSVDVNILESAGIASLEVLPLHNSRQRGSGRGEDDSGPPPSTVINQNETFANIIFKPTVVQQARIAQNGILGDFIIRYDVNREQSIGDIQVLNGYFVHYFAPKDLPPLPKNVVFVLDSSASMVGTKLRQTKDALFTILHDLRPQDRFSIIGFSNRIKVWKDHLISVTPDSIRDGKVYIHHMSPTGGTDINGALQRAIRLLNKYVAHSGIGDRSVSLIVFLTDGKPTVGETHTLKILNNTREAARGQVCIFTIGIGNDVDFRLLEKLSLENCGLTRRVHEEEDAGSQLIGFYDEIRTPLLSDIRIDYPPSSVVQATKTLFPNYFNGSEIIIAGKLVDRKLDHLHVEVTASNSKKFIILKTDVPVRPQKAGKDVTGSPRPGGDGEGDTNHIERLWSYLTTKELLSSWLQSDDEPEKERLRQRAQALAVSYRFLTPFTSMKLRGPVPRMDGLEEAHGMSAAMGPEPVVQSVRGAGTQPGPLLKKAKLRQKKTKQNKKKTWERWCFSSPPPGDTMRRWPPASQEDGPHQTPCLLAP

SEQ ID NO: 6550 - DNA, 6345 bp, Homo sapiens
gaccgcggggtgggcggccccgagagcgtcccgcagtggctggagccctgggcgctgcaaagcgtgtcccgccgggtccccgagcgtcccgcgccctcgccccgccatgctcctgctgctggggctgtgcctggggctgtccctgtgtgtggggtcgcaggaagaggcgcagagctggggccactcttcggagcaggatggactcagggtcccgaggcaagtcagactgttgcagaggctgaaaaccaaacctttgatgacagaattctcagtgaagtctaccatcatttcccgttatgccttcactacggtttcctgcagaatgctgaacagagcttctgaagaccaggacattgagttccagatgcagattccagctgcagctttcatcaccaacttcactatgcttattggagacaaggtgtatcagggcgaaattacagagagagaaaagaagagtggtgatagggtaaaagagaaaaggaataaaaccacagaagaaaatggagagaaggggactgaaatattcagagcttctgcagtgattcccagcaaggacaaagccgcctttttcctgagttatgaggagcttctgcagaggcgcctgggcaagtacgagcacagcatcagcgtgcggccccagcagctgtccgggaggctgagcgtggacgtgaatatcctggagagcgcgggcatcgcatccctggaggtgctgccgcttcacaacagcaggcagaggggcagtgggcgcggggaagatgattctgggcctcccccatctactgtcattaaccaaaatgaaacatttgccaacataatttttaaacctactgtagtacaacaagccaggattgcccagaatggaattttgggagactttatcattagatatgacgtcaatagagaacagagcattggggacatccaggttctaaatggctattttgtgcactactttgctcctaaagaccttcctcctttacccaagaatgtggtattcgtgcttgacagcagtgcttctatggtgggaaccaaactccggcagaccaaggatgccctcttcacaattctccatgacctccgaccccaggaccgtttcagtatcattggattttccaaccggatcaaagtatggaaggaccacttgatatcagtcactccagacagcatcagggatgggaaagtgtacattcaccatatgtcacccactggaggcacagacatcaacggggccctgcagagggccatcaggctcctcaacaagtacgtggcccacagtggcattggagaccggagcgtgtccctcatcgtcttcctgacggatgggaagcccacggtcggggagacgcacaccctcaagatcctcaacaacacccgagaggccgcccgaggccaagtctgcatcttcaccattggcatcggcaacgacgtggacttcaggctgctggagaaactgtcgctggagaactgtggcctcacacggcgcgtgcacgaggaggaggacgcaggctcgcagctcatcgggttctacgatgaaatcaggaccccgctcctctctgacatccgcatcgattatccccccagctcagtggtgcaggccaccaagaccctgttccccaactacttcaacggctcggagatcatcattgcggggaagctggtggacaggaagctggatcacctgcacgtggaggtcaccgccagcaacagtaagaaattcatcatcctgaagacagatgtgcctgtgcggcctcagaaggcagggaaagatgtcacaggaagccccaggcctggaggcgatggagagggggacaccaaccacatcgagcgtctctggagctacctcaccacaaaggagctgctgagctcctggctgcaaagtgacgatgaaccggagaaggagcggctgcggcagcgggcccaggccctggctgtgagctaccgcttcctcactcccttcacctccatgaagctgagggggccggtcccacgcatggatggcctggaggaggcccacggcatgtcggctgccatgggacccgaaccggtggtgcagagcgtgcgaggagctggcacgcagccaggacctttgctcaagaagccataccagccaagaattaaaatctctaaaacatcagtggatggtgatccccactttgttgtggatttccccctgagcagactcaccgtgtgcttcaacattgatgggcagcccggggacatcctcaggctggtctctgatcacagggactctggtgtcacagtgaacggagagttaattggggcacccgcccctccaaatggccacaagaaacagcgcacttacttgcgcactatcaccatcctcatcaacaagccagagagatcttatctcgagatcacaccgagcagagtcatcttggatggtggggacagactggtgctcccctgcaaccagagtgtggtggtggggagctgggggctggaggtgtccgtgtctgccaacgccaatgtcaccgtcaccatccagggctccatagcctttgtcatcctcatccacctctacaaaaagccggcgcccttccagcgacaccacctgggtttctacattgccaacagcgagggcctttccagcaactgccacggactgctgggtcagttcctgaatcaggatgccagactcacagaagaccctgcagggcccagccagaacctcactcaccctctgctccttcaggtgggagaggggcctgaggccgtcctaacagtgaaaggccaccaagtcccagtggtctggaagcaaaggaagatttacaacggggaagagcagatagactgctggtttgccaggaacaatgccgccaaactgattgacggggagtacaaggattacctggcattccatccatttgacacagggatggacacttggccggggaatgtccagggagctctgaagctggcagccttaaagatgcaagtgcatgaaggacagtgatgtggggaggccgtggggcagctcttttcatggcttgtacacgcctcagctcctggcaattagctggactccatgacccacccctggtgcagcatagatccgacgtctgtctgggcgaagggtaggggtgggtaggggcgggaagcctgagtgcaaatgtcatttccctctactgcctcttcctgcctctccccaccctgcccacatccacagaggggagagaagggtcatagctaaatgcaacaaagtctgtatcttgtcccaacctgcttttctgttctgttagcatatcataaagtaagcctttctggtgaaggaaggttgctatgaaactttttttcttggtggaaatggacaagtttaggcactctgctttttgccttacactaatgcttagaaagctgtcttttcagtggtgttgcagcccccagatgtgtggccaacctctgctgcaaaggaatctcttgctgagtccaggccaccaatcaggcaaatagcccatacatttgatcgttgtaaaccatgaagtcttttcttgcaagacgtttttcttctgctgtggtatcttgcccttaaaaattagttttcattaaaaagaaatttgattgaaaatagaaacatctacagctcagatactgatctctttctaatgggctttgtaaaccacttgactttgctaatggctattctccaatttgttccaataagctaagggcttttcatacacaggacaactccatgtggttgattttactggcatgtcttggtgacgaagagttggccaagtgaatgatgcatcttttacttggagctctccagcctttgtcatagttcccagaccttttttccttgtggtcatccaggaggtgatcaattacatgtgcacagtgctaggacgggaggcagagccggctcagagcaggtccaccagcccacctatagcaggaagcgtgtcggtgcttaggaaatctaggacttccagcttccctcatgtcagatagaaaaaaagtcaggaaaccagctcgtggacaggggctttggttccaaaacttggacaaacctgatgccttaaggaaaaggttaagatgagaggggacttccagagtcaatgaacgtcacccttcagcggacggataccgggagcgcttgggcgaaacagcagagaaagaaagactgtggtcggggaagtggaatgcttcgatgcaggccagagttcaaggctctggggctggcctcacaagaggcttcttccacggggcttgacaccagagcagcccccgcgtgaaatgagaaggcatgcttagcactgggaggaaaagctgagttaagaaaattctttatcatgtttgccttccctggggaaacattcaggcagtaaaatgacatccacgtgttcctgtcggacgcagcggcttcgggaacaagttagcgctgggggactatctgggctcgtctctctctgcttcgtgaacccaccacaccagggcctgtctgctgtgctatttatttgccttccgtcttcccaacctcagctgcctgtattcatgccagaggtgcaaaggctgccagccagtgctgctgacagatgctttcagactgtagagctcagagaaagggagcggcagctagaggtagccagggagctggccaggctccccggggccttcctattatgtaaatcccagctggacagacagccctggagccaggtggccctgtcccctgtggagcacttggagcagtgatctgttgttccaggtgtaagtctcgacactgcagaaatgaggacgttattaggaaagaccagttcctactgcctgtgttgctactttaagagctgagaaaaacattccaatgagctatccatagctaacttgcttgctcagaaaaacataagtaacaaagttgagctttcatttttaaaaattatattttactttagaaaaatatcaccttttttcttcctcttctttacgtgtagatcttttttttttttttcaaatggggtcagtacctgaaagcccgaaaccccataccaagcttatagttaggacctttgcatttgataaaaaaaaaatatagtattttctgttgtccagaaaatcttcccagatagggaaactgaggcagagagtgccgtggagtggtttttgccaagtcatacaacatacttaatgcagggctacactgaacctccagaatcattttgtttgctttgaccctgtttcaccatctgggcaatcatttattttccttgagcatttataaaccagggcgagggttgttccaaaatgagtaattgaatgagatgaagaaatatgtcataattagaggagataaatctccttgttatcacaatagttaatgtgtcatgatcactgactaactgggaccttgaacaagtcagcatctctgcctttcaaaatgaaggaacattgttctctatcctcccctgacccccgacggccccatgctaggtgcaccatcttcctccatttgactttttaatgctttacaacttcaggctaaagggaggggatgttgggaggagaaaccatcacaagattccctcggtgccacagctgtgctgaggaggccggggactgggaatcggagtgggcacctctgtgtttctctagggagtaacattcaacatttaattgaatcgtgtgtcctgataggtggattaggaacaggattcattcctttaactttaacttttggctaaacgacatgccttggattgagtgtatatgtcttccccaaattcatatgttgaagcttaaatcctgaatgtgatggttcttggaattgggacctttggaaggttattgggtcttgagggcagagccctcacgaatgggattaaggcccttataagaagagacatggggccaggtgcagtggctcacacctgtaatcccaacattttgggaggccgagaagggtggatcatgaggtcaggagatggagaccatcctggccaacatggtgaaacctcgtctctactaaaaatacaaaaattagctgggcgtggtggtgcgtgcctgtagttccagctacttgggaggctgaggcaggagaatcgcttgaaccaggcagtcggaacttgtagtgagccaagatcacgccactgcactccagctggagtgacagagccaaactccgtcaaaaaaaaacaaaacaaaacaaaaaaaagacatgggagagatggtgtttttcctctccaccacctggggatacgatgagaagatggccacctgcaagccaggaagacggccctcaccagacaccatgtctgctggcaccttgatcttggacctcccagcctccagaactgtgagaaataaatgtgttttgtttaagct

SEQ ID NO: 6551 - protein, 956 aa, Homo sapiens; identical to SEQ ID NO: 893

SEQ ID NO: 6552 - DNA, 2950 bp, Homo sapiens
ctctcgctcctgccgccttgtagacgtgttcgctttgcgtttgccttctgcgtgattgtaagtttcccgaggcttccccagccatgcggaactatgattctgggcctcccccatctactgtcattaaccaaaatgaaacatttgccaacataatttttaaacctactgtagtacaacaagccaggattgcccagaatggaattttgggagactttatcattagatatgacgtcaatagagaacagagcattggggacatccaggttctaaatggctattttgtgcactactttgctcctaaagaccttcctcctttacccaagaatgtggtattcgtgcttgacagcagtgcttctatggtgggaaccaaactccggcagaccaaggatgccctcttcacaattctccatgacctccgaccccaggaccgtttcagtatcattggattttccaaccggatcaaagtatggaaggaccacttgatatcagtcactccagacagcatcagggatgggaaagtgtacattcaccatatgtcacccactggaggcacagacatcaacggggccctgcagagggccatcaggctcctcaacaagtacgtggcccacagtggcattggagaccggagcgtgtccctcatcgtcttcctgacggatgggaagcccacggtcggggagacgcacaccctcaagatcctcaacaacacccgagaggccgcccgaggccaagtctgcatcttcaccattggcatcggcaacgacgtggacttcaggctgctggagaaactgtcgctggagaactgtggcctcacacggcgcgtgcacgaggaggaggacgcaggctcgcagctcatcgggttctacgatgaaatcaggaccccgctcctctctgacatccgcatcgattatccccccagctcagtggtgcaggccaccaagaccctgttccccaactacttcaacggctcggagatcatcattgcggggaagctggtggacaggaagctggatcacctgcacgtggaggtcaccgccagcaacagtaagaaattcatcatcctgaagacagatgtgcctgtgcggcctcagaaggcagggaaagatgtcacaggaagccccaggcctggaggcgatggagagggggacaccaaccacatcgagcgtctctggagctacctcaccacaaaggagctgctgagctcctggctgcaaagtgacgatgaaccggagaaggagcggctgcggcagcgggcccaggccctggctgtgagctaccgcttcctcactcccttcacctccatgaagctgagggggccggtcccacgcatggatggcctggaggaggcccacggcatgtcggctgccatgggacccgaaccggtggtgcagagcgtgcgaggagctggcacgcagccaggacctttgctcaagaagccataccagccaagaattaaaatctctaaaacatcagtggatggtgatccccactttgttgtggatttccccctgagcagactcaccgtgtgcttcaacattgatgggcagcccggggacatcctcaggctggtctctgatcacagggactctggtgtcacagtgaacggagagttaattggggcacccgcccctccaaatggccacaagaaacagcgcacttacttgcgcactatcaccatcctcatcaacaagccagagagatcttatctcgagatcacaccgagcagagtcatcttggatggtggggacagactggtgctcccctgcaaccagagtgtggtggtggggagctgggggctggaggtgtccgtgtctgccaacgccaatgtcaccgtcaccatccagggctccatagcctttgtcatcctcatccacctctacaaaaagccggcgcccttccagcgacaccacctgggtttctacattgccaacagcgagggcctttccagcaactgccacggactgctgggtcagttcctgaatcaggatgccagactcacagaagaccctgcagggcccagccagaacctcactcaccctctgctccttcaggtgggagaggggcctgaggccgtcctaacagtgaaaggccaccaagtcccagtggtctggaagcaaaggaagatttacaacggggaagagcagatagactgctggtttgccaggaacaatgccgccaaactgattgacggggagtacaaggattacctggcattccatccatttgacacagggatggacacttggccggggaatgtccagggagctctgaagctggcagccttaaagatgcaagtgcatgaaggacagtgatgtggggaggccgtggggcagctcttttcatggcttgtacacgcctcagctcctggcaattagctggactccatgacccacccctggtgcagcatagatccgacgtctgtctgggcgaagggtaggggtgggtaggggcgggaagcctgagtgcaaatgtcatttccctctactgcctcttcctgcctctccccaccctgcccacatccacagaggggagagaagggtcatagctaaatgcaacaaagtctgtatcttgtcccaacctgcttttctgttctgttagcatatcataaagtaagcctttctggtgaaggaaggttgctatgaaactttttttcttggtggaaatggacaagtttaggcactctgctttttgccttacactaatgcttagaaagctgtcttttcagtggtgttgcagcccccagatgtgtggccaacctctgctgcaaaggaatctcttgctgagtccaggccaccaatcaggcaaatagcccatacatttgatcgttgtaaaccatgaagtcttttcttgcaagacgtttttcttctgctgtggtatcttgcccttaaaaattagttttcattaaaaagaaatttgattgaaaatagaaacatctacagctcagatactg

SEQ ID NO: 6553 - protein, 742 aa, Homo sapiens; identical to SEQ ID NO: 895

SEQ ID NO: 6554 - DNA, 3615 bp, Homo sapiens
gaccgcggggtgggcggccccgagagcgtcccgcagtggctggagccctgggcgctgcaaagcgtgtcccgccgggtccccgagcgtcccgcgccctcgccccgccatgctcctgctgctggggctgtgcctggggctgtccctgtgtgtggggtcgcaggaagaggcgcagagctggggccactcttcggagcaggatggactcagggtcccgaggcaagtcagactgttgcagaggctgaaaaccaaacctttgatgacagaattctcagtgaagtctaccatcatttcccgttatgccttcactacggtttcctgcagaatgctgaacagagcttctgaagaccaggacattgagttccagatgcagattccagctgcagctttcatcaccaacttcactatgcttattggagacaaggtgtatcagggcgaaattacagagagagaaaagaagagtggtgatagggtaaaagagaaaaggaataaaaccacagaagaaaatggagagaaggggactgaaatattcagagcttctgcagtgattcccagcaaggacaaagccgcctttttcctgagttatgaggagcttctgcagaggcgcctgggcaagtacgagcacagcatcagcgtgcggccccagcagctgtccgggaggctgagcgtggacgtgaatatcctggagagcgcgggcatcgcatccctggaggtgctgccgcttcacaacagcaggcagaggggcagtgggcgcggggaagatgattctgggcctcccccatctactgtcattaaccaaaatgaaacatttgccaacataatttttaaacctactgtagtacaacaagccaggattgcccagaatggaattttgggagactttatcattagatatgacgtcaatagagaacagagcattggggacatccaggttctaaatggctattttgtgcactactttgctcctaaagaccttcctcctttacccaagaatgtggtattcgtgcttgacagcagtgcttctatggtgggaaccaaactccggcagaccaaggatgccctcttcacaattctccatgacctccgaccccaggaccgtttcagtatcattggattttccaaccggatcaaagtatggaaggaccacttgatatcagtcactccagacagcatcagggatgggaaagtgtacattcaccatatgtcacccactggaggcacagacatcaacggggccctgcagagggccatcaggctcctcaacaagtacgtggcccacagtggcattggagaccggagcgtgtccctcatcgtcttcctgacggatgggaagcccacggtcggggagacgcacaccctcaagatcctcaacaacacccgagaggccgcccgaggccaagtctgcatcttcaccattggcatcggcaacgacgtggacttcaggctgctggagaaactgtcgctggagaactgtggcctcacacggcgcgtgcacgaggaggaggacgcaggctcgcagctcatcgggttctacgatgaaatcaggaccccgctcctctctgacatccgcatcgattatccccccagctcagtggtgcaggccaccaagaccctgttccccaactacttcaacggctcggagatcatcattgcggggaagctggtggacaggaagctggatcacctgcacgtggaggtcaccgccagcaacagtaagaaattcatcatcctgaagacagatgtgcctgtgcggcctcagaaggcagggaaagatgtcacaggaagccccaggcctggaggcgatggagagggggacaccaaccacatcgagcgtctctggagctacctcaccacaaaggagctgctgagctcctggctgcaaagtgacgatgaaccggagaaggagcggctgcggcagcgggcccaggccctggctgtgagctaccgcttcctcactcccttcacctccatgaagctgagggggccggtcccacgcatggatggcctggaggaggcccacggcatgtcggctgccatgggacccgaaccggtggtgcagagcgtgcgaggagctggcacgcagccaggacctttgctcaagaagccataccagccaagaattaaaatctctaaaacatcagtggatggtgatccccactttgttgtggatttccccctgagcagactcaccgtgtgcttcaacattgatgggcagcccggggacatcctcaggctggtctctgatcacagggactctggtgtcacagtgaacggagagttaattggggcacccgcccctccaaatggccacaagaaacagcgcacttacttgcgcactatcaccatcctcatcaacaagccagagagatcttatctcgagatcacaccgagcagagtcatcttggatggtggggacagactggtgctcccctgcaaccagagtgtggtggtggggagctgggggctggaggtgtccgtgtctgccaacgccaatgtcaccgtcaccatccagggctccatagcctttgtcatcctcatccacctctacaaaaagccggcgcccttccagcgacaccacctgggtttctacattgccaacagcgagggcctttccagcaactgccacggactgctgggtcagttcctgaatcaggatgccagactcacagaagaccctgcagggcccagccagaacctcactcaccctctgctccttcaggtgggagaggggcctgaggccgtcctaacagtgaaaggccaccaagtcccagtggtctggaagcaaaggaagatttacaacggggaagagcagatagactgctggtttgccaggaacaatgccgccaaactgattgacggggagtacaaggattacctggcattccatccatttgacacagggatggacacttggccggggaatgtccagggagctctgaagctggcagccttaaagatgcaagtgcatgaaggacagtgatgtggggaggccgtggggcagctcttttcatggcttgtacacgcctcagctcctggcaattagctggactccatgacccacccctggtgcagcatagatccgacgtctgtctgggcgaagggtaggggtgggtaggggcgggaagcctgagtgcaaatgtcatttccctctactgcctcttcctgcctctccccaccctgcccacatccacagaggggagagaagggtcatagctaaatgcaacaaagtctgtatcttgtcccaacctgcttttctgttctgttagcatatcataaagtaagcctttctggtgaaggaaggttgctatgaaactttttttcttggtggaaatggacaagtttaggcactctgctttttgccttacactaatgcttagaaagctgtcttttcagtggtgttgcagcccccagatgtgtggccaacctctgctgcaaaggaatctcttgctgagtccaggccaccaatcaggcaaatagcccatacatttgatcgttgtaaaccatgaagtcttttcttgcaagacgtttttcttctgctgtggtatcttgcccttaaaaattagttttcattaaaaagaaatttgattgaaaatagaaacatctacagctcagatactg

SEQ ID NO: 6555 - protein, 956 aa, Homo sapiens; identical to SEQ ID NO: 893

SEQ ID NO: 6556 - DNA, 3132 bp, Homo sapiens
gaccgcggggtgggcggccccgagagcgtcccgcagtggctggagccctgggcgctgcaaagcgtgtcccgccgggtccccgagcgtcccgcgccctcgccccgccatgctcctgctgctggggctgtgcctggggctgtccctgtgtgtggggtcgcaggaagaggcgcagagctggggccactcttcggagcaggatggactcagggtcccgaggcaagtcagactgttgcagaggctgaaaaccaaacctttgatgacagaattctcagtgaagtctaccatcatttcccgttatgccttcactacggtttcctgcagaatgctgaacagagcttctgaagaccaggacattgagttccagatgcagattccagctgcagctttcatcaccaacttcactatgcttattggagacaaggtgtatcagggcgaaattacagagagagaaaagaagagtggtgatagggtaaaagagaaaaggaataaaaccacagaagaaaatggagagaaggggactgaaatattcagagcttctgcagtgattcccagcaaggacaaagccgcctttttcctgagttatgaggagcttctgcagaggcgcctgggcaagtacgagcacagcatcagcgtgcggccccagcagctgtccgggaggctgagcgtggacgtgaatatcctggagagcgcgggcatcgcatccctggaggtgctgccgcttcacaacagcaggcagaggggcagtgggcgcggggaagatgattctgggcctcccccatctactgtcattaaccaaaatgaaacatttgccaacataatttttaaacctactgtagtacaacaagccaggattgcccagaatggaattttgggagactttatcattagatatgacgtcaatagagaacagagcattggggacatccaggttctaaatggctattttgtgcactactttgctcctaaagaccttcctcctttacccaagaatgtggtattcgtgcttgacagcagtgcttctatggtgggaaccaaactccggcagaccaaggatgccctcttcacaattctccatgacctccgaccccaggaccgtttcagtatcattggattttccaaccggatcaaagtatggaaggaccacttgatatcagtcactccagacagcatcagggatgggaaagtgtacattcaccatatgtcacccactggaggcacagacatcaacggggccctgcagagggccatcaggctcctcaacaagtacgtggcccacagtggcattggagaccggagcgtgtccctcatcgtcttcctgacggatgggaagcccacggtcggggagacgcacaccctcaagatcctcaacaacacccgagaggccgcccgaggccaagtctgcatcttcaccattggcatcggcaacgacgtggacttcaggctgctggagaaactgtcgctggagaactgtggcctcacacggcgcgtgcacgaggaggaggacgcaggctcgcagctcatcgggttctacgatgaaatcaggaccccgctcctctctgacatccgcatcgattatccccccagctcagtggtgcaggccaccaagaccctgttccccaactacttcaacggctcggagatcatcattgcggggaagctggtggacaggaagctggatcacctgcacgtggaggtcaccgccagcaacagtaagaaattcatcatcctgaagacagatgtgcctgtgcggcctcagaaggcagggaaagatgtcacaggaagccccaggcctggaggcgatggagagggggacaccaaccacatcgagcgtctctggagctacctcaccacaaaggagctgctgagctcctggctgcaaagtgacgatgaaccggagaaggagcggctgcggcagcgggcccaggccctggctgtgagctaccgcttcctcactcccttcacctccatgaagctgagggggccggtcccacgcatggatggcctggaggaggcccacggcatgtcggctgccatgggacccgaaccggtggtgcagagcgtgcgaggagctggcacgcagccaggacctttgctcaagaagccataccagccaagaattaaaatctctaaaacatcagttcgtggcttcagaagggaagaacagattttttcaaatgtcatgaaatttccttttgccagcatcctggaactataataaaaattcagaggaaagaacaacctatgactgggttttgttctgctgtgtccagatcatcctctggaagtcttgattgttgcctttctgctgctgtgctgtacgtgcaagttcctaaagccagggacatcccggagatgagctgtggatatagagtccgcacagcctgcgggagacagaatgtaattccttccaacacacacacacaggctttatggaatgccagaaaagcttcctcttggatgctgcctggagtaatgactttttgaccctcccctcttttttggagcaagcactatctttccttgtaaagaaatttggacaatttgagtagaaatggtgtggtatgtgcacatagaaactctcagaaaactgtcagatgagctagacagttgtcctctatctccatgggtcccgcatcccaaggatcgaaccaacaacagatcaaaaatacgtgaaaaaggaattgcatctgtattgaatgtgtacggactttttttcttgtctttgttccttaaacaatgtagtgtaacaactatttacatcgcatctcctttgcattcattattataagtaaactagagatgatttaaagtgtatagaaaggctgcgtgcagtggctaatgtctgtaatcccagcactttgagaggccgaggcaggtggatcacctgaggtcaggagttcgagaccagcctggccaacgtggtgaaaccccatctctactaaaaatacaataattagctgggcatggtggtgcacgcctgtaatcccagctattcgggaggctgaggcaggagaatcgcttgaacccaggaggcagagattgcagtgaaccgagattgcaccattgcactccagcctgggtgacagagtgaacctccgtctcaaaaacaaaataaataaataagaataaatt

SEQ ID NO: 6557 - protein, 702 aa, Homo sapiens; identical to SEQ ID NO: 891

SEQ ID NO: 6558 - DNA, 1370 bp, Homo sapiens
gtttgggtagatttataggtgtttaatagccatagtcaaagcacatttattaatgataaatggaaatggagacacctaaggtgtgcagtaaagacaggtcctcggtttgggattcgccaccgtttcctcccacgcattttaatgaaagatttaaatgaaaacacagatttgctttccacattttaaaaattattcaaaactagagtcaaaggggagaatctgatacactggataacagaattgaaattcaataaggcattcagaagcaaaagcagttatgctgtaacaagtcagctgcactgccatcccactgaaactatgatcgatacctggcatttatgagaacttatgatacaccaggaacttcgatgtgcatcatcccagatgatcctcacagaaatcctaggaggttctacgatgaaatcaggaccccgctcctctctgacatccgcatcgattatccccccagctcagtggtgcaggccaccaagaccctgttccccaactacttcaacggctcggagatcatcattgcggggaagctggtggacaggaagctggatcacctgcacgtggaggtcaccgccagcaacagtaagaaattcatcatcctgaagacagatgtgcctgtgcggcctcagaaggcagggaaagatgtcacaggaagccccaggcctggaggcgatggagagggggacaccaaccacatcgagcgtctctggagctacctcaccacaaaggagctgctgagctcctggctgcaaagtgacgatgaaccggagaaggagcggctgcggcagcgggcccaggccctggctgtgagctaccgcttcctcactcccttcacctccatgaagctgagggggccggtcccacgcatggatggcctggaggaggcccacggcatgtcggctgccatgggacccgaaccggtggtgcagagcgtgcgaggagctggcacgcagccaggacctttgctcaagaagccataccagccaagaattaaaatctctaaaacatcaggtaaagcaaaggatgcggttgtgtgtggattgagagtaagagatgtttaaaaagtgtaaaaccaggccaggtgtactggctcacgcctgtaatcccagcactttgggaggccgaggtgggtgtattgcttgaggtcaggagttcaagaccagcctggccaacatggtgaaacctcgtctctactaaaaatacaaaaattagccaggcatggtggcaggggcctgtagttccagctactggggaggctgaggcaggagaatcacttgaacctgggaagttgaggttacagtgagccgagattgtgccaccacactctagcctggactacaagagtgaaactctgtctc

SEQ ID NO: 6559 - protein, 244 aa, Homo sapiens
MRTYDTPGTSMCIIPDDPHRNPRRFYDEIRTPLLSDIRIDYPPSSVVQATKTLFPNYFNGSEIIIAGKLVDRKLDHLHVEVTASNSKKFIILKTDVPVRPQKAGKDVTGSPRPGGDGEGDTNHIERLWSYLTTKELLSSWLQSDDEPEKERLRQRAQALAVSYRFLTPFTSMKLRGPVPRMDGLEEAHGMSAAMGPEPVVQSVRGAGTQPGPLLKKPYQPRIKISKTSGKAKDAVVCGLRVRDV

SEQ ID NO: 6560 - DNA, 6922 bp, Homo sapiens
aagaggatggagctagtatgtattgagcacctactgtctgccaggcaccacacggggtaccttacatatgagatctcactacatctcaacaatgattctgtgactgtggaattgtttccatgtaacagatgtgggactgaagctcaggaatattaagtcagtcgttttgattcagtcacactctagaacccactctctttggtattctgtagtttgcaaagataacacaaaacttcttgctctaaaatactgggctttagaaaagaagagagccccctgggagtcctggtggcctgagaggcagggaagagtcagtgagtggaggaagagcatgaatgaattttcccgagggcaggagaggcagttgtgtgtccctggggttgtcttgcatgggatcaccaatgcctgcatgaagacaggaagatgggattagaagacttggcctccctcaaatcggagcagctgctccagctcaccatagaagtgggcaagaaggagagaacacgaaggaggaaagagacatgggttctcattagacaagtgggtcagattcttcctcttttttgttctgcaccaatgtctttccttgcggtcttcattaacctgtgactctgatgaccctgcgggtgacactcatttttgtgcttaggaaatatctgtggcggtaagcagggtgagcccccattcacagcaaggaaaaacggagtcatgttcttctgctctgggattttggtcagtaacggtggaacagcccatatgaacctacttaacagatttttttcccccttaataaaaagatgattctattttctagagatgctcctctggaattgctcccagtaaacttaaaaaaaaagtagtgaaaaatttattgggtcacatttactgtctgcttcttcctgggtggtggttggcctcaggaaccaggctccttggtgagtaaccaaactgagaatcaacccattctttgggtgtgtaaaataatcccatttagttgaatctcatgaattttcatcatgagctagtaaaaccagaggtcactaggaagccaaaataatcatacagtatccttcctcatggtccatatcaaagagcctagtcgagtgaatgatggacagagaaattatactttctaatccccagtgcttttactcagccatgaatggtattaattcagggagcttgtaaaaagcattttcacgagattggaagcaagactaagtaggtacatgctggcagcataaagagagtctaatctaattattgtagaatcttagagataatctaagtgctgcctaattgcatacaacacattttattgacacttttctatgtgtaaggcacacagaccatgtgtaagctacatgcctattttctatgggcaaaaaccggaatcacccagagggctcgttaaaacacaaatggcggagtcccatccccagagtttctgactccgagtttctggggtgggcctgagaattggcatttctagcaagttcccaggagctgctgatgctgctggttcaagatcacactgtgagaactgctctacaccctcgtgggggggattattccagggttcacttgagcccttctaatgggatgggttgtgaaggcggccgatcccaacaggacagctttcttagggttcaccgacactgcgctgaaaagtgcctcccggaaactctctccctggtcctaattctgccggctggaattgctctggacacacctaatcctcatttaataaatgcccatgcacattcatcctaaggagaaggacagagaggggtctgtttggcaaataacattgttatgttccatgccggggaatgcctgtttaatctactttgctaacaataaatttaaatgttaataactggggtgtacatacaccataaacggtacaaatgtcatgtgtacagcttgataaaattttacataggtataccctcattcaactgccttccacctcaagacatggaatattttcacccttcctcaaaattaccacgtgctctttcctggtcctgagcaggccttcaaaggtcagcagtgttctactccagttgccatgggtatttcatgctcctcttgaactttatgcagatggaagcagagagaacatgcgcttttgtatctgatattttcactcaagaagactgtgaggttcaaccatgttctaaatagcaatattagttcttttgtttttattgccttgtggtatcccaagtttgacttgtgtttatagttgtatatgtaattgctccttctatttttttttttgcgggggtagggggtggtgggatggaattttgctcttgttgcccaggctggagtccaatggcactatctcagctcactgcaacctccgcctccctggttcaagcgatattctcctgcctcagcctcctgagtagctgggattacagccaccacacccacctaattttttgtatttttagtagagacgaggtttctccatgttggccaggctgatctcaaactcctgacctcaggtgatccacccgcctcagcctcccaaagtgctgggattacaggcgtgagccaccgggcctggcccctccttctattttatatagttaaggttggaaattgatatggtttggctctgtgtccccacggaaatagcatttcgaattgtaatccccatgtgtcggaggagtggcctggtgggaggtgattggaccatggaggtgaatttcccccttgctgttctcgtgatagtgagtgagttctcacgagatctcatggtttaaaagtccggcgcttcccagttctgtctctcgctcctgccgccttgtagacgtgttcgctttgcgtttgccttctgcgtgattgtaagtttcccgaggcttccccagccatgcggaactgtgagtcaattaaacctcttttctgtataaactacccagtctcaggtacttcttgataacagtgtgaaaatggactgatacagtaatgatataagctagcatgactgctgactgtgaactggaaaatggtgctaagtacgtgacatcacttgatcttttcaatactgtgagattggtactatcattaatccattttacagatgagataaccaaggccgagtaacttgctcaaagtctcacagctgttaagaagtgaaaccaatatttgaatgcaggtttctgaccatgatcgtgcgttcttagctgatatattatgatgcctgtcactctgggtgctttaacaatgaccaccaatgagagattgaccctggacagcatgcagtttcctttaatttcaaggacttttcctttttcagcacccgtttctttgtcctgtctaatgggtctaaggcatcttcaaccatgctggtagtgacctgggctgtgccacctgtccatgcactgtctggattttcccaactccttcagatgagcagatctgtggactcgtgttctctcttatgtaactgtctccctacaaaaataaccttttctctttgctggctctctgatcacttccaaaatccctgtccttgataagtgcaaataatagaagaatctgttctaccttgtggttcctgttaaggttacacctaaattgtctctgaaaaataattgcctattttgttaaaggaaatgtttaaacttcctttgacttgtgtgtctaataaaccctcagcagaaggaagtttatttttaaatacaaattactgtggccacttaacgcctcatttcctttttcattctgctaattggagatgggaaatggctggtcagcctatttcatgctatcaacttgagtacatttaaaaagataatcagaggctttgcagcagttttaagtctggctttgattcaatatctggataaaaagcctccacatgcccttatgattaagaattcttgtttatgttttcatgttctccagggtgcatgcagacctcatcttttggggttttattgctaagtacatagatatggtgttgtttgggtttataaacgtgagtagtttgctaaataattctctgtgttctaacaggaaatgaaggtcaggactaaaagatgggatgctctttgcttaatctgtcatcacactaggttttcataaattacataatatccatttatctgtttatctttctgtaattctaatttatatcctaaatttcatgtgaaaaagctttgagaatttttttttttttaatgagccgtaagccgggcatggtggctcacgcctgtactcctagaactttgggagtccgaggcaggaggatggcttgagcctaggagttcaagaccagtctgagcaacatagcaagaccctgtctctacaaaaaacaacaacaaaaaatgatccaggtatgctggtgtgtgcctgtagtcccagctacttggcaggctgaggtgagagaatcacttgagtccaaaagtgagctgtgattgcaccattgcgctctgggtgacagattgagacgctgtctcaaaaaaaaaaaggaatacagaaaaagagaaatcccataggacaaatgaccagcgatttatcacatatatgcagcatcacaaaagaggtggaggcagacactggagattaaaagaagcaagaaataaaaatggaatgtgattggggactcttctaatcttcattcaagcaaatcaaccataccaagaccctttctttagggaatcagataaatttaaatacaaactgagaattagataataatagggcattgagcattaattttgttacttgtgataatggttttgtggttatgttagtaaaagagttcttacaggtaaagacatactggagtatttatggatgaaatatggtgtctggaatttgttttaaaatgctctaggaaaaaatggggaatagataaaaacatacaaaaggttggtaacatgctgatgtttgttaaagttgggtgatgggtacaggggttcattttactattctctctacttttgtgtgttttaaaaatgttcataagaaaaggttcaaaaagaggcataagaggaaactatatgatgacataactctcgcattgtgatatatgagtacagtcttagaagttcctgtgaaatacaagcctgtaataaaatgaaatctaaaactctgtgtctgccaaacagtttttatttctttttggaaaaatatatattaagttattaattatgtttctatcttgtttgcagatgattctgggcctcccccatctactgtcattaaccaaaatgaaacatttgccaacataatttttaaacctactgtagtacaacaagccaggattgcccagaatggaattttgggagactttatcattagatatgacgtcaatagagaacagagcattggggacatccaggttctaaatggctattttgtgcactactttgctcctaaagaccttcctcctttacccaagaatgtggtattcgtgcttgacagcagtgcttctatggtgggaaccaaactccggcagaccaaggatgccctcttcacaattctccatgacctccgaccccaggaccgtttcagtatcattggattttccaaccggatcaaagtatggaaggaccacttgatatcagtcactccagacagcatcagggatgggaaagtgtacattcaccatatgtcacccactggaggcacagacatcaacggggccctgcagagggccatcaggctcctcaacaagtacgtggcccacagtggcattggagaccggagcgtgtccctcatcgtcttcctgacggatgggaagcccacggtcggggagacgcacaccctcaagatcctcaacaacacccgagaggccgcccgaggccaagtctgcatcttcaccattggcatcggcaacgacgtggacttcaggctgctggagaaactgtcgctggagaactgtggcctcacacggcgcgtgcacgaggaggaggacgcaggctcgcagctcatcgggttctacgatgaaatcaggaccccgctcctctctgacatccgcatcgattatccccccagctcagtggtgcaggccaccaagaccctgttccccaactacttcaacggctcggagatcatcattgcggggaagctggtggacaggaagctggatcacctgcacgtggaggtcaccgccagcaacagtaagaaattcatcatcctgaagacagatgtgcctgtgcggcctcagaaggcagggaaagatgtcacaggaagccccaggcctggaggcgatggagagggggacaccaaccacatcgagcgtctctggagctacctcaccacaaaggagctgctgagctcctggctgcaaagtgacgatgaaccggagaaggagcggctgcggcagcgggcccaggccctggctgtgagctaccgcttcctcactcccttcacctccatgaagctgagggggccggtcccacgcatggatggcctggaggaggcccacggcatgtcggctgccatgggacccgaaccggtggtgcagagcgtgcgaggagctggcacgcagccaggacctttgctcaagaagccataccagccaagaattaaaatctctaaaacatcaggtaaagcaaaggatgcggttgtgtgtggattgagagtaagagatgtttaaaaagtgtaaaaccaggccaggtgtactggctcacgcctgtaatcccagcactttgggaggccgaggtgggtgtattgcttgaggtcaggagttcaagaccagcctggccaacatggtgaaacctcgtctctactaaaaatacaaaaattagccaggcatggtggcaggggcctgtagttccagctactggggaggctgaggcaggagaatcacttgaacctgggaagttgaggttacagtgagccgagattgtgccaccacactctagcctggactacaagagtgaaactctgtctc

SEQ ID NO: 6561 - protein, 388 aa, Homo sapiens
MVGTKLRQTKDALFTILHDLRPQDRFSIIGFSNRIKVWKDHLISVTPDSIRDGKVYIHHMSPTGGTDINGALQRAIRLLNKYVAHSGIGDRSVSLIVFLTDGKPTVGETHTLKILNNTREAARGQVCIFTIGIGNDVDFRLLEKLSLENCGLTRRVHEEEDAGSQLIGFYDEIRTPLLSDIRIDYPPSSVVQATKTLFPNYFNGSEIIIAGKLVDRKLDHLHVEVTASNSKKFIILKTDVPVRPQKAGKDVTGSPRPGGDGEGDTNHIERLWSYLTTKELLSSWLQSDDEPEKERLRQRAQALAVSYRFLTPFTSMKLRGPVPRMDGLEEAHGMSAAMGPEPVVQSVRGAGTQPGPLLKKPYQPRIKISKTSGKAKDAVVCGLRVRDV

SEQ ID NO: 6562 - DNA, 4998 bp, Homo sapiens
aggggccgcgccaatatggcggcggctgcggccgctgcggtgacggttggcggcggccggtgaggcgggcggggccggaggcgcggaggcggggtcccgggcgagccgccctgggaggcgggggccgtttccatagcggcggcaggaggtgtcgcgccggggaacttcctggttcccgggctcggcttcgccgggatcctcttggaagggaaacaatggggcggagggcactgcggtagccgccgccgccgccgcgccgcgccgcgccggatctgctcggccgcccgggaccgccagctctgtccgctgcccacagcctagcagtcgggaccgtactgaggacatgtattcctctgagaaaccttggacagcagattttggtttaatatctgattgggacaacattcagacccatttccagtcatgaattcagaccaggatgtagcactcaaacttgcccaggagcgagctgaaatagttgctaaatatgacagaggacgagaaggtgcagagattgaaccttgggaagatgctgattaccttgtttacaaagtcacagatagatttggctttttacatgaggaggagctcccagatcataatgtggctgtggaacggcaaaagcacctggaaattgaaagaactaccaaatggctgaaaatgctgaaaggatgggaaaaatacaagaacactgaaaagtttcataggcgaatttacaaaggaataccactccagctcagaggtgaagtctgggccctccttcttgagatccctaaaatgaaagaagaaacaagggacctgtatagtaaattaaaacacagagcacggggctgttcacctgacatcagacaaatagacctggatgtcaaccgcacatttcgggaccacattatgtttagagacagatatggtgttaagcaacaatccttattccatgtgcttgctgcctattctatttataacacggaagtcgggtattgtcaggggatgagccagatcacagctttactcctcatgtatatgaacgaggaagatgccttctgggccctggtcaaactcttctcaggccctaaacatgccatgcatggcttttttgtccaaggttttcctaaactcttgaggtttcaagaacatcatgaaaaaatactgaacaaatttctgtccaagcttaagcaacacttggattctcaagaaatctacacaagtttttacacaatgaaatggttttttcagtgtttccttgatcgtactccctttacactaaacctcagaatatgggatatctacatctttgaaggagaacgagttcttactgctatgtcttacaccatcttaaaattacacaaaaaacatctaatgaaattgtccatggaagaacttgtagaattttttcaggagaccctggcaaaggattttttctttgaagatgattttgtgatagagcaacttcagatttctatgacagaactaaagcgggcaaagttagaccttccagaacctggtaaagaggatgaatatccaaagaagcccttggggcagcttccacctgaacttcagtcttggggcgtccatcacttgagcaacggacagaggagcgtgggccggccgagcccgctggccagcggcaggagggagagcggggcgccccacaggaggcacgagcactccccgcacccccagagcaggaccgggacgcccgagagagcacagccgccaagacggaaatcggtggaggaggagagcaaaaagcttaaagatgaggcagattttcaaagaaaactcccatcgggtccacaggacagttccaggcaatataatcacgcagctgccaaccaaaatagcaacgccacttcaaatatcaggaaggagtttgtgcccaaatggaataaaccgtcagacgtctcagctacagagagaactgccaaatacaccatggaaggcaaaggtcgagcagcgcaccccgcgctcgcagttaccgtcccaggtcctgccgaggtgcgggtgtcaaacgtgcggccaaagatgaaggccctggatgctgaggacgggaagcggggctccactgcatcgcagtacgacaacgtgccaggcccggagctggacagcggcgcttccgtggaggaggcgctggaaagggcttactcccagagcccccggcatgccctttaccctcctagcccgagaaagcacgctgagccaagttctagtccatcaaaagtatccaacaagtttacttttaaagtacagcctccaagtcatgcacgatatccgtcccagctagatggggaagcccgagggctagctcatcccccctcctacagcaatccccccgtttaccacggaaactctcccaaacacttccctactgccaacagcagctttgcttctccacagtttagccctgggactcaactgaatccttccaggagacctcatggttctactctttccgtcagtgcttctccggagaaatcttacagccgcccaagcccccttgtactgccgtctagtcgaatagaagtcctccctgttgacactggtgctgggggatattcgggcaattcagggtcaccaaagaatggaaaattgatcattccaccagtggattacttgccagataacagaacatggtcagaagttagttatacatacagacctgagacgcagggacaatcatggacccgagatgctagccgtggcaatttaccaaaatactcagcctttcaactcgcaccctttcaggaccatggcctccctgcagtttctgtagatagtcccgtgagatataaagcttcaccggccgcagaagatgccagtccatctggatatccatattcagggcccccgcctccagcctaccactacaggaatcgggacgggctttccatccaagagtcagtgttgctgtgagatttgacgtgtacttgctaaagacgagagagaaaccacgtgaaacctacattgctatgttcataattgccaaagcagtatttatactattgtaaacaactcgcacatctctcctgtctgttagtagtaagaatacagggaaatgtcttcagccccacgtagatgctgcttaagatgagcgtttcaattgcatcatcactgacctgttagaatttaacccggaaacatcgcaatagcatttagggatgcacgcacagtggtaatttattactcagttccggttatgtttttctccaaaacctgaacatttttactctgttggctcattctattttgactaatgttacaaagtactgaaaaaactgtagaatagatatttttaaggctatatgtagtgtatgtgtcttttaatagatataggcatctgttcatccacatttgaacacagagctaaagaaacgttttttaaaaaactacttttaatccagatccatggaataatatgtaattcttgttttccttgtcttttagtccagtttttctttttccctctcatatatttgtaacctgggtcctaaactgactgaagagtttgtcctgactttattaattgcagtctcacagaatgctcatcattctccttcagctgttgccattttctttcaatctgaaaattaaagacattggagagaaaggctaaccacttaatggtgcttaaaaatcggggcacttaaaataagtttacggccaaaggtgcagcagtgcttatcacatccacatactaagagattggtcttagtgcgtttgtgccctttgttctggtctgactcttgcgaatctcagagcaggagaagttgcagcttactgatccctcagtgctcacagtactcatgtggggcagccacactaactgcattagcagtgtggttacttctttcttctgcctcgactcacatggcttctccccacgaaggtcccagggtggccatttatacaatccatttctgtcctctttatggaatgtagtcgacggatattgctgcacctcatcaggccattacattgtccatgttaaaattataaaaatgatcctagtttttcataggagtctaggattttgatcttttaaaaaatacagtgtgatttcatgcttttgaacatctttttttcattgaaacaaattcaagttcttggcttaaaaaaaaattagtgatgtctttaaaaaatattctgttacactacagataccaaaacactgacaaagatttaggcactccaagagagtatgacttcgtgtttaattggggagcttgttttcaacattgcttatatttgaatagtagaaaacccgacattgatgtttcttcctgttgcaaggtggggctttaaactttcaaggtacaaaagtatgtcttttaaaatggaagtaacgtttgtttagctagtgaatgtgacaatatattttatgtatataatgagtctaatgtaattttgatcaacttggtaatgatgttattaaatagcaaaacaagtgcagtgtattaaagctaaacactacattgaaacgcaaacaaaattctggtgaaataactgggctgttgatgcaggtcaggtggaagctgagaaataaatgtatataaatatgtagctgaggatattaattcccattatataaccataattctgtgacttgtaataaaccaagctgtacaatttagtttataatagcagtatctgagctgctccaaaatatatatatcaacagtggtaaatactgtagatttttatatatatatatatatatatatatatatatgcaaaaaatatatatatacacacaagcactattttcttatgtcatttatgacattttttatctgtatacttttttgatgtgattgttttttaacatgctaaaagtaataagtatattttgtgtcttttatgtgcatttttttcatacggcaaaaatggtgcaccccctgatgctttgaaggctaattctcttctaatggagtagctgttgcctagtattcacctgtgttactttgtatatgtcacagttctatgtttaatgctttactaatt

SEQ ID NO: 6563 - protein, 828 aa, Homo sapiens; identical to SEQ ID NO: 897

SEQ ID NO: 6564 - DNA, 4840 bp, Homo sapiens
aggggccgcgccaatatggcggcggctgcggccgctgcggtgacggttggcggcggccggtgaggcgggcggggccggaggcgcggaggcggggtcccgggcgagccgccctgggaggcgggggccgtttccatagcggcggcaggaggtgtcgcgccggggaacttcctggttcccgggctcggcttcgccgggatcctcttggaagggaaacaatggggcggagggcactgcggtagccgccgccgccgccgcgccgcgccgcgccggatctgctcggccgcccgggaccgccagctctgtccgctgcccacagcctagcagtcgggaccgtactgaggacatgtattcctctgagaaaccttggacagcagattttggtttaatatctgattgggacaacattcagacccatttccagtcatgaattcagaccaggatgtagcactcaaacttgcccaggagcgagctgaaatagttgctaaatatgacagaggacgagaaggtgcagagattgaaccttgggaagatgctgattaccttgtttacaaagtcacagatagatttggctttttacatgaggaggagctcccagatcataatgtggctgtggaacggcaaaagcacctggaaattgaaagaactaccaaatggctgaaaatgctgaaaggatgggaaaaatacaagaacactgaaaagtttcataggcgaatttacaaaggaataccactccagctcagaggtgaagtctgggccctccttcttgagatccctaaaatgaaagaagaaacaagggacctgtatagtaaattaaaacacagagcacggggctgttcacctgacatcagacaaatagacctggatgtcaaccgcacatttcgggaccacattatgtttagagacagatatggtgttaagcaacaatccttattccatgtgcttgctgcctattctatttataacacggaagtcgggtattgtcaggggatgagccagatcacagctttactcctcatgtatatgaacgaggaagatgccttctgggccctggtcaaactcttctcaggccctaaacatgccatgcatggcttttttgtccaaggttttcctaaactcttgaggtttcaagaacatcatgaaaaaatactgaacaaatttctgtccaagcttaagcaacacttggattctcaagaaatctacacaagtttttacacaatgaaatggttttttcagtgtttccttgatcgtactccctttacactaaacctcagaatatgggatatctacatctttgaaggagaacgagttcttactgctatgtcttacaccatcttaaaattacacaaaaaacatctaatgaaattgtccatggaagaacttgtagaattttttcaggagaccctggcaaaggattttttctttgaagatgattttgtgatagagcaacttcagatttctatgacagaactaaagcgggcaaagttagaccttccagaacctggtaaagaggatgaatatccaaagaagcccttggggcagcttccacctgaacttcagtcttggggcgtccatcacttgagcaacggacagaggagcgtgggccggccgagcccgctggccagcggcaggagggagagcggggcgccccacaggaggcacgagcactccccgcacccccagagcaggaccgggacgcccgagagagcacagccgccaagacggaaatcggtggaggaggagagcaaaaagcttaaagatgaggcagattttcaaagaaaactcccatcgggtccacaggacagttccaggcaatataatcacgcagctgccaaccaaaatagcaacgccacttcaaatatcaggaaggagtttgtgcccaaatggaataaaccgtcagacgtctcagctacagagagaactgccaaatacaccatggaaggcaaaggtcgagcagcgcaccccgcgctcgcagttaccgtcccaggtcctgccgaggtgcgggtgtcaaacgtgcggccaaagatgaaggccctggatgctgaggacgggaagcggggctccactgcatcgcagtacgacaacgtgccaggcccggagctggacagcggcgcttccgtggaggaggcgctggaaagggcttactcccagagcccccggcatgccctttaccctcctagcccgagaaagcacgctgagccaagttctagtccatcaaaagtatccaacaagtttacttttaaagtacagcctccaagtcatgcacgatatccgtcccagctagatggggaagcccgagggctagctcatcccccctcctacagcaatccccccgtttaccacggaaactctcccaaacacttccctactgccaacagcagctttgcttctccacagtttagccctgggactcaactgaatccttccaggagacctcatggttctactctttccgtcagtgcttctccggagaaatcttacagccgcccaagcccccttgtactgccgtctagtcgaatagaagtcctccctgttgacactggtgctgggggatattcgggcaattcagggtcaccaaagaatggaaaattgatcattccaccagtggattacttgccagataacagaacatggtcagaagttagttatacatacagacctgagacgcagggacaatcatggacccgagatgctagccgtggcaatttaccaaaatactcagcctttcaactcgcaccctttcaggaccatggcctccctgcagtttctgtagatagtcccgtgagatataaagcttcaccggccgcagaagatgccagtccatctggatatccatattcagggcccccgcctccagcctaccactacaggaatcgggacgggctttccatccaagagtcagtgttgctgtgagatttgacgtgtacttgctaaagacgagagagaaaccacgtgaaacctacattgctatgttcataattgccaaagcagtatttatactattgtaaacaactcgcacatctctcctgtctgttagtagtaagaatacagggaaatgtcttcagccccacgtagatgctgcttaagatgagcgtttcaattgcatcatcactgacctgttagaatttaacccggaaacatcgcaatagcatttagggatgcacgcacagtggtaatttattactcagttccggttatgtttttctccaaaacctgaacatttttactctgttggctcattctattttgactaatgttacaaagtactgaaaaaactgtagaatagatatttttaaggctatatgtagtgtatgtgtcttttaatagatataggcatctgttcatccacatttgaacacagagctaaagaaacgttttttaaaaaactacttttaatccagatccatggaataatatgtaattcttgttttccttgtcttttagtccagtttttctttttccctctcatatatttgtaacctgggtcctaaactgactgaagagtttgtcctgactttattaattgcagtctcacagaatgctcatcattctccttcagctgttgccattttctttcaatctgaaaattaaagacattggagagaaaggctaaccacttaatggtgcttaaaaatcggggcacttaaaataagtttacggccaaaggtgcagcagtgcttatcacatccacatactaagagattggtcttagtgcgtttgtgccctttgttctggtctgactcttgcgaatctcagagcaggagaagttgcagcttactgatccctcagtgctcacagtactcatgtggggcagccacactaactgcattagcagtgtggttacttctttcttctgcctcgactcacatggcttctccccacgaaggtcccagggtggccatttatacaatccatttctgtcctctttatggaatgtagtcgacggatattgctgcacctcatcaggccattacattgtccatgttaaaattataaaaatgatcctagtttttcataggagtctaggattttgatcttttaaaaaatacagtgtgatttcatgcttttgaacatctttttttcattgaaacaaattcaagttcttggcttaaaaaaaaattagtgatgtctttaaaaaatattctgttacactacagataccaaaacactgacaaagatttaggcactccaagagagtatgacttcgtgtttaattggggagcttgttttcaacattgcttatatttgaatagtagaaaacccgacattgatgtttcttcctgttgcaaggtggggctttaaactttcaaggtacaaaagtatgtcttttaaaatggaagtaacgtttgtttagctagtgaatgtgacaatatattttatgtatataatgagtctaatgtaattttgatcaacttggtaatgatgttattaaatagcaaaacaagtgcagtgtattaaagctaaacactacattgaaacgcaaacaaaattctggtgaaataactgggctgttgatgcaggtcaggtggaagctgagaaataaatgtatataaatatgtagctgaggatattaattcccattatataaccataattctgtgacttgtaataaaccaagctgtacaatttagtttataatagcagtatctgagctgctccaaaatatatatatcaacagtggtaaatactgtagatttttatatatatatatatatatatatatatatatgcaaaaaatatatatatacacacaagcactattttcttatgtcatttatgacattttttatctgtatacttttttgatgtgattgttttttaacatgctaaaagtaataagtat

SEQ ID NO: 6565 - protein, 828 aa, Homo sapiens; identical to SEQ ID NO: 897

SEQ ID NO: 6566 - DNA, 3297 bp, Homo sapiens
aggggccgcgccaatatggcggcggctgcggccgctgcggtgacggttggcggcggccggtgaggcgggcggggccggaggcgcggaggcggggtcccgggcgagccgccctgggaggcgggggccgtttccatagcggcggcaggaggtgtcgcgccggggaacttcctggttcccgggctcggcttcgccgggatcctcttggaagggaaacaatggggcggagggcactgcggtagccgccgccgccgccgcgccgcgccgcgccggatctgctcggccgcccgggaccgccagctctgtccgctgcccacagcctagcagtcgggaccgtactgaggacatgtattcctctgagaaaccttggacagcagattttggtttaatatctgattgggacaacattcagacccatttccagtcatgaattcagaccaggatgtagcactcaaacttgcccaggagcgagctgaaatagttgctaaatatgacagaggacgagaaggtgcagagattgaaccttgggaagatgctgattaccttgtttacaaagtcacagatagatttggctttttacatgaggaggagctcccagatcataatgtggctgtggaacggcaaaagcacctggaaattgaaagaactaccaaatggctgaaaatgctgaaaggatgggaaaaatacaagaacactgaaaagtttcataggcgaatttacaaaggaataccactccagctcagaggtgaagtctgggccctccttcttgagatccctaaaatgaaagaagaaacaagggacctgtatagtaaattaaaacacagagcacggggctgttcacctgacatcagacaaatagacctggatgtcaaccgcacatttcgggaccacattatgtttagagacagatatggtgttaagcaacaatccttattccatgtgcttgctgcctattctatttataacacggaagtcgggtattgtcaggggatgagccagatcacagctttactcctcatgtatatgaacgaggaagatgccttctgggccctggtcaaactcttctcaggccctaaacatgccatgcatggcttttttgtccaaggttttcctaaactcttgaggtttcaagaacatcatgaaaaaatactgaacaaatttctgtccaagcttaagcaacacttggattctcaagaaatctacacaagtttttacacaatgaaatggttttttcagtgtttccttgatcgtactccctttacactaaacctcagaatatgggatatctacatctttgaaggagaacgagttcttactgctatgtcttacaccatcttaaaattacacaaaaaacatctaatgaaattgtccatggaagaacttgtagaattttttcaggagaccctggcaaaggattttttctttgaagatgattttgtgatagagcaacttcagatttctatgacagaactaaagcgggcaaagttagaccttccagaacctggtaaagaggatgaatatccaaagaagcccttggggcagcttccacctgaacttcagtcttggggcgtccatcacttgagcaacggacagaggagcgtgggccggccgagcccgctggccagcggcaggagggagagcggggcgccccacaggaggcacgagcactccccgcacccccagagcaggaccgggacgcccgagagagcacagccgccaagacggaaatcggtggaggaggagagcaaaaagcttaaagatgaggcagattttcaaagaaaactcccatcgggtccacaggacagttccaggcaatataatcacgcagctgccaaccaaaatagcaacgccacttcaaatatcaggaaggagtttgtgcccaaatggaataaaccgtcagacgtctcagctacagagagaactgccaaatacaccatggaaggcaaaggtcgagcagcgcaccccgcgctcgcagttaccgtcccaggtcctgccgaggtgcgggtgtcaaacgtgcggccaaagatgaaggccctggatgctgaggacgggaagcggggctccactgcatcgcagtacgacaacgtgccaggcccggagctggacagcggcgcttccgtggaggaggcgctggaaagggcttactcccagagcccccggcatgccctttaccctcctagcccgagaaagcacgctgagccaagttctagtccatcaaaagtatccaacaagtttacttttaaagtacagcctccaagtcatgcacgatatccgtcccagctagatggggaagcccgagggctagctcatcccccctcctacagcaatccccccgtttaccacggaaactctcccaaacacttccctactgccaacagcagctttgcttctccacagtttagccctgggactcaactgaatccttccaggagacctcatggttctactctttccgtcagtgcttctccggagaaatcttacagccgcccaagcccccttgtactgccgtctagtcgaatagaagtcctccctgttgacactggtgctgggggatattcgggcaattcagggtcaccaaagaatggaaaattgatcattccaccagtggattacttgccagataacagaacatggtcagaagttagttatacatacagacctgagacgcagggacaatcatggacccgagatgctagccgtggcaatttaccaaaatactcagcctttcaactcgcaccctttcaggaccatggcctccctgcagtttctgtagatagtcccgtgagatataaagcttcaccggccgcagaagatgccagtccatctggatatccatattcagggcccccgcctccagcctaccactacaggaatcgggacgggctttccatccaagagtcagtgttgctgtgagatttgacgtgtacttgctaaagacgagagagaaaccacgtgaaacctacattgctatgttcataattgccaaagcagtatttatactattgtaaacaactcgcacatctctcctgtctgttagtagtaagaatacagggaaatgtcttcagccccacgtagatgctgcttaagatgagcgtttcaattgcatcatcactgacctgttagaatttaacccggaaacatcgcaatagcatttagggatgcacgcacagtggtaatttattactcagttccggttatgtttttctccaaaacctgaacatttttactctgttggctcattctattttgactaatgttacaaagtactgaaaaaactgtagaatagatatttttaaggct

SEQ ID NO: 6567 - protein, 828 aa, Homo sapiens; identical to SEQ ID NO: 897

SEQ ID NO: 6568 - DNA, 1025 bp, Homo sapiens
aggggccgcgccaatatggcggcggctgcggccgctgcggtgacggttggcggcggccggtgaggcgggcggggccggaggcgcggaggcggggtcccgggcgagccgccctgggaggcgggggccgtttccatagcggcggcaggaggtgtcgcgccggggaacttcctggttcccgggctcggcttcgccgggatcctcttggaagggaaacaatggggcggagggcactgcggtagccgccgccgccgccgcgccgcgccgcgccggatctgctcggccgcccgggaccgccagctctgtccgctgcccacagcctagcagtcgggaccgtactgaggacatgtattcctctgagaaaccttggacagcagattttggtttaatatctgattgggacaacattcagacccatttccagtcatgaattcagaccaggatgtagcactcaaacttgcccaggagcgagctgaaatagttgctaaatatgacagaggacgagaaggtgcagagattgaaccttgggaagatgctgattaccttgtttacaaagtcacagatagatttggctttttacatgaggaggagctcccagatcataatgtggctgtggaacggcaaaagcacctggaaattgaaagaactaccaaatggctgaaaatgctgaaaggatgggaaaaatacaagaacactgaaaagtttcataggcgaatttacaaaggaataccactccagctcagaggtgaagtctgggccctccttcttgagatccctaaaatgaaagaagaaacaagggacctgtatagtaaattaaaacacagagcacggggctgttcacctgacatcagacaaatagacctggatgtcaaccgcacatttcgggaccacattatgtttagagacagatatggtgttaagcaacaatccttattccatgtgcttgctgcctattctatttataacacggtaagttggggcctgcctgcccaaggtctttgagttgtattctgaggtactccctactt

SEQ ID NO: 6569 - protein, 191 aa, Homo sapiens [sequence omitted]

SEQ ID NO: 6570 - DNA, 2491 bp, Homo sapiens
ttgcatttctgatatattatggtatctgaaaaggatcagacggagtcttgccctgtcacccaggctggagtgcagtggcgcaatctcggctcactgcaagctccgcctcctaggttgacaccattctcctgcctcagcctcccaagtagctgggactacaggaacccgccaccacgcccagctaatctttttgtatttttagtagagacatggtttcaccatgttagccaggatggtctcgatctcctgacctcgtgatccacccgcctcggcctcccaaagtgctgggattataggtgtgagccactacgcccggcctggatgctacattcttaaaggatgctgattttatcttggtttcttgcttttttaagttatctctcatgttctttgatttgctctatgttgcttctttctgtggtcttcttgggtatactcaagtgtgtatcgcatatgtttaacaaaggaaaaatagtgttaaaagaaaaagtatcacttaatataagaagcaaaacttagtttttgtttctatgatagtgacatccaggtatgatttaggttatttttcactttaaacgggctattaacttcacgtgagaaaaaaactgtagaaacgttaactcctgtagaatgatgactatctgtggtgtagtaagatcatacaacttctctacttgttactgtgagttgcttaataaatggcagtacaagtgtcaaatccataattagtcaatatcaagagctgcattttggattgcatgtactgtcccaaatatatgttgtgcaagttactttgtatcatgttaatggagaaaagagtggatattatgaaatcagcaatataaatcaaatgtatatgtggtcctgcaatgtaattgaaggtactcagtgttctcagacactcatgcaatatcttgtgttgctttctcagattttttaggtgtatcataggggatagctgggaactggtagagcagaggtactaagttccacctggaaatgctttagagtagctctttgaatatgtctttacttattatcttacagcgtatgtgtatatgattattttctagagggtcgtaccctttattaagctgtgagcttcttgagggcaaggactgcaattcattaatcattttggagaaaagtgaataattctgaagaattcggtggttcatgagcttgcctggtatttgtttctctatggcttatcatctaagtgagataacagatagtagataattgataaatttaatctgttacctaattactgagaggattcgattcttgctttatgttattactgaaacagactgcccagtaatcttctctagagagcaattaggtttgcaatgagttattttattgagaatgctacttgaaattaaatgtttatagcactatcttgatataatttaaatataatttaaatgtgctgaagtatcttcattcagataacttgttaccccttaacaaaaggctgcttgagtattgtttctctcccatttggcaaacaccagatgcagtgattaataaaggtcattatgctacttagtcatggagcgcttttaatgactgttacctgaacatctgctagattcacgatggcagttaccagaaacatctaacaaaatatacatgctgtgctttgaaaatctggcttggactaatctaaatgactacctaagaacatttgaatattccctgaagttttattaattgtgagaaagcccttatctttctgtaatgtgaacaatccaaaatgtcaacaaaatgctaatttggaatggctgtccttgacaatctcagcttcctgagggctgcatgctcaggggctgggagtcgtctgtgtagagtcgatggagaccctggctctcttgcacttctgattatcatgggaagcctcgccttggaaatgtgggactggagttgagctgaaaagaaggaaaaactttacctagactctgcagggagcaagttgaaaagcagagaatgggtatattaattatggggtttttgaaaacagcactaagtacttttcagaaaaacttattttgaaataattatggattcataggaaattgcaaaacagtaccgagaaatcccatgtactttttactcagtttcctccatttttatgtaactttagttaaatatcaaaccaggatattgatattggtacaatccacagactttattcagatttcattagttttacatgcatgtgtgtggtgtatgtgtgacatttgtgtgtatgtgtgtgtgtgtgtggtgggtcctcggcaattttatcatgtgtagatttgtgtaaccgtcatcagaaccaaggttacagaagagtttcatcaccacaggtttccttaacgctatgccctttctatcatacccttcccacacctccctgcacttccctaaccccttgcaatgaatttgttctccatctctataaatttaccatcttgagaatgctatataaatggaatcatatatt

SEQ ID NO: 6571 - protein, 79 aa, Homo sapiens
MVSEKDQTESCPVTQAGVQWRNLGSLQAPPPRLTPFSCLSLPSSWDYRNPPPRPANLFVFLVETWFHHVSQDGLDLLTS

SEQ ID NO: 6572 - DNA, 2684 bp, Homo sapiens
cggccgctgcggtgacggttggcggcggccggtgaggcgggcggggccggaggcgcggaggcggggtcccgggcgagccgccctgggaggcgggggccgtttccatagcggcggcaggaggtgtcgcgccggggaacttcctggttcccgggctcggcttcgccgggatcctcttggaagggaaacaatggggcggagggcactgcggtagccgccgccgccgccgcgccgcgccgcgccggatctgctcggccgcccgggaccgccagctctgtccgctgcccacagcctagcagtcgggaccgtactgaggacatgtattcctctgagaaaccttggacagcagattttggtttaatatctgattgggacaacattcagacccatttccagtcatgaacggagtcttgccctgtcacccaggctggagtgcagtggcgcaatctcggctcactgcaagctccgcctcctaggttgacaccattctcctgcctcagcctcccaagtagctgggactacaggaacccgccaccacgcccagctaatctttttgtatttttagtagagacatggtttcaccatgttagccaggatggtctcgatctcctgacctcgtgatccacccgcctcggcctcccaaagtgctgggattataggtgtgagccactacgcccggcctggatgctacattcttaaaggatgctgattttatcttggtttcttgcttttttaagttatctctcatgttctttgatttgctctatgttgcttctttctgtggtcttcttgggtatactcaagtgtgtatcgcatatgtttaacaaaggaaaaatagtgttaaaagaaaaagtatcacttaatataagaagcaaaacttagtttttgtttctatgatagtgacatccaggtatgatttaggttatttttcactttaaacgggctattaacttcacgtgagaaaaaaactgtagaaacgttaactcctgtagaatgatgactatctgtggtgtagtaagatcatacaacttctctacttgttactgtgagttgcttaataaatggcagtacaagtgtcaaatccataattagtcaatatcaagagctgcattttggattgcatgtactgtcccaaatatatgttgtgcaagttactttgtatcatgttaatggagaaaagagtggatattatgaaatcagcaatataaatcaaatgtatatgtggtcctgcaatgtaattgaaggtactcagtgttctcagacactcatgcaatatcttgtgttgctttctcagattttttaggtgtatcataggggatagctgggaactggtagagcagaggtactaagttccacctggaaatgctttagagtagctctttgaatatgtctttacttattatcttacagcgtatgtgtatatgattattttctagagggtcgtaccctttattaagctgtgagcttcttgagggcaaggactgcaattcattaatcattttggagaaaagtgaataattctgaagaattcggtggttcatgagcttgcctggtatttgtttctctatggcttatcatctaagtgagataacagatagtagataattgataaatttaatctgttacctaattactgagaggattcgattcttgctttatgttattactgaaacagactgcccagtaatcttctctagagagcaattaggtttgcaatgagttattttattgagaatgctacttgaaattaaatgtttatagcactatcttgatataatttaaatataatttaaatgtgctgaagtatcttcattcagataacttgttaccccttaacaaaaggctgcttgagtattgtttctctcccatttggcaaacaccagatgcagtgattaataaaggtcattatgctacttagtcatggagcgcttttaatgactgttacctgaacatctgctagattcacgatggcagttaccagaaacatctaacaaaatatacatgctgtgctttgaaaatctggcttggactaatctaaatgactacctaagaacatttgaatattccctgaagttttattaattgtgagaaagcccttatctttctgtaatgtgaacaatccaaaatgtcaacaaaatgctaatttggaatggctgtccttgacaatctcagcttcctgagggctgcatgctcaggggctgggagtcgtctgtgtagagtcgatggagaccctggctctcttgcacttctgattatcatgggaagcctcgccttggaaatgtgggactggagttgagctgaaaagaaggaaaaactttacctagactctgcagggagcaagttgaaaagcagagaatgggtatattaattatggggtttttgaaaacagcactaagtacttttcagaaaaacttattttgaaataattatggattcataggaaattgcaaaacagtaccgagaaatcccatgtactttttactcagtttcctccatttttatgtaactttagttaaatatcaaaccaggatattgatattggtacaatccacagactttattcagatttcattagttttacatgcatgtgtgtggtgtatgtgtgacatttgtgtgtatgtgtgtgtgtgtgtggtgggtcctcggcaattttatcatgtgtagatttgtgtaaccgtcatcagaac

SEQ ID NO: 6573 - protein, 64 aa, Homo sapiens [sequence omitted]

SEQ ID NO: 6574 - DNA, 1553 bp, Homo sapiens
ttgcatttctgatatattatggtatctgaaaaggatcagacggagtcttgccctgtcacccaggctggagtgcagtggcgcaatctcggctcactgcaagctccgcctcctaggttgacaccattctcctgcctcagcctcccaagtagctgggactacaggaacccgccaccacgcccagctaatctttttgtatttttagtagagacatggtttcaccatgttagccaggatggtctcgatctcctgacctcgtgatccacccgcctcggcctcccaaagtgctgggattataggtgtgagccactacgcccggcctggatgctacattcttaaaggatgctgattttatcttggtttcttgcttttttaagttatctctcatgttctttgatttgctctatgttgcttctttctgtggtcttcttgggtatactcaagtgtgtatcgcatatgtttaacaaaggaaaaatagtgttaaaagaaaaagtatcacttaatataagaagcaaaacttagtttttgtttctatgatagtgacatccaggtatgatttaggttatttttcactttaaacgggctattaacttcacgtgagaaaaaaactgtagaaacgttaactcctgtagaatgatgactatctgtggtgtagtaagatcatacaacttctctacttgttactgtgagttgcttaataaatggcagtacaagtgtcaaatccataattagtcaatatcaagagctgcattttggattgcatgtactgtcccaaatatatgttgtgcaagttactttgtatcatgttaatggagaaaagagtggatattatgaaatcagcaatataaatcaaatgtatatgtggtcctgcaatgtaattgaaggtactcagtgttctcagacactcatgcaatatcttgtgttgctttctcagattttttaggtgtatcataggggatagctgggaactggtagagcagaggtactaagttccacctggaaatgctttagagtagctctttgaatatgtctttacttattatcttacagcgtatgtgtatatgattattttctagagggtcgtaccctttattaagctgtgagcttcttgagggcaaggactgcaattcattaatcattttggagaaaagtgaataattctgaagaattcggtggttcatgagcttgcctggtatttgtttctctatggcttatcatctaagtgagataacagatagtagataattgataaatttaatctgttacctaattactgagaggattcgattcttgctttatgttattactgaaacagactgcccagtaatcttctctagagagcaattaggtttgcaatgagttattttattgagaatgctacttgaaattaaatgtttatagcactatcttgatataatttaaatataatttaaatgtgctgaagtatcttcattcagataacttgttaccccttaacaaaaggctgcttgagtattgtttctctcccatttggcaaacaccagatgcagtgattaataaaggtcattatgctactt

SEQ ID NO: 6575 - protein, 79 aa, Homo sapiens; identical to SEQ ID NO: 6571

SEQ ID NO: 6576 - DNA, 1913 bp, Homo sapiens
cggccgctgcggtgacggttggcggcggccggtgaggcgggcggggccggaggcgcggaggcggggtcccgggcgagccgccctgggaggcgggggccgtttccatagcggcggcaggaggtgtcgcgccggggaacttcctggttcccgggctcggcttcgccgggatcctcttggaagggaaacaatggggcggagggcactgcggtagccgccgccgccgccgcgccgcgccgcgccggatctgctcggccgcccgggaccgccagctctgtccgctgcccacagcctagcagtcgggaccgtactgaggacatgtattcctctgagaaaccttggacagcagattttggtttaatatctgattgggacaacattcagacccatttccagtcatgaacggagtcttgccctgtcacccaggctggagtgcagtggcgcaatctcggctcactgcaagctccgcctcctaggttgacaccattctcctgcctcagcctcccaagtagctgggactacaggaacccgccaccacgcccagctaatctttttgtatttttagtagagacatggtttcaccatgttagccaggatggtctcgatctcctgacctcgtgatccacccgcctcggcctcccaaagtgctgggattataggtgtgagccactacgcccggcctggatgctacattcttaaaggatgctgattttatcttggtttcttgcttttttaagttatctctcatgttctttgatttgctctatgttgcttctttctgtggtcttcttgggtatactcaagtgtgtatcgcatatgtttaacaaaggaaaaatagtgttaaaagaaaaagtatcacttaatataagaagcaaaacttagtttttgtttctatgatagtgacatccaggtatgatttaggttatttttcactttaaacgggctattaacttcacgtgagaaaaaaactgtagaaacgttaactcctgtagaatgatgactatctgtggtgtagtaagatcatacaacttctctacttgttactgtgagttgcttaataaatggcagtacaagtgtcaaatccataattagtcaatatcaagagctgcattttggattgcatgtactgtcccaaatatatgttgtgcaagttactttgtatcatgttaatggagaaaagagtggatattatgaaatcagcaatataaatcaaatgtatatgtggtcctgcaatgtaattgaaggtactcagtgttctcagacactcatgcaatatcttgtgttgctttctcagattttttaggtgtatcataggggatagctgggaactggtagagcagaggtactaagttccacctggaaatgctttagagtagctctttgaatatgtctttacttattatcttacagcgtatgtgtatatgattattttctagagggtcgtaccctttattaagctgtgagcttcttgagggcaaggactgcaattcattaatcattttggagaaaagtgaataattctgaagaattcggtggttcatgagcttgcctggtatttgtttctctatggcttatcatctaagtgagataacagatagtagataattgataaatttaatctgttacctaattactgagaggattcgattcttgctttatgttattactgaaacagactgcccagtaatcttctctagagagcaattaggtttgcaatgagttattttattgagaatgctacttgaaattaaatgtttatagcactatcttgatataatttaaatataatttaaatgtgctgaagtatcttcattcagataacttgttaccccttaacaaaaggctgcttgagtattgtttctctcccatttggcaaacaccagatgcagtgattaataaaggtcattatgctactt

SEQ ID NO: 6577 - protein, 59 aa, Homo sapiens
MLILSWFLAFLSYLSCSLICSMLLLSVVFLGILKCVSHMFNKGKIVLKEKVSLNIRSKT

SEQ ID NO: 6578 - DNA, 6368 bp, Homo sapiens
aaaagtcgtgtatcccaccgagaaagtcaactgcctggataagtattggcataaaggatgtttccattgtgaggtctgcaagatggcactcaacatgaacaactacaaaggctatgaaaagaagccctattgtaatgcgtaaaataccatgaagattttgaaaaaacaaaggggagaggctttactcccgtcgtggacgatcctgtgacagagagagtgaggaagaacacccaggtggtcagcgatgctgcctataaaggggtccaccctcacatcgtggagatggacaggagacctggaatcattgttgcacctgttcttcccggagcctatcagcaaagccattcccaaggctatggctacatgcaccagaccagtgtgtcatccatgagatcaatgcagcattcaccaaatctaaggacctaccgagccatgtacgattacagtgcccaggatgaagacgaggtctcctttagagacggcgactacatcgtcaacgtgcagcctattgacgatggctggatgtacggcacagtgcagagaacagggagaacaggaatgctcccagcgaattacattgagtttgttaattaattatttctccctgccctttgagctttattctaatgtatcccaaacctaatctttttaaaagatagaagatacttttaagacaacttggccattattttacaatgatgtatccttcctttgacaattagacacacaggtaccaggaagaaggaatgacctctgggctgaaaacagcagcattttcagtaattcctacaaacaaaaatctttgtgtctggacacctggtgctgctaattgtgttcatggtttcctttgattggctattgaacccttctgggaaatgtatttttgtagactttaatagagaagttgattgtcccttaaatgtagtgtgtgtttgaaacttcttagctgtcactttggaatcaccccaagccaattctcttaactctgtaatgcagccaataatttcaaacccgttttgcttttgagtcatgaggcaatttccaatattagtgaaaattgcccaatataataagtgtaaacagtggcagaaggacagtctggttaaaattatattgactggtggccttagggatctagaaacttctactaaacagagaaatttccttgttccctaggctgactggtatctatttatttctcatttgtaccaaggcatctcctactctccatttatattctatggacccaagtctatgctcagttccacagaatgtcaggaccaaataacttcacagctactctgcaaagggcaaattataatgtcattgatataatttccctagtagcatttaccctgttgcatgtcatgtagattcaagcttctgtaacataggcagctgcactgcgcgttcctattattgaagcaaaaagggtgactgatacctaaaagccctttcttcctctagtcgccagctcatcagaaaaacatactttgaaaagatgcttgagattttcctgctgcatcgcactctagttttgaaggatttacatcttaggaaataacatgtatactctagtaaataagcgatttaggtgttccattgaacagctttgattaacttaatgccaccattgatttcaaagtgaagaaaatgtaacagaagccagtgaagcaatggaagctggagtgtgactggaaaaatactcagcaaacaaagttaccaattccatacagagatgatctggtatcttcttttggaaaatggtattcaaattctggaatggaaatctagccaccaaaacgggttaatcaaaagacgtccttttccatttttttttgcttttattttctaaatcatttttaagggaatgaaacaggaatgtcatcagagattttttagtacaggcccaagagcctgttctctaagaaagaaattgttgccatgttttgattttcgaataagtgactttgcaggctttatgctagcccttgctggtgggtcttgaaatttcatccagagtctgcagtccaggtcaccaagccagcggcacccgtcggcaaccctgtgtttttctgattgtgccgtttactgtgacctgcaacggggtggcattcacttagggtctgacttcacagctatgacaaaaccgaaaaagcaaaactgcaaaaaagtactaagatgtacgggtcttggggatatctgccttatatgttatattcaaggaaattaacaaaacatcctgtaaaacatcgtttaaggaaacgtttactagtccaaaggccaaagctaatttatttccactttagaaaagttagcacatgcttttgaaaatctgtgatttcattttattaggctaaaagggtaaataggctttattacactgaagctgcatctatatgtcactgacataaagttgaaaaaataaatgcaggcaaataactagagacttcttttaagggggtttggctggttttctctcactgaaatggccagtcgtgattaaagtgataaaaccccatatctgttttggtatattgtacacaaacctacaaaaataaactgaacttgcaatatttttgcaaaaaaatctgtcgttaaaactgaggataaaatacctgctcaattttattttactaagtatatatttacatttcacccaggcaggccattttcttttgtgattataagaaagagtagttgttgattaaattttcagactaaatataggacaggtacaattttggataaatagcacatttataagaaccgcaatgaaaactgacttgaaataatgcttgtaatcaggaaagtaatttcatccaccgatttcaaaaccagattcactgagcataaaagtcaatacatatttgaggaataagtctcctaaaattttaagcttcacgtaataatgtttgcatagcaaaatatttctgcttcaagcctttaggaattaagatctgatcagaatttaactaaagggtagttgttttacaatgaagactaaaactgaacaagatgttgcatgctcttgaggccataatttggtagtgttggcagttgttaataaagcttgtcaggatgttaagcatctcaggagaaatattggaaaattatatgtataaaaccaaagtgctatttttaaaagcatcatttaaaaaaaaatgacatgcctgaacaacttttccactttccacgtgcttccctcccacctttggtttggcaacaggtatctcgtgcatgaagctgacagctaaagaagattttaaaaattgagttaaagatgactgtgtaaatgtccaagcacagagagcatgcacctgactttctaaagtttgatgtgttctcaagcctgacagaagcacaaggaacagtttgatacacttttaaaaggttctgaaaacaaagctgtatagggatcctctctctcttgagcaaagtatagcaacagaatatattgcttttgttgtaagcttttgtagtacatgtttttactaataattcttgttctctagaaagctttctatttctaacctatggcaaaatgaatccttcatgtcttcttgttattgtttacacacttgcagtgtagcccagtttgaaatatttatttggttatcaactgcccatggaggaggctcttgatgatcccaggtctcctcgacctccatacaccacacaggcatttgtaagcacagtttccacaagcaccttgtaggaatatggataagattagaccagcccctctctgtccactgggtttatttcttgaagaagatgcagatctggtttttccaatgtgccacagtctttccttatcctctccatgctgagcttgacaacactctgggaatgaggaacaagactttttctaaaaagatagtggaagttcaagggatgtacctcgttttcaggttcatccatctccagtggaatgttttcaataaaagatgaagaaaatgtgtgtgatctttaataacacatccctatagaaagtggataaaagatataccaaaactgtaatacagatatatacaaatataggtgcctttttgattactcttgtttgtctagtatgctcttggaaagaaaaccaagcaagcaagttgctgcctattctatagtaatattttattacacatgattgatatttttgtggtagggaagtgggatgctcctcagatattaaaggtgttagctgattgtattttatctctaaagatttagaactttagaaaatgccgacttcttccatctatttctgaaaggttctttgtggatttatatagagttgagctatataaacattaactttagatttgggatttaaaatgcctattgtaagatagaataattgtgaggctggattcactacacaagatgaacttcacttcataaattaattataccttagcgatttgcttctgataatctaaaagtggctagattgtggttgttttggttaaggtgatatggaggtgggagagcttttagttaagtaagaagctatgtaaactgacaaggatgctaaaataaaagtctctgaagtattccatgccttttggaccctttcctcgcaactaactgtcaactgttgatcaaaaaagtcaaggcattgtatgttgcttctgtggttattattctgtgatgcttagactacttgaacccataaacttggaagaatctttgagcaaattttctcagttgtctgtatgacttcagtatattcctgggaatgccataggattttttgtgcttgatacatggtatccagtttgcatagtatcacttctttgtaatccagttgctgttaagaatgatgtactttaaaggaaaagagaaaactgcatcacagtcccattctccagtgtccatgcaatgaattgctgagcatttaggaagcagcaccaagtctattacaggcatggtgtgaaacttgatgtttgacctgtgatcaaaattgaaccattgtacagtttggcttctgtttgcttcaaaatatgtagaattgtggttgatgattaatttgcgagactaactttgagagtgtaacagttttgaagaaaacattgaatgttttgcaaatgaaggggcttcacggaatgttacaatgttactaatataatttggcttttgttatgcaaattgttaacaccagctattaaaatatattttagtagaaatgctttaattcatatttttttcctctacactgtgaatctttaagccttggtggactagagcaacatcgtgctgcccaaaggactaacctatgcaaactagttcacattttagtggatgtcgcagttaatgtgtaataagacattatttcccctgcataatgtacaacagcattgaaatgacacattaagcctagcatcacattgtatagtacagtcactcacaaacccttcaaggctaccctaatcattaacattaatatttgtttaaaagcaaatcaccgatttatctattgaaactacttaaatgacggcaaaccaggaatgacagatggctgtgtcagcaatggctttaatgtgttccctgcaagtggtctcctatgatagaactgcgttctcaaatgcactctcttcagggtcttaatattctgtgttttctctctgtatttgtaaaacattataacacattaatttcctatctctacacatttggtttgcttaaataaatgcaggatataaaaaaaatggttcacttcttggctctcaccgtggtttcttggagcatgggttgttagatgcaagcaatgcaccctaataataccccgggtctgagatttaacatgacaactcacatcaaatcgcatcagaggtgtgtgctgccttcagtgcatttacattggtgaatcagtcaagatattttcctcccccaaataaacttagttgtaagtgataacaatattatgcttctccaagctcagtatctttctgattttatatcaaagtaccgcaacaatgcatcattgtagttaatttatttcaagaataaattcctcatatgtcctcaatagtacaattctaattttcttctattcataagatgaaagaaatggtttggagcatagaatagaaagtgcacaaattgagtacataaaatgggaagcaactgatttctcagctaagaaaggctcatttatcacagaacacaattgcttttctccccccactacgcttcccataattgaaaaagtgagtccctatttttcacactcatataaatctatgcgatttggatgctagtcttattgtattattttgtaaaactttctctttggctcataatccttcctaattgtaaattgataaactttgcggatgacatctgctcgtagaataaacacttcttccaaa

SEQ ID NO: 6579 - protein, 103 aa, Homo sapiens
MDRRPGIIVAPVLPGAYQQSHSQGYGYMHQTSVSSMRSMQHSPNLRTYRAMYDYSAQDEDEVSFRDGDYIVNVQPIDDGWMYGTVQRTGRTGMLPANYIEFVN

SEQ ID NO: 6580 - DNA, 6941 bp, Homo sapiens
cctgcgcggcggcggcggcgaggcgggggagcgagtgagcgcgaggggcgggcgcgagtgactgtgtgagtcacccgtacctggagtgcgagcgacgcagagccagcggcgcggagccggagccggagccgagacccagcgcctgcgagcccgagagcgcggccggccccaggcgccaggccccgtcgccctccccgtgcactcacccgtggcccggcgccgactccctacccggcgcccgccgcccgcagccctcccgcctgccaggaggcggtgcggggctcgccgggggatgtcacagcggctcctgggagccagcagccgccgccgccgccgcccccgggaaccgcgatcatgaacccccagtgcgcccgttgcggaaaagtcgtgtatcccaccgagaaagtcaactgcctggataagtattggcataaaggatgtttccattgtgaggtctgcaagatggcactcaacatgaacaactacaaaggctatgaaaagaagccctattgtaatgcacactacccgaagcagtccttcaccacggtggcagatacacctgaaaatcttcgcctgaagcagcaaagtgaattgcagagtcaggtcaagtacaaaagagattttgaagaaagcaaagggaggggcttcagcatcgtcacggacactcctgagctacagagactgaagaggactcaggagcaaatcagtaatgtaaaataccatgaagattttgaaaaaacaaaggggagaggctttactcccgtcgtggacgatcctgtgacagagagagtgaggaagaacacccaggtggtcagcgatgctgcctataaaggggtccaccctcacatcgtggagatggacaggagacctggaatcattgttgcacctgttcttcccggagcctatcagcaaagccattcccaaggctatggctacatgcaccagaccagtgtgtcatccatgagatcaatgcagcattcaccaaatctaaggacctaccgagccatgtacgattacagtgcccaggatgaagacgaggtctcctttagagacggcgactacatcgtcaacgtgcagcctattgacgatggctggatgtacggcacagtgcagagaacagggagaacaggaatgctcccagcgaattacattgagtttgttaattaattatttctccctgccctttgagctttattctaatgtatcccaaacctaatctttttaaaagatagaagatacttttaagacaacttggccattattttacaatgatgtatccttcctttgacaattagacacacaggtaccaggaagaaggaatgacctctgggctgaaaacagcagcattttcagtaattcctacaaacaaaaatctttgtgtctggacacctggtgctgctaattgtgttcatggtttcctttgattggctattgaacccttctgggaaatgtatttttgtagactttaatagagaagttgattgtcccttaaatgtagtgtgtgtttgaaacttcttagctgtcactttggaatcaccccaagccaattctcttaactctgtaatgcagccaataatttcaaacccgttttgcttttgagtcatgaggcaatttccaatattagtgaaaattgcccaatataataagtgtaaacagtggcagaaggacagtctggttaaaattatattgactggtggccttagggatctagaaacttctactaaacagagaaatttccttgttccctaggctgactggtatctatttatttctcatttgtaccaaggcatctcctactctccatttatattctatggacccaagtctatgctcagttccacagaatgtcaggaccaaataacttcacagctactctgcaaagggcaaattataatgtcattgatataatttccctagtagcatttaccctgttgcatgtcatgtagattcaagcttctgtaacataggcagctgcactgcgcgttcctattattgaagcaaaaagggtgactgatacctaaaagccctttcttcctctagtcgccagctcatcagaaaaacatactttgaaaagatgcttgagattttcctgctgcatcgcactctagttttgaaggatttacatcttaggaaataacatgtatactctagtaaataagcgatttaggtgttccattgaacagctttgattaacttaatgccaccattgatttcaaagtgaagaaaatgtaacagaagccagtgaagcaatggaagctggagtgtgactggaaaaatactcagcaaacaaagttaccaattccatacagagatgatctggtatcttcttttggaaaatggtattcaaattctggaatggaaatctagccaccaaaacgggttaatcaaaagacgtccttttccatttttttttgcttttattttctaaatcatttttaagggaatgaaacaggaatgtcatcagagattttttagtacaggcccaagagcctgttctctaagaaagaaattgttgccatgttttgattttcgaataagtgactttgcaggctttatgctagcccttgctggtgggtcttgaaatttcatccagagtctgcagtccaggtcaccaagccagcggcacccgtcggcaaccctgtgtttttctgattgtgccgtttactgtgacctgcaacggggtggcattcacttagggtctgacttcacagctatgacaaaaccgaaaaagcaaaactgcaaaaaagtactaagatgtacgggtcttggggatatctgccttatatgttatattcaaggaaattaacaaaacatcctgtaaaacatcgtttaaggaaacgtttactagtccaaaggccaaagctaatttatttccactttagaaaagttagcacatgcttttgaaaatctgtgatttcattttattaggctaaaagggtaaataggctttattacactgaagctgcatctatatgtcactgacataaagttgaaaaaataaatgcaggcaaataactagagacttcttttaagggggtttggctggttttctctcactgaaatggccagtcgtgattaaagtgataaaaccccatatctgttttggtatattgtacacaaacctacaaaaataaactgaacttgcaatatttttgcaaaaaaatctgtcgttaaaactgaggataaaatacctgctcaattttattttactaagtatatatttacatttcacccaggcaggccattttcttttgtgattataagaaagagtagttgttgattaaattttcagactaaatataggacaggtacaattttggataaatagcacatttataagaaccgcaatgaaaactgacttgaaataatgcttgtaatcaggaaagtaatttcatccaccgatttcaaaaccagattcactgagcataaaagtcaatacatatttgaggaataagtctcctaaaattttaagcttcacgtaataatgtttgcatagcaaaatatttctgcttcaagcctttaggaattaagatctgatcagaatttaactaaagggtagttgttttacaatgaagactaaaactgaacaagatgttgcatgctcttgaggccataatttggtagtgttggcagttgttaataaagcttgtcaggatgttaagcatctcaggagaaatattggaaaattatatgtataaaaccaaagtgctatttttaaaagcatcatttaaaaaaaaatgacatgcctgaacaacttttccactttccacgtgcttccctcccacctttggtttggcaacaggtatctcgtgcatgaagctgacagctaaagaagattttaaaaattgagttaaagatgactgtgtaaatgtccaagcacagagagcatgcacctgactttctaaagtttgatgtgttctcaagcctgacagaagcacaaggaacagtttgatacacttttaaaaggttctgaaaacaaagctgtatagggatcctctctctcttgagcaaagtatagcaacagaatatattgcttttgttgtaagcttttgtagtacatgtttttactaataattcttgttctctagaaagctttctatttctaacctatggcaaaatgaatccttcatgtcttcttgttattgtttacacacttgcagtgtagcccagtttgaaatatttatttggttatcaactgcccatggaggaggctcttgatgatcccaggtctcctcgacctccatacaccacacaggcatttgtaagcacagtttccacaagcaccttgtaggaatatggataagattagaccagcccctctctgtccactgggtttatttcttgaagaagatgcagatctggtttttccaatgtgccacagtctttccttatcctctccatgctgagcttgacaacactctgggaatgaggaacaagactttttctaaaaagatagtggaagttcaagggatgtacctcgttttcaggttcatccatctccagtggaatgttttcaataaaagatgaagaaaatgtgtgtgatctttaataacacatccctatagaaagtggataaaagatataccaaaactgtaatacagatatatacaaatataggtgcctttttgattactcttgtttgtctagtatgctcttggaaagaaaaccaagcaagcaagttgctgcctattctatagtaatattttattacacatgattgatatttttgtggtagggaagtgggatgctcctcagatattaaaggtgttagctgattgtattttatctctaaagatttagaactttagaaaatgccgacttcttccatctatttctgaaaggttctttgtggatttatatagagttgagctatataaacattaactttagatttgggatttaaaatgcctattgtaagatagaataattgtgaggctggattcactacacaagatgaacttcacttcataaattaattataccttagcgatttgcttctgataatctaaaagtggctagattgtggttgttttggttaaggtgatatggaggtgggagagcttttagttaagtaagaagctatgtaaactgacaaggatgctaaaataaaagtctctgaagtattccatgccttttggaccctttcctcgcaactaactgtcaactgttgatcaaaaaagtcaaggcattgtatgttgcttctgtggttattattctgtgatgcttagactacttgaacccataaacttggaagaatctttgagcaaattttctcagttgtctgtatgacttcagtatattcctgggaatgccataggattttttgtgcttgatacatggtatccagtttgcatagtatcacttctttgtaatccagttgctgttaagaatgatgtactttaaaggaaaagagaaaactgcatcacagtcccattctccagtgtccatgcaatgaattgctgagcatttaggaagcagcaccaagtctattacaggcatggtgtgaaacttgatgtttgacctgtgatcaaaattgaaccattgtacagtttggcttctgtttgcttcaaaatatgtagaattgtggttgatgattaatttgcgagactaactttgagagtgtaacagttttgaagaaaacattgaatgttttgcaaatgaaggggcttcacggaatgttacaatgttactaatataatttggcttttgttatgcaaattgttaacaccagctattaaaatatattttagtagaaatgctttaattcatatttttttcctctacactgtgaatctttaagccttggtggactagagcaacatcgtgctgcccaaaggactaacctatgcaaactagttcacattttagtggatgtcgcagttaatgtgtaataagacattatttcccctgcataatgtacaacagcattgaaatgacacattaagcctagcatcacattgtatagtacagtcactcacaaacccttcaaggctaccctaatcattaacattaatatttgtttaaaagcaaatcaccgatttatctattgaaactacttaaatgacggcaaaccaggaatgacagatggctgtgtcagcaatggctttaatgtgttccctgcaagtggtctcctatgatagaactgcgttctcaaatgcactctcttcagggtcttaatattctgtgttttctctctgtatttgtaaaacattataacacattaatttcctatctctacacatttggtttgcttaaataaatgcaggatataaaaaaaatggttcacttcttggctctcaccgtggtttcttggagcatgggttgttagatgcaagcaatgcaccctaataataccccgggtctgagatttaacatgacaactcacatcaaatcgcatcagaggtgtgtgctgccttcagtgcatttacattggtgaatcagtcaagatattttcctcccccaaataaacttagttgtaagtgataacaatattatgcttctccaagctcagtatctttctgattttatatcaaagtaccgcaacaatgcatcattgtagttaatttatttcaagaataaattcctcatatgtcctcaatagtacaattctaattttcttctattcataagatgaaagaaatggtttggagcatagaatagaaagtgcacaaattgagtacataaaatgggaagcaactgatttctcagctaagaaaggctcatttatcacagaacacaattgcttttctccccccactacgcttcccataattgaaaaagtgagtccctatttttcacactcatataaatctatgcgatttggatgctagtcttattgtattattttgtaaaactttctctttggctcataatccttcctaattgtaaattgataaactttgcggatgacatctgctcgtagaataaacacttcttccaaa

SEQ ID NO: 6581 - protein, 270 aa, Homo sapiens; identical to SEQ ID NO: 901

SEQ ID NO: 6582 - DNA, 5713 bp, Homo sapiens
aaaagtcgtgtatcccaccgagaaagtcaactgcctggataagtattggcataaaggatgtttccattgtgaggtctgcaagatggcactcaacatgaacaactacaaaggctatgaaaagaagccctattgtaatgcgtaaaataccatgaagattttgaaaaaacaaaggggagaggctttactcccgtcgtggacgatcctgtgacagagagagtgaggaagaacacccaggtggtcagcgatgctgcctataaaggggtccaccctcacatcgtggagatggacaggagacctggaatcattgttgcacctgttcttcccggagcctatcagcaaagccattcccaaggctatggctacatgcaccagaccagtgtgtcatccatgagatcaatgcagcattcaccaaatctaaggacctaccgagccatgtacgattacagtgcccaggatgaagacgaggtctcctttagagacggcgactacatcgtcaacgtgcagcctattgacgatggctggatgtacggcacagtgcagagaacagggagaacaggaatgctcccagcgaattacattgagtttgttaattaattatttctccctgccctttgagctttattctaatgtatcccaaacctaatctttttaaaagatagaagatacttttaagacaacttggccattattttacaatgatgtatccttcctttgacaattagacacacaggtaccaggaagaaggaatgacctctgggctgaaaacagcagcattttcagtaattcctacaaacaaaaatctttgtgtctggacacctggtgctgctaattgtgttcatggtttcctttgattggctattgaacccttctgggaaatgtatttttgtagactttaatagagaagttgattgtcccttaaatgtagtgtgtgtttgaaacttcttagctgtcactttggaatcaccccaagccaattctcttaactctgtaatgcagccaataatttcaaacccgttttgcttttgagtcatgaggcaatttccaatattagtgaaaattgcccaatataataagtgtaaacagtggcagaaggacagtctggttaaaattatattgactggtggccttagggatctagaaacttctactaaacagagaaatttccttgttccctaggctgactggtatctatttatttctcatttgtaccaaggcatctcctactctccatttatattctatggacccaagtctatgctcagttccacagaatgtcaggaccaaataacttcacagctactctgcaaagggcaaattataatgtcattgatataatttccctagtagcatttaccctgttgcatgtcatgtagattcaagcttctgtaacataggcagctgcactgcgcgttcctattattgaagcaaaaagggtgactgatacctaaaagccctttcttcctctagtcgccagctcatcagaaaaacatactttgaaaagatgcttgagattttcctgctgcatcgcactctagttttgaaggatttacatcttaggaaataacatgtatactctagtaaataagcgatttaggtgttccattgaacagctttgattaacttaatgccaccattgatttcaaagtgaagaaaatgtaacagaagccagtgaagcaatggaagctggagtgtgactggaaaaatactcagcaaacaaagttaccaattccatacagagatgatctggtatcttcttttggaaaatggtattcaaattctggaatggaaatctagccaccaaaacgggttaatcaaaagacgtccttttccatttttttttgcttttattttctaaatcatttttaagggaatgaaacaggaatgtcatcagagattttttagtacaggcccaagagcctgttctctaagaaagaaattgttgccatgttttgattttcgaataagtgactttgcaggctttatgctagcccttgctggtgggtcttgaaatttcatccagagtctgcagtccaggtcaccaagccagcggcacccgtcggcaaccctgtgtttttctgattgtgccgtttactgtgacctgcaacggggtggcattcacttagggtctgacttcacagctatgacaaaaccgaaaaagcaaaactgcaaaaaagtactaagatgtacgggtcttggggatatctgccttatatgttatattcaaggaaattaacaaaacatcctgtaaaacatcgtttaaggaaacgtttactagtccaaaggccaaagctaatttatttccactttagaaaagttagcacatgcttttgaaaatctgtgatttcattttattaggctaaaagggtaaataggctttattacactgaagctgcatctatatgtcactgacataaagttgaaaaaataaatgcaggcaaataactagagacttcttttaagggggtttggctggttttctctcactgaaatggccagtcgtgattaaagtgataaaaccccatatctgttttggtatattgtacacaaacctacaaaaataaactgaacttgcaatatttttgcaaaaaaatctgtcgttaaaactgaggataaaatacctgctcaattttattttactaagtatatatttacatttcacccaggcaggccattttcttttgtgattataagaaagagtagttgttgattaaattttcagactaaatataggacaggtacaattttggataaatagcacatttataagaaccgcaatgaaaactgacttgaaataatgcttgtaatcaggaaagtaatttcatccaccgatttcaaaaccagattcactgagcataaaagtcaatacatatttgaggaataagtctcctaaaattttaagcttcacgtaataatgtttgcatagcaaaatatttctgcttcaagcctttaggaattaagatctgatcagaatttaactaaagggtagttgttttacaatgaagactaaaactgaacaagatgttgcatgctcttgaggccataatttggtagtgttggcagttgttaataaagcttgtcaggatgttaagcatctcaggagaaatattggaaaattatatgtataaaaccaaagtgctatttttaaaagcatcatttaaaaaaaaatgacatgcctgaacaacttttccactttccacgtgcttccctcccacctttggtttggcaacaggtatctcgtgcatgaagctgacagctaaagaagattttaaaaattgagttaaagatgactgtgtaaatgtccaagcacagagagcatgcacctgactttctaaagtttgatgtgttctcaagcctgacagaagcacaaggaacagtttgatacacttttaaaaggttctgaaaacaaagctgtatagggatcctctctctcttgagcaaagtatagcaacagaatatattgcttttgttgtaagcttttgtagtacatgtttttactaataattcttgttctctagaaagctttctatttctaacctatggcaaaatgaatccttcatgtcttcttgttattgtttacacacttgcagtgtagcccagtttgaaatatttatttggttatcaactgcccatggaggaggctcttgatgatcccaggtctcctcgacctccatacaccacacaggcatttgtaagcacagtttccacaagcaccttgtaggaatatggataagattagaccagcccctctctgtccactgggtttatttcttgaagaagatgcagatctggtttttccaatgtgccacagtctttccttatcctctccatgctgagcttgacaacactctgggaatgaggaacaagactttttctaaaaagatagtggaagttcaagggatgtacctcgttttcaggttcatccatctccagtggaatgttttcaataaaagatgaagaaaatgtgtgtgatctttaataacacatccctatagaaagtggataaaagatataccaaaactgtaatacagatatatacaaatataggtgcctttttgattactcttgtttgtctagtatgctcttggaaagaaaaccaagcaagcaagttgctgcctattctatagtaatattttattacacatgattgatatttttgtggtagggaagtgggatgctcctcagatattaaaggtgttagctgattgtattttatctctaaagatttagaactttagaaaatgccgacttcttccatctatttctgaaaggttctttgtggatttatatagagttgagctatataaacattaactttagatttgggatttaaaatgcctattgtaagatagaataattgtgaggctggattcactacacaagatgaacttcacttcataaattaattataccttagcgatttgcttctgataatctaaaagtggctagattgtggttgttttggttaaggtgatatggaggtgggagagcttttagttaagtaagaagctatgtaaactgacaaggatgctaaaataaaagtctctgaagtattccatgccttttggaccctttcctcgcaactaactgtcaactgttgatcaaaaaagtcaaggcattgtatgttgcttctgtggttattattctgtgatgcttagactacttgaacccataaacttggaagaatctttgagcaaattttctcagttgtctgtatgacttcagtatattcctgggaatgccataggattttttgtgcttgatacatggtatccagtttgcatagtatcacttctttgtaatccagttgctgttaagaatgatgtactttaaaggaaaagagaaaactgcatcacagtcccattctccagtgtccatgcaatgaattgctgagcatttaggaagcagcaccaagtctattacaggcatggtgtgaaacttgatgtttgacctgtgatcaaaattgaaccattgtacagtttggcttctgtttgcttcaaaatatgtagaattgtggttgatgattaatttgcgagactaactttgagagtgtaacagttttgaagaaaacattgaatgttttgcaaatgaaggggcttcacggaatgttacaatgttactaatataatttggcttttgttatgcaaattgttaacaccagctattaaaatatattttagtagaaatgctttaattcatatttttttcctctacactgtgaatctttaagccttggtggactagagcaacatcgtgctgcccaaaggactaacctatgcaaactagttcacattttagtggatgtcgcagttaatgtgtaataagacattatttcccctgcataatgtacaacagcattgaaatgacacattaagcctagcatcacattgtatagtacagtcactcacaaacccttcaaggctaccctaatcattaacattaatatttgtttaaaagcaaatcaccgatttatctattgaaactacttaaatgacggcaaaccaggaatgacagatggctgtgtcagcaatggctttaatgtgttccctgcaagtggtctcctatgatagaactgcgttctcaaatgcactctcttcagggtcttaatattctgtgttttctctctgtatttgtaaaacattataacacattaatttcctatctctacacatttggtttgcttaaataaatgcaggatataaaaaaaatggttcac

SEQ ID NO: 6583 - protein, 103 aa, Homo sapiens; identical to SEQ ID NO: 6579

SEQ ID NO: 6584 - DNA, 6286 bp, Homo sapiens
cctgcgcggcggcggcggcgaggcgggggagcgagtgagcgcgaggggcgggcgcgagtgactgtgtgagtcacccgtacctggagtgcgagcgacgcagagccagcggcgcggagccggagccggagccgagacccagcgcctgcgagcccgagagcgcggccggccccaggcgccaggccccgtcgccctccccgtgcactcacccgtggcccggcgccgactccctacccggcgcccgccgcccgcagccctcccgcctgccaggaggcggtgcggggctcgccgggggatgtcacagcggctcctgggagccagcagccgccgccgccgccgcccccgggaaccgcgatcatgaacccccagtgcgcccgttgcggaaaagtcgtgtatcccaccgagaaagtcaactgcctggataagtattggcataaaggatgtttccattgtgaggtctgcaagatggcactcaacatgaacaactacaaaggctatgaaaagaagccctattgtaatgcacactacccgaagcagtccttcaccacggtggcagatacacctgaaaatcttcgcctgaagcagcaaagtgaattgcagagtcaggtcaagtacaaaagagattttgaagaaagcaaagggaggggcttcagcatcgtcacggacactcctgagctacagagactgaagaggactcaggagcaaatcagtaatgtaaaataccatgaagattttgaaaaaacaaaggggagaggctttactcccgtcgtggacgatcctgtgacagagagagtgaggaagaacacccaggtggtcagcgatgctgcctataaaggggtccaccctcacatcgtggagatggacaggagacctggaatcattgttgcacctgttcttcccggagcctatcagcaaagccattcccaaggctatggctacatgcaccagaccagtgtgtcatccatgagatcaatgcagcattcaccaaatctaaggacctaccgagccatgtacgattacagtgcccaggatgaagacgaggtctcctttagagacggcgactacatcgtcaacgtgcagcctattgacgatggctggatgtacggcacagtgcagagaacagggagaacaggaatgctcccagcgaattacattgagtttgttaattaattatttctccctgccctttgagctttattctaatgtatcccaaacctaatctttttaaaagatagaagatacttttaagacaacttggccattattttacaatgatgtatccttcctttgacaattagacacacaggtaccaggaagaaggaatgacctctgggctgaaaacagcagcattttcagtaattcctacaaacaaaaatctttgtgtctggacacctggtgctgctaattgtgttcatggtttcctttgattggctattgaacccttctgggaaatgtatttttgtagactttaatagagaagttgattgtcccttaaatgtagtgtgtgtttgaaacttcttagctgtcactttggaatcaccccaagccaattctcttaactctgtaatgcagccaataatttcaaacccgttttgcttttgagtcatgaggcaatttccaatattagtgaaaattgcccaatataataagtgtaaacagtggcagaaggacagtctggttaaaattatattgactggtggccttagggatctagaaacttctactaaacagagaaatttccttgttccctaggctgactggtatctatttatttctcatttgtaccaaggcatctcctactctccatttatattctatggacccaagtctatgctcagttccacagaatgtcaggaccaaataacttcacagctactctgcaaagggcaaattataatgtcattgatataatttccctagtagcatttaccctgttgcatgtcatgtagattcaagcttctgtaacataggcagctgcactgcgcgttcctattattgaagcaaaaagggtgactgatacctaaaagccctttcttcctctagtcgccagctcatcagaaaaacatactttgaaaagatgcttgagattttcctgctgcatcgcactctagttttgaaggatttacatcttaggaaataacatgtatactctagtaaataagcgatttaggtgttccattgaacagctttgattaacttaatgccaccattgatttcaaagtgaagaaaatgtaacagaagccagtgaagcaatggaagctggagtgtgactggaaaaatactcagcaaacaaagttaccaattccatacagagatgatctggtatcttcttttggaaaatggtattcaaattctggaatggaaatctagccaccaaaacgggttaatcaaaagacgtccttttccatttttttttgcttttattttctaaatcatttttaagggaatgaaacaggaatgtcatcagagattttttagtacaggcccaagagcctgttctctaagaaagaaattgttgccatgttttgattttcgaataagtgactttgcaggctttatgctagcccttgctggtgggtcttgaaatttcatccagagtctgcagtccaggtcaccaagccagcggcacccgtcggcaaccctgtgtttttctgattgtgccgtttactgtgacctgcaacggggtggcattcacttagggtctgacttcacagctatgacaaaaccgaaaaagcaaaactgcaaaaaagtactaagatgtacgggtcttggggatatctgccttatatgttatattcaaggaaattaacaaaacatcctgtaaaacatcgtttaaggaaacgtttactagtccaaaggccaaagctaatttatttccactttagaaaagttagcacatgcttttgaaaatctgtgatttcattttattaggctaaaagggtaaataggctttattacactgaagctgcatctatatgtcactgacataaagttgaaaaaataaatgcaggcaaataactagagacttcttttaagggggtttggctggttttctctcactgaaatggccagtcgtgattaaagtgataaaaccccatatctgttttggtatattgtacacaaacctacaaaaataaactgaacttgcaatatttttgcaaaaaaatctgtcgttaaaactgaggataaaatacctgctcaattttattttactaagtatatatttacatttcacccaggcaggccattttcttttgtgattataagaaagagtagttgttgattaaattttcagactaaatataggacaggtacaattttggataaatagcacatttataagaaccgcaatgaaaactgacttgaaataatgcttgtaatcaggaaagtaatttcatccaccgatttcaaaaccagattcactgagcataaaagtcaatacatatttgaggaataagtctcctaaaattttaagcttcacgtaataatgtttgcatagcaaaatatttctgcttcaagcctttaggaattaagatctgatcagaatttaactaaagggtagttgttttacaatgaagactaaaactgaacaagatgttgcatgctcttgaggccataatttggtagtgttggcagttgttaataaagcttgtcaggatgttaagcatctcaggagaaatattggaaaattatatgtataaaaccaaagtgctatttttaaaagcatcatttaaaaaaaaatgacatgcctgaacaacttttccactttccacgtgcttccctcccacctttggtttggcaacaggtatctcgtgcatgaagctgacagctaaagaagattttaaaaattgagttaaagatgactgtgtaaatgtccaagcacagagagcatgcacctgactttctaaagtttgatgtgttctcaagcctgacagaagcacaaggaacagtttgatacacttttaaaaggttctgaaaacaaagctgtatagggatcctctctctcttgagcaaagtatagcaacagaatatattgcttttgttgtaagcttttgtagtacatgtttttactaataattcttgttctctagaaagctttctatttctaacctatggcaaaatgaatccttcatgtcttcttgttattgtttacacacttgcagtgtagcccagtttgaaatatttatttggttatcaactgcccatggaggaggctcttgatgatcccaggtctcctcgacctccatacaccacacaggcatttgtaagcacagtttccacaagcaccttgtaggaatatggataagattagaccagcccctctctgtccactgggtttatttcttgaagaagatgcagatctggtttttccaatgtgccacagtctttccttatcctctccatgctgagcttgacaacactctgggaatgaggaacaagactttttctaaaaagatagtggaagttcaagggatgtacctcgttttcaggttcatccatctccagtggaatgttttcaataaaagatgaagaaaatgtgtgtgatctttaataacacatccctatagaaagtggataaaagatataccaaaactgtaatacagatatatacaaatataggtgcctttttgattactcttgtttgtctagtatgctcttggaaagaaaaccaagcaagcaagttgctgcctattctatagtaatattttattacacatgattgatatttttgtggtagggaagtgggatgctcctcagatattaaaggtgttagctgattgtattttatctctaaagatttagaactttagaaaatgccgacttcttccatctatttctgaaaggttctttgtggatttatatagagttgagctatataaacattaactttagatttgggatttaaaatgcctattgtaagatagaataattgtgaggctggattcactacacaagatgaacttcacttcataaattaattataccttagcgatttgcttctgataatctaaaagtggctagattgtggttgttttggttaaggtgatatggaggtgggagagcttttagttaagtaagaagctatgtaaactgacaaggatgctaaaataaaagtctctgaagtattccatgccttttggaccctttcctcgcaactaactgtcaactgttgatcaaaaaagtcaaggcattgtatgttgcttctgtggttattattctgtgatgcttagactacttgaacccataaacttggaagaatctttgagcaaattttctcagttgtctgtatgacttcagtatattcctgggaatgccataggattttttgtgcttgatacatggtatccagtttgcatagtatcacttctttgtaatccagttgctgttaagaatgatgtactttaaaggaaaagagaaaactgcatcacagtcccattctccagtgtccatgcaatgaattgctgagcatttaggaagcagcaccaagtctattacaggcatggtgtgaaacttgatgtttgacctgtgatcaaaattgaaccattgtacagtttggcttctgtttgcttcaaaatatgtagaattgtggttgatgattaatttgcgagactaactttgagagtgtaacagttttgaagaaaacattgaatgttttgcaaatgaaggggcttcacggaatgttacaatgttactaatataatttggcttttgttatgcaaattgttaacaccagctattaaaatatattttagtagaaatgctttaattcatatttttttcctctacactgtgaatctttaagccttggtggactagagcaacatcgtgctgcccaaaggactaacctatgcaaactagttcacattttagtggatgtcgcagttaatgtgtaataagacattatttcccctgcataatgtacaacagcattgaaatgacacattaagcctagcatcacattgtatagtacagtcactcacaaacccttcaaggctaccctaatcattaacattaatatttgtttaaaagcaaatcaccgatttatctattgaaactacttaaatgacggcaaaccaggaatgacagatggctgtgtcagcaatggctttaatgtgttccctgcaagtggtctcctatgatagaactgcgttctcaaatgcactctcttcagggtcttaatattctgtgttttctctctgtatttgtaaaacattataacacattaatttcctatctctacacatttggtttgcttaaataaatgcaggatataaaaaaaatggttcac

SEQ ID NO: 6585 - protein, 270 aa, Homo sapiens; identical to SEQ ID NO: 901

SEQ ID NO: 6586 - DNA, 5180 bp, Homo sapiens
aaaagtcgtgtatcccaccgagaaagtcaactgcctggataagtattggcataaaggatgtttccattgtgaggtctgcaagatggcactcaacatgaacaactacaaaggctatgaaaagaagccctattgtaatgcgtaaaataccatgaagattttgaaaaaacaaaggggagaggctttactcccgtcgtggacgatcctgtgacagagagagtgaggaagaacacccaggtggtcagcgatgctgcctataaaggggtccaccctcacatcgtggagatggacaggagacctggaatcattgttgcacctgttcttcccggagcctatcagcaaagccattcccaaggctatggctacatgcaccagaccagtgtgtcatccatgagatcaatgcagcattcaccaaatctaaggacctaccgagccatgtacgattacagtgcccaggatgaagacgaggtctcctttagagacggcgactacatcgtcaacgtgcagcctattgacgatggctggatgtacggcacagtgcagagaacagggagaacaggaatgctcccagcgaattacattgagtttgttaattaattatttctccctgccctttgagctttattctaatgtatcccaaacctaatctttttaaaagatagaagatacttttaagacaacttggccattattttacaatgatgtatccttcctttgacaattagacacacaggtaccaggaagaaggaatgacctctgggctgaaaacagcagcattttcagtaattcctacaaacaaaaatctttgtgtctggacacctggtgctgctaattgtgttcatggtttcctttgattggctattgaacccttctgggaaatgtatttttgtagactttaatagagaagttgattgtcccttaaatgtagtgtgtgtttgaaacttcttagctgtcactttggaatcaccccaagccaattctcttaactctgtaatgcagccaataatttcaaacccgttttgcttttgagtcatgaggcaatttccaatattagtgaaaattgcccaatataataagtgtaaacagtggcagaaggacagtctggttaaaattatattgactggtggccttagggatctagaaacttctactaaacagagaaatttccttgttccctaggctgactggtatctatttatttctcatttgtaccaaggcatctcctactctccatttatattctatggacccaagtctatgctcagttccacagaatgtcaggaccaaataacttcacagctactctgcaaagggcaaattataatgtcattgatataatttccctagtagcatttaccctgttgcatgtcatgtagattcaagcttctgtaacataggcagctgcactgcgcgttcctattattgaagcaaaaagggtgactgatacctaaaagccctttcttcctctagtcgccagctcatcagaaaaacatactttgaaaagatgcttgagattttcctgctgcatcgcactctagttttgaaggatttacatcttaggaaataacatgtatactctagtaaataagcgatttaggtgttccattgaacagctttgattaacttaatgccaccattgatttcaaagtgaagaaaatgtaacagaagccagtgaagcaatggaagctggagtgtgactggaaaaatactcagcaaacaaagttaccaattccatacagagatgatctggtatcttcttttggaaaatggtattcaaattctggaatggaaatctagccaccaaaacgggttaatcaaaagacgtccttttccatttttttttgcttttattttctaaatcatttttaagggaatgaaacaggaatgtcatcagagattttttagtacaggcccaagagcctgttctctaagaaagaaattgttgccatgttttgattttcgaataagtgactttgcaggctttatgctagcccttgctggtgggtcttgaaatttcatccagagtctgcagtccaggtcaccaagccagcggcacccgtcggcaaccctgtgtttttctgattgtgccgtttactgtgacctgcaacggggtggcattcacttagggtctgacttcacagctatgacaaaaccgaaaaagcaaaactgcaaaaaagtactaagatgtacgggtcttggggatatctgccttatatgttatattcaaggaaattaacaaaacatcctgtaaaacatcgtttaaggaaacgtttactagtccaaaggccaaagctaatttatttccactttagaaaagttagcacatgcttttgaaaatctgtgatttcattttattaggctaaaagggtaaataggctttattacactgaagctgcatctatatgtcactgacataaagttgaaaaaataaatgcaggcaaataactagagacttcttttaagggggtttggctggttttctctcactgaaatggccagtcgtgattaaagtgataaaaccccatatctgttttggtatattgtacacaaacctacaaaaataaactgaacttgcaatatttttgcaaaaaaatctgtcgttaaaactgaggataaaatacctgctcaattttattttactaagtatatatttacatttcacccaggcaggccattttcttttgtgattataagaaagagtagttgttgattaaattttcagactaaatataggacaggtacaattttggataaatagcacatttataagaaccgcaatgaaaactgacttgaaataatgcttgtaatcaggaaagtaatttcatccaccgatttcaaaaccagattcactgagcataaaagtcaatacatatttgaggaataagtctcctaaaattttaagcttcacgtaataatgtttgcatagcaaaatatttctgcttcaagcctttaggaattaagatctgatcagaatttaactaaagggtagttgttttacaatgaagactaaaactgaacaagatgttgcatgctcttgaggccataatttggtagtgttggcagttgttaataaagcttgtcaggatgttaagcatctcaggagaaatattggaaaattatatgtataaaaccaaagtgctatttttaaaagcatcatttaaaaaaaaatgacatgcctgaacaacttttccactttccacgtgcttccctcccacctttggtttggcaacaggtatctcgtgcatgaagctgacagctaaagaagattttaaaaattgagttaaagatgactgtgtaaatgtccaagcacagagagcatgcacctgactttctaaagtttgatgtgttctcaagcctgacagaagcacaaggaacagtttgatacacttttaaaaggttctgaaaacaaagctgtatagggatcctctctctcttgagcaaagtatagcaacagaatatattgcttttgttgtaagcttttgtagtacatgtttttactaataattcttgttctctagaaagctttctatttctaacctatggcaaaatgaatccttcatgtcttcttgttattgtttacacacttgcagtgtagcccagtttgaaatatttatttggttatcaactgcccatggaggaggctcttgatgatcccaggtctcctcgacctccatacaccacacaggcatttgtaagcacagtttccacaagcaccttgtaggaatatggataagattagaccagcccctctctgtccactgggtttatttcttgaagaagatgcagatctggtttttccaatgtgccacagtctttccttatcctctccatgctgagcttgacaacactctgggaatgaggaacaagactttttctaaaaagatagtggaagttcaagggatgtacctcgttttcaggttcatccatctccagtggaatgttttcaataaaagatgaagaaaatgtgtgtgatctttaataacacatccctatagaaagtggataaaagatataccaaaactgtaatacagatatatacaaatataggtgcctttttgattactcttgtttgtctagtatgctcttggaaagaaaaccaagcaagcaagttgctgcctattctatagtaatattttattacacatgattgatatttttgtggtagggaagtgggatgctcctcagatattaaaggtgttagctgattgtattttatctctaaagatttagaactttagaaaatgccgacttcttccatctatttctgaaaggttctttgtggatttatatagagttgagctatataaacattaactttagatttgggatttaaaatgcctattgtaagatagaataattgtgaggctggattcactacacaagatgaacttcacttcataaattaattataccttagcgatttgcttctgataatctaaaagtggctagattgtggttgttttggttaaggtgatatggaggtgggagagcttttagttaagtaagaagctatgtaaactgacaaggatgctaaaataaaagtctctgaagtattccatgccttttggaccctttcctcgcaactaactgtcaactgttgatcaaaaaagtcaaggcattgtatgttgcttctgtggttattattctgtgatgcttagactacttgaacccataaacttggaagaatctttgagcaaattttctcagttgtctgtatgacttcagtatattcctgggaatgccataggattttttgtgcttgatacatggtatccagtttgcatagtatcacttctttgtaatccagttgctgttaagaatgatgtactttaaaggaaaagagaaaactgcatcacagtcccattctccagtgtccatgcaatgaattgctgagcatttaggaagcagcaccaagtctattacaggcatggtgtgaaacttgatgtttgacctgtgatcaaaattgaaccattgtacagtttggcttctgtttgcttcaaaatatgtagaattgtggttgatgattaatttgcgagactaactttgagagtgtaacagttttgaagaaaacattgaatgttttgcaaatgaaggggcttcacggaatgttacaatgttactaatataatttggcttttgttatgcaaattgttaacaccagctattaaaatatattttagtag

SEQ ID NO: 6587 - protein, 103 aa, Homo sapiens; identical to SEQ ID NO: 6579

SEQ ID NO: 6588 - DNA, 5753 bp, Homo sapiens
cctgcgcggcggcggcggcgaggcgggggagcgagtgagcgcgaggggcgggcgcgagtgactgtgtgagtcacccgtacctggagtgcgagcgacgcagagccagcggcgcggagccggagccggagccgagacccagcgcctgcgagcccgagagcgcggccggccccaggcgccaggccccgtcgccctccccgtgcactcacccgtggcccggcgccgactccctacccggcgcccgccgcccgcagccctcccgcctgccaggaggcggtgcggggctcgccgggggatgtcacagcggctcctgggagccagcagccgccgccgccgccgcccccgggaaccgcgatcatgaacccccagtgcgcccgttgcggaaaagtcgtgtatcccaccgagaaagtcaactgcctggataagtattggcataaaggatgtttccattgtgaggtctgcaagatggcactcaacatgaacaactacaaaggctatgaaaagaagccctattgtaatgcacactacccgaagcagtccttcaccacggtggcagatacacctgaaaatcttcgcctgaagcagcaaagtgaattgcagagtcaggtcaagtacaaaagagattttgaagaaagcaaagggaggggcttcagcatcgtcacggacactcctgagctacagagactgaagaggactcaggagcaaatcagtaatgtaaaataccatgaagattttgaaaaaacaaaggggagaggctttactcccgtcgtggacgatcctgtgacagagagagtgaggaagaacacccaggtggtcagcgatgctgcctataaaggggtccaccctcacatcgtggagatggacaggagacctggaatcattgttgcacctgttcttcccggagcctatcagcaaagccattcccaaggctatggctacatgcaccagaccagtgtgtcatccatgagatcaatgcagcattcaccaaatctaaggacctaccgagccatgtacgattacagtgcccaggatgaagacgaggtctcctttagagacggcgactacatcgtcaacgtgcagcctattgacgatggctggatgtacggcacagtgcagagaacagggagaacaggaatgctcccagcgaattacattgagtttgttaattaattatttctccctgccctttgagctttattctaatgtatcccaaacctaatctttttaaaagatagaagatacttttaagacaacttggccattattttacaatgatgtatccttcctttgacaattagacacacaggtaccaggaagaaggaatgacctctgggctgaaaacagcagcattttcagtaattcctacaaacaaaaatctttgtgtctggacacctggtgctgctaattgtgttcatggtttcctttgattggctattgaacccttctgggaaatgtatttttgtagactttaatagagaagttgattgtcccttaaatgtagtgtgtgtttgaaacttcttagctgtcactttggaatcaccccaagccaattctcttaactctgtaatgcagccaataatttcaaacccgttttgcttttgagtcatgaggcaatttccaatattagtgaaaattgcccaatataataagtgtaaacagtggcagaaggacagtctggttaaaattatattgactggtggccttagggatctagaaacttctactaaacagagaaatttccttgttccctaggctgactggtatctatttatttctcatttgtaccaaggcatctcctactctccatttatattctatggacccaagtctatgctcagttccacagaatgtcaggaccaaataacttcacagctactctgcaaagggcaaattataatgtcattgatataatttccctagtagcatttaccctgttgcatgtcatgtagattcaagcttctgtaacataggcagctgcactgcgcgttcctattattgaagcaaaaagggtgactgatacctaaaagccctttcttcctctagtcgccagctcatcagaaaaacatactttgaaaagatgcttgagattttcctgctgcatcgcactctagttttgaaggatttacatcttaggaaataacatgtatactctagtaaataagcgatttaggtgttccattgaacagctttgattaacttaatgccaccattgatttcaaagtgaagaaaatgtaacagaagccagtgaagcaatggaagctggagtgtgactggaaaaatactcagcaaacaaagttaccaattccatacagagatgatctggtatcttcttttggaaaatggtattcaaattctggaatggaaatctagccaccaaaacgggttaatcaaaagacgtccttttccatttttttttgcttttattttctaaatcatttttaagggaatgaaacaggaatgtcatcagagattttttagtacaggcccaagagcctgttctctaagaaagaaattgttgccatgttttgattttcgaataagtgactttgcaggctttatgctagcccttgctggtgggtcttgaaatttcatccagagtctgcagtccaggtcaccaagccagcggcacccgtcggcaaccctgtgtttttctgattgtgccgtttactgtgacctgcaacggggtggcattcacttagggtctgacttcacagctatgacaaaaccgaaaaagcaaaactgcaaaaaagtactaagatgtacgggtcttggggatatctgccttatatgttatattcaaggaaattaacaaaacatcctgtaaaacatcgtttaaggaaacgtttactagtccaaaggccaaagctaatttatttccactttagaaaagttagcacatgcttttgaaaatctgtgatttcattttattaggctaaaagggtaaataggctttattacactgaagctgcatctatatgtcactgacataaagttgaaaaaataaatgcaggcaaataactagagacttcttttaagggggtttggctggttttctctcactgaaatggccagtcgtgattaaagtgataaaaccccatatctgttttggtatattgtacacaaacctacaaaaataaactgaacttgcaatatttttgcaaaaaaatctgtcgttaaaactgaggataaaatacctgctcaattttattttactaagtatatatttacatttcacccaggcaggccattttcttttgtgattataagaaagagtagttgttgattaaattttcagactaaatataggacaggtacaattttggataaatagcacatttataagaaccgcaatgaaaactgacttgaaataatgcttgtaatcaggaaagtaatttcatccaccgatttcaaaaccagattcactgagcataaaagtcaatacatatttgaggaataagtctcctaaaattttaagcttcacgtaataatgtttgcatagcaaaatatttctgcttcaagcctttaggaattaagatctgatcagaatttaactaaagggtagttgttttacaatgaagactaaaactgaacaagatgttgcatgctcttgaggccataatttggtagtgttggcagttgttaataaagcttgtcaggatgttaagcatctcaggagaaatattggaaaattatatgtataaaaccaaagtgctatttttaaaagcatcatttaaaaaaaaatgacatgcctgaacaacttttccactttccacgtgcttccctcccacctttggtttggcaacaggtatctcgtgcatgaagctgacagctaaagaagattttaaaaattgagttaaagatgactgtgtaaatgtccaagcacagagagcatgcacctgactttctaaagtttgatgtgttctcaagcctgacagaagcacaaggaacagtttgatacacttttaaaaggttctgaaaacaaagctgtatagggatcctctctctcttgagcaaagtatagcaacagaatatattgcttttgttgtaagcttttgtagtacatgtttttactaataattcttgttctctagaaagctttctatttctaacctatggcaaaatgaatccttcatgtcttcttgttattgtttacacacttgcagtgtagcccagtttgaaatatttatttggttatcaactgcccatggaggaggctcttgatgatcccaggtctcctcgacctccatacaccacacaggcatttgtaagcacagtttccacaagcaccttgtaggaatatggataagattagaccagcccctctctgtccactgggtttatttcttgaagaagatgcagatctggtttttccaatgtgccacagtctttccttatcctctccatgctgagcttgacaacactctgggaatgaggaacaagactttttctaaaaagatagtggaagttcaagggatgtacctcgttttcaggttcatccatctccagtggaatgttttcaataaaagatgaagaaaatgtgtgtgatctttaataacacatccctatagaaagtggataaaagatataccaaaactgtaatacagatatatacaaatataggtgcctttttgattactcttgtttgtctagtatgctcttggaaagaaaaccaagcaagcaagttgctgcctattctatagtaatattttattacacatgattgatatttttgtggtagggaagtgggatgctcctcagatattaaaggtgttagctgattgtattttatctctaaagatttagaactttagaaaatgccgacttcttccatctatttctgaaaggttctttgtggatttatatagagttgagctatataaacattaactttagatttgggatttaaaatgcctattgtaagatagaataattgtgaggctggattcactacacaagatgaacttcacttcataaattaattataccttagcgatttgcttctgataatctaaaagtggctagattgtggttgttttggttaaggtgatatggaggtgggagagcttttagttaagtaagaagctatgtaaactgacaaggatgctaaaataaaagtctctgaagtattccatgccttttggaccctttcctcgcaactaactgtcaactgttgatcaaaaaagtcaaggcattgtatgttgcttctgtggttattattctgtgatgcttagactacttgaacccataaacttggaagaatctttgagcaaattttctcagttgtctgtatgacttcagtatattcctgggaatgccataggattttttgtgcttgatacatggtatccagtttgcatagtatcacttctttgtaatccagttgctgttaagaatgatgtactttaaaggaaaagagaaaactgcatcacagtcccattctccagtgtccatgcaatgaattgctgagcatttaggaagcagcaccaagtctattacaggcatggtgtgaaacttgatgtttgacctgtgatcaaaattgaaccattgtacagtttggcttctgtttgcttcaaaatatgtagaattgtggttgatgattaatttgcgagactaactttgagagtgtaacagttttgaagaaaacattgaatgttttgcaaatgaaggggcttcacggaatgttacaatgttactaatataatttggcttttgttatgcaaattgttaacaccagctattaaaatatattttagtag

SEQ ID NO: 6589 - protein, 270 aa, Homo sapiens; identical to SEQ ID NO: 901

SEQ ID NO: 6590 - DNA, 397 bp, Homo sapiens
cagttagtctggtcgaataagaggataaatgctacatggaagtgcttgtcacttatgaaccccaacgcaagtctcatttcattgttccgcaagccatttatgaacgtgcctgtgggcagcagtaagaaaagaaaaattgaagcatgagagatgagcattgctgtcaagtccccacagctgccacagaaacgcatgtgctgctttccatcatcccttgcattcaaaatgctactgatgcatagcacctaatcaagtccccaggctgcagttccactcggaggaagctacgtcacctccatcgctactgtgttgtctgctatgttgttcagtgctggcttttctgattcatgattttccctgttgaaataaagttcaatcaattacttatctacaacat

SEQ ID NO: 6591 - protein, 30 aa, Homo sapiens
MNPNASLISLFRKPFMNVPVGSSKKRKIEA

SEQ ID NO: 6592 - DNA, 1529 bp, Homo sapiens
ttgtttttaacatctaggttgcttgagtactactataattttgatggtaatgtagttgactgtggaatttatttatagtcaacattagcctgatttctgataataaactataaagattcgtattcctctacttgctagcttgttcccaaagagtccaatttcttcctgttaataaaaataaactttttgttgggaagataatgttcatttgctgaatatttatgttgtagataagtaattgattgaactttatttcaacagggaaaatcatgaatcagaaaagccagcactgaacaacatagcagacaacacagtagcgatggaggtgacgtagcttcctccgagtggaactgcagcctggggacttgattaggtgctatgcatcagtagcattttgaatgcaagggatgatggaaagcagcacatgcgtttctgtggcagctgtggggacttgacagcaatgctcatctctcatgcttcaatttttcttttcttactgttaataggaaaaaaatcaacatctgtaaattaagaatacagcaaatgaagtgtcatcacatcatgtgcatggtgcggaacctgctgttttatctatttattgtgccgtgtttacagttttttgtacactgtaccttcattggttcctgtgctgtagtaaatgtgttaggtagctgtggactccttggtattttgtaaatggtataacataacttggttcccctctgggtccttgagttttctgtgtatcatgtgaaaaaaaatggtgacatacatacagaattttacaaaaaaaaaaaaaaaaaaaaaggcatcagtttttttaaaaatggggaatgtactattaaatggggatcttcctggtctactatcattaggacaagtaacaagctaaaaatgaagtctcttgaatctttccatccccaacttgcccacaaagctgtgggtggtttctggtacttaaagcactaatattatgttgctgctctgcgaacagcccagtagtcccatttccttccacaccaaaaagtgttaaatcaagtatgcaaatggagtccttacaactggagtttatgttgtcttgccctttttttagcacaaaaaaaattgtacttttttattgtcgaattgtttaaaagacttcattctttacttgttcttacgaaaaggatataagggagaagaatgcagtaattgctgtacgtgtatcatcattccagtttctaaaaacagccagccagcttttttccttttaagattctccagaaggctgcaaggccagaaccacaaatatcgggtgccttcctttggaaatatttgacctctcttctgtgaagagaatggtacttaacagactactactagtgctttgtcagtaccgaagtctgaatgcccagtccaatggcatacattatccttaaggtttttaatcccacctggaaaaattgtgatagaattctcacaaaataaacccagggcattacatgttgacaaactaatgtgtagtggtcttttgcttttgttttcaaccc

SEQ ID NO: 6593 - protein, 50 aa, Homo sapiens
MKCHHIMCMVRNLLFYLFIVPCLQFFVHCTFIGSCAVVNVLGSCGLLGIL

SEQ ID NO: 6594 - DNA, 1570 bp, Homo sapiens
gcttacacctcagtagtactacaccaacagcacttgtacatacaagtccatcaacggcaggttcagctttgttacagccttcaaatattacacagacttcaagttcccacagtgcactgagtcatcaagtaactgctgccaattctgcaacaactcaggttctgattgggaacaacattcgattaactgtaccttcatcagttgccactgtaaactctattgccccaataaatgcacgacatatacctaggactttaagtgctgttccatcatctgccttaaagctggccgctgcagcaaactgtcaagtttccaaggtcccatcttcatcctctgtagattcagttccaaggtgagtactctcatgcttcaatttttcttttcttactgttaataggaaaaaaatcaacatctgtaaattaagaatacagcaattatctgtacagtactgcatatttgtaatacccttgtatatatgttacttgaatacagaaatgttcatttgtgatgctttgcacttgggggtggggggtgggagggaaatcaattgcaacaaagagtgtgagatgtgagattgtatagagatgaagtgtcatcacatcatgtgcatggtgcggaacctgctgttttatctatttattgtgccgtgtttacagttttttgtacactgtaccttcattggttcctgtgctgtagtaaatgtgttaggtagctgtggactccttggtattttgtaaatggtataacataacttggttcccctctgggtccttgagttttctgtgtatcatgtgaaaaaaaatggtgacatacatacagaattttacaaaaaaaaaaaaaaaaaaaaaggcatcagtttttttaaaaatggggaatgtactattaaatggggatcttcctggtctactatcattaggacaagtaacaagctaaaaatgaagtctcttgaatctttccatccccaacttgcccacaaagctgtgggtggtttctggtacttaaagcactaatattatgttgctgctctgcgaacagcccagtagtcccatttccttccacaccaaaaagtgttaaatcaagtatgcaaatggagtccttacaactggagtttatgttgtcttgccctttttttagcacaaaaaaaattgtacttttttattgtcgaattgtttaaaagacttcattctttacttgttcttacgaaaaggatataagggagaagaatgcagtaattgctgtacgtgtatcatcattccagtttctaaaaacagccagccagcttttttccttttaagattctccagaaggctgcaaggccagaaccacaaatatcgggtgccttcctttggaaatatttgacctctcttctgtgaagagaatggtacttaacagactactactagtgctttgtcagtaccgaagtctgaatgcccagtccaatggcatacattatccttaaggtttttaatcccacctggaaaaattgtgatagaattctcacaaaataaacccagggcattacatgttgacaaactaatgtgtagtggtcttttgcttttgttttcaaccc

SEQ ID NO: 6595 - protein, 50 aa, Homo sapiens; identical to SEQ ID NO: 6593

SEQ ID NO: 6596 - DNA, 3790 bp, Homo sapiens
gtccgccatgttggccatggcgtattgaagagagcgagcgagagaggagcggagcggcacagcctcccaccctcccggctggtgttagtgcccggacggcgggctctgcgctccgcccctcaagtccccggcagcggttggcgagtggggaccgaacccccggttctccatgatcccgctggccggggccgtttccccagagcggagagggataatatggttataccggtcccagaggcagaaagtaatattgcttactatgagtctatatatcctggggaatttaagatgccaaagcagctcattcacatacagccttttagtttggatgctgaacagcctgattatgatttggattctgaagatgaagtatttgtgaataaactgaaaaagaaaatggacatctgcccattgcaatttgaggagatgattgaccgcctagaaaaaggcagtggtcagcagccagtcagtctgcaggaagccaaactactgctaaaagaagatgatgaactaattagagaagtttatgaatattggattaaaaagagaaaaaactgtcgagggccatctcttattccatcagtaaaacaagagaagcgagatggttccagcacaaatgatccttatgtggcttttagaaggcgtactgaaaaaatgcagactcgaaaaaatcgcaaaaatgatgaagcctcttacgaaaaaatgcttaagctgcgacgagatctaagtcgagctgttactattctagagatgataaaaagaagagaaaaaagtaaaagagagctattgcacttaacactggaaattatggaaaagaggtataatttgggcgactacaatggagagatcatgtctgaggttatggcacagagacagccaatgaaacctacttatgccatccccatcatccctattactaatagcagtcaatttaaacaccaggaagcaatggatgtgaaggagttcaaagttaataagcaagataaagccgatcttatccgaccgaaacggaaatatgaaaagaagcccaaagtcttaccatcgtctgccgctgctactccccaacagacgagtcctgctgcactgccagtcttcaatgctaaagatctgaatcagtatgactttcccagctcagacgaagaacctctctcccaggttttgtctggctcttcggaagctgaggaagacaatgatcctgatggtccttttgctttccgtaggaaagcaggctgtcagtactatgctcctcacttagaccaaactggcaactggccttggactagtcctaaagatggaggattaggggatgtgcgatatagatactgcttaactactctcaccgtaccccaaaggtgtattggatttgcacgaagacgggttgggcgcggtggaagggtcttactggacagagctcattcagactatgacagtgtgtttcaccatctggatttggaaatgctttcctcaccacaacattctccagtcaatcagtttgccaatacctcagaaacaaatacctcggacaaatctttctctaaagacctcagtcagatactagtcaatatcaaatcatgtagatggcggcattttaggcctcggacaccatccctacatgacagtgacaatgatgaactctcctgtagaaaattatataggagtataaaccgaacaggaacagcacaacctgggacccagacatgcagtacctctacgcaaagtaaaagtagcagtggttcagcacactttgcatttacagccgaacaataccagcaacatcaacagcaactggcactcatgcagaaacagcagcttgcacaaattcagcaacagcaagcaaatagtaattcctccaccaacacatcacagggttttgtttctaagactttggattctgctagtgcacagtttgctgcttctgctttggtgacatcagaacaactgatgggattcaagatgaaggatgatgtggtgcttggaatcggggtgaatggcgtccttccagcctcaggagtatacaagggcttacacctcagtagtactacaccaacagcacttgtacatacaagtccatcaacggcaggttcagctttgttacagccttcaaatattacacagacttcaagttcccacagtgcactgagtcatcaagtaactgctgccaattctgcaacaactcaggttctgattgggaacaacattcgattaactgtaccttcatcagttgccactgtaaactctattgccccaataaatgcacgacatatacctaggactttaagtgctgttccatcatctgccttaaagctggccgctgcagcaaactgtcaagtttccaaggtcccatcttcatcctctgtagattcagttccaagggaaaatcatgaatcagaaaagccagcactgaacaacatagcagacaacacagtagcgatggaggtgacgtagcttcctccgagtggaactgcagcctggggacttgattaggtgctatgcatcagtagcattttgaatgcaagggatgatggaaagcagcacatgcgtttctgtggcagctgtggggacttgacagcaatgctcatctctcatgcttcaatttttcttttcttactgttaataggaaaaaaatcaacatctgtaaattaagaatacagcaattatctgtacagtactgcatatttgtaatacccttgtatatatgttacttgaatacagaaatgttcatttgtgatgctttgcacttgggggtggggggtgggagggaaatcaattgcaacaaagagtgtgagatgtgagattgtatagagatgaagtgtcatcacatcatgtgcatggtgcggaacctgctgttttatctatttattgtgccgtgtttacagttttttgtacactgtaccttcattggttcctgtgctgtagtaaatgtgttaggtagctgtggactccttggtattttgtaaatggtataacataacttggttcccctctgggtccttgagttttctgtgtatcatgtgaaaaaaaatggtgacatacatacagaattttacaaaaaaaaaaaaaaaaaaaaaggcatcagtttttttaaaaatggggaatgtactattaaatggggatcttcctggtctactatcattaggacaagtaacaagctaaaaatgaagtctcttgaatctttccatccccaacttgcccacaaagctgtgggtggtttctggtacttaaagcactaatattatgttgctgctctgcgaacagcccagtagtcccatttccttccacaccaaaaagtgttaaatcaagtatgcaaatggagtccttacaactggagtttatgttgtcttgccctttttttagcacaaaaaaaattgtacttttttattgtcgaattgtttaaaagacttcattctttacttgttcttacgaaaaggatataagggagaagaatgcagtaattgctgtacgtgtatcatcattccagtttctaaaaacagccagccagcttttttccttttaagattctccagaaggctgcaaggccagaaccacaaatatcgggtgccttcctttggaaatatttgacctctcttctgtgaagagaatggtacttaacagactactactagtgctttgtcagtaccgaagtctgaatgcccagtccaatggcatacattatccttaaggtttttaatcccacctggaaaaattgtgatagaattctcacaaaataaacccagggcattacatgttgacaaactaatgtgtagtggtcttttgcttttgttttcaaccc

SEQ ID NO: 6597 - protein, 742 aa, Homo sapiens
MVIPVPEAESNIAYYESIYPGEFKMPKQLIHIQPFSLDAEQPDYDLDSEDEVFVNKLKKKMDICPLQFEEMIDRLEKGSGQQPVSLQEAKLLLKEDDELIREVYEYWIKKRKNCRGPSLIPSVKQEKRDGSSTNDPYVAFRRRTEKMQTRKNRKNDEASYEKMLKLRRDLSRAVTILEMIKRREKSKRELLHLTLEIMEKRYNLGDYNGEIMSEVMAQRQPMKPTYAIPIIPITNSSQFKHQEAMDVKEFKVNKQDKADLIRPKRKYEKKPKVLPSSAAATPQQTSPAALPVFNAKDLNQYDFPSSDEEPLSQVLSGSSEAEEDNDPDGPFAFRRKAGCQYYAPHLDQTGNWPWTSPKDGGLGDVRYRYCLTTLTVPQRCIGFARRRVGRGGRVLLDRAHSDYDSVFHHLDLEMLSSPQHSPVNQFANTSETNTSDKSFSKDLSQILVNIKSCRWRHFRPRTPSLHDSDNDELSCRKLYRSINRTGTAQPGTQTCSTSTQSKSSSGSAHFAFTAEQYQQHQQQLALMQKQQLAQIQQQQANSNSSTNTSQGFVSKTLDSASAQFAASALVTSEQLMGFKMKDDVVLGIGVNGVLPASGVYKGLHLSSTTPTALVHTSPSTAGSALLQPSNITQTSSSHSALSHQVTAANSATTQVLIGNNIRLTVPSSVATVNSIAPINARHIPRTLSAVPSSALKLAAAANCQVSKVPSSSSVDSVPRENHESEKPALNNIADNTVAMEVT

SEQ ID NO: 6598 - DNA, 4157 bp, Homo sapiens
gtgcccgcgccgctgcgcgatgcagtgtggggaatggctggggttggctgaagagcgcacagtggagttttaatgtccgccatgttggccatggcgtattgaagagagcgagcgagagaggagcggagcggcacagcctcccaccctcccggctggtgttagtgcccggacggcgggctctgcgctccgcccctcaagtccccggcagcggttggcgagtggggaccgaacccccggttctccatgatcccgctggccggggccgtttccccagagcggagaggtatctgctgcgcctgagatgagtaaactgtcgtttcgggcgcgggcgctagacgcctcgaagccgctgccggttttccgctgtgaggatctgcccgacctgcacgaatacgcctcgataaacagggccgtgccgcagatgcccaccggaatggagaaggaagaggagtcggaacatcatcttcagcgggctatttcagcacagcaggtgtatggcgagaagagggataatatggttataccggtcccagaggcagaaagtaatattgcttactatgagtctatatatcctggggaatttaagatgccaaagcagctcattcacatacagccttttagtttggatgctgaacagcctgattatgatttggattctgaagatgaagtatttgtgaataaactgaaaaagaaaatggacatctgcccattgcaatttgaggagatgattgaccgcctagaaaaaggcagtggtcagcagccagtcagtctgcaggaagccaaactactgctaaaagaagatgatgaactaattagagaagtttatgaatattggattaaaaagagaaaaaactgtcgagggccatctcttattccatcagtaaaacaagagaagcgagatggttccagcacaaatgatccttatgtggcttttagaaggcgtactgaaaaaatgcagactcgaaaaaatcgcaaaaatgatgaagcctcttacgaaaaaatgcttaagctgcgacgagatctaagtcgagctgttactattctagagatgataaaaagaagagaaaaaagtaaaagagagctattgcacttaacactggaaattatggaaaagaggtataatttgggcgactacaatggagagatcatgtctgaggttatggcacagagacagccaatgaaacctacttatgccatccccatcatccctattactaatagcagtcaatttaaacaccaggaagcaatggatgtgaaggagttcaaagttaataagcaagataaagccgatcttatccgaccgaaacggaaatatgaaaagaagcccaaagtcttaccatcgtctgccgctgctactccccaacagacgagtcctgctgcactgccagtcttcaatgctaaagatctgaatcagtatgactttcccagctcagacgaagaacctctctcccaggttttgtctggctcttcggaagctgaggaagacaatgatcctgatggtccttttgctttccgtaggaaagcaggctgtcagtactatgctcctcacttagaccaaactggcaactggccttggactagtcctaaagatggaggattaggggatgtgcgatatagatactgcttaactactctcaccgtaccccaaaggtgtattggatttgcacgaagacgggttgggcgcggtggaagggtcttactggacagagctcattcagactatgacagtgtgtttcaccatctggatttggaaatgctttcctcaccacaacattctccagtcaatcagtttgccaatacctcagaaacaaatacctcggacaaatctttctctaaagacctcagtcagatactagtcaatatcaaatcatgtagatggcggcattttaggcctcggacaccatccctacatgacagtgacaatgatgaactctcctgtagaaaattatataggagtataaaccgaacaggaacagcacaacctgggacccagacatgcagtacctctacgcaaagtaaaagtagcagtggttcagcacactttgcatttacagccgaacaataccagcaacatcaacagcaactggcactcatgcagaaacagcagcttgcacaaattcagcaacagcaagcaaatagtaattcctccaccaacacatcacagaaccttgcatctaaccagcagaaaagtggctttcgcctgaatatacagggtttagaaagaacactacagggttttgtttctaagactttggattctgctagtgcacagtttgctgcttctgctttggtgacatcagaacaactgatgggattcaagatgaaggatgatgtggtgcttggaatcggggtgaatggcgtccttccagcctcaggagtatacaagggcttacacctcagtagtactacaccaacagcacttgtacatacaagtccatcaacggcaggttcagctttgttacagccttcaaatattacacagacttcaagttcccacagtgcactgagtcatcaagtaactgctgccaattctgcaacaactcaggttctgattgggaacaacattcgattaactgtaccttcatcagttgccactgtaaactctattgccccaataaatgcacgacatatacctaggactttaagtgctgttccatcatctgccttaaagctggccgctgcagcaaactgtcaagtttccaaggtcccatcttcatcctctgtagattcagttccaagggaaaatcatgaatcagaaaagccagcactgaacaacatagcagacaacacagtagcgatggaggtgacgtagcttcctccgagtggaactgcagcctggggacttgattaggtgctatgcatcagtagcattttgaatgcaagggatgatggaaagcagcacatgcgtttctgtggcagctgtggggacttgacagcaatgctcatctctcatgcttcaatttttcttttcttactgttaataggaaaaaaatcaacatctgtaaattaagaatacagcaattatctgtacagtactgcatatttgtaatacccttgtatatatgttacttgaatacagaaatgttcatttgtgatgctttgcacttgggggtggggggtgggagggaaatcaattgcaacaaagagtgtgagatgtgagattgtatagagatgaagtgtcatcacatcatgtgcatggtgcggaacctgctgttttatctatttattgtgccgtgtttacagttttttgtacactgtaccttcattggttcctgtgctgtagtaaatgtgttaggtagctgtggactccttggtattttgtaaatggtataacataacttggttcccctctgggtccttgagttttctgtgtatcatgtgaaaaaaaatggtgacatacatacagaattttacaaaaaaaaaaaaaaaaaaaaaggcatcagtttttttaaaaatggggaatgtactattaaatggggatcttcctggtctactatcattaggacaagtaacaagctaaaaatgaagtctcttgaatctttccatccccaacttgcccacaaagctgtgggtggtttctggtacttaaagcactaatattatgttgctgctctgcgaacagcccagtagtcccatttccttccacaccaaaaagtgttaaatcaagtatgcaaatggagtccttacaactggagtttatgttgtcttgccctttttttagcacaaaaaaaattgtacttttttattgtcgaattgtttaaaagacttcattctttacttgttcttacgaaaaggatataagggagaagaatgcagtaattgctgtacgtgtatcatcattccagtttctaaaaacagccagccagcttttttccttttaagattctccagaaggctgcaaggccagaaccacaaatatcgggtgccttcctttggaaatatttgacctctcttctgtgaagagaatggtacttaacagactactactagtgctttgtcagtaccgaagtctgaatgcccagtccaatggcatacattatccttaaggtttttaatcccacctggaaaaattgtgatagaattctcacaaaataaacccagggcattacatgttgacaaactaatgtgtagtggtcttttgcttttgttttcaaccc

SEQ ID NO: 6599 - protein, 836 aa, Homo sapiens; identical to SEQ ID NO: 903

SEQ ID NO: 6600 - DNA, 1494 bp, Homo sapiens
ttgtttttaacatctaggttgcttgagtactactataattttgatggtaatgtagttgactgtggaatttatttatagtcaacattagcctgatttctgataataaactataaagattcgtattcctctacttgctagcttgttcccaaagagtccaatttcttcctgttaataaaaataaactttttgttgggaagataatgttcatttgctgaatatttatgttgtagataagtaattgattgaactttatttcaacagggaaaatcatgaatcagaaaagccagcactgaacaacatagcagacaacacagtagcgatggaggtgacgtagcttcctccgagtggaactgcagcctggggacttgattaggtgctatgcatcagtagcattttgaatgcaagggatgatggaaagcagcacatgcgtttctgtggcagctgtggggacttgacagcaatgctcatctctcatgcttcaatttttcttttcttactgttaataggaaaaaaatcaacatctgtaaattaagaatacagcaaatgaagtgtcatcacatcatgtgcatggtgcggaacctgctgttttatctatttattgtgccgtgtttacagttttttgtacactgtaccttcattggttcctgtgctgtagtaaatgtgttaggtagctgtggactccttggtattttgtaaatggtataacataacttggttcccctctgggtccttgagttttctgtgtatcatgtgaaaaaaaatggtgacatacatacagaattttacaaaaaaaaaaaaaaaaaaaaaggcatcagtttttttaaaaatggggaatgtactattaaatggggatcttcctggtctactatcattaggacaagtaacaagctaaaaatgaagtctcttgaatctttccatccccaacttgcccacaaagctgtgggtggtttctggtacttaaagcactaatattatgttgctgctctgcgaacagcccagtagtcccatttccttccacaccaaaaagtgttaaatcaagtatgcaaatggagtccttacaactggagtttatgttgtcttgccctttttttagcacaaaaaaaattgtacttttttattgtcgaattgtttaaaagacttcattctttacttgttcttacgaaaaggatataagggagaagaatgcagtaattgctgtacgtgtatcatcattccagtttctaaaaacagccagccagcttttttccttttaagattctccagaaggctgcaaggccagaaccacaaatatcgggtgccttcctttggaaatatttgacctctcttctgtgaagagaatggtacttaacagactactactagtgctttgtcagtaccgaagtctgaatgcccagtccaatggcatacattatccttaaggtttttaatcccacctggaaaaattgtgatagaattctcacaaaataaacccagggcattacatgttgacaaact

SEQ ID NO: 6601 - protein, 50 aa, Homo sapiens; identical to SEQ ID NO: 6593

SEQ ID NO: 6602 - DNA, 1535 bp, Homo sapiens
gcttacacctcagtagtactacaccaacagcacttgtacatacaagtccatcaacggcaggttcagctttgttacagccttcaaatattacacagacttcaagttcccacagtgcactgagtcatcaagtaactgctgccaattctgcaacaactcaggttctgattgggaacaacattcgattaactgtaccttcatcagttgccactgtaaactctattgccccaataaatgcacgacatatacctaggactttaagtgctgttccatcatctgccttaaagctggccgctgcagcaaactgtcaagtttccaaggtcccatcttcatcctctgtagattcagttccaaggtgagtactctcatgcttcaatttttcttttcttactgttaataggaaaaaaatcaacatctgtaaattaagaatacagcaattatctgtacagtactgcatatttgtaatacccttgtatatatgttacttgaatacagaaatgttcatttgtgatgctttgcacttgggggtggggggtgggagggaaatcaattgcaacaaagagtgtgagatgtgagattgtatagagatgaagtgtcatcacatcatgtgcatggtgcggaacctgctgttttatctatttattgtgccgtgtttacagttttttgtacactgtaccttcattggttcctgtgctgtagtaaatgtgttaggtagctgtggactccttggtattttgtaaatggtataacataacttggttcccctctgggtccttgagttttctgtgtatcatgtgaaaaaaaatggtgacatacatacagaattttacaaaaaaaaaaaaaaaaaaaaaggcatcagtttttttaaaaatggggaatgtactattaaatggggatcttcctggtctactatcattaggacaagtaacaagctaaaaatgaagtctcttgaatctttccatccccaacttgcccacaaagctgtgggtggtttctggtacttaaagcactaatattatgttgctgctctgcgaacagcccagtagtcccatttccttccacaccaaaaagtgttaaatcaagtatgcaaatggagtccttacaactggagtttatgttgtcttgccctttttttagcacaaaaaaaattgtacttttttattgtcgaattgtttaaaagacttcattctttacttgttcttacgaaaaggatataagggagaagaatgcagtaattgctgtacgtgtatcatcattccagtttctaaaaacagccagccagcttttttccttttaagattctccagaaggctgcaaggccagaaccacaaatatcgggtgccttcctttggaaatatttgacctctcttctgtgaagagaatggtacttaacagactactactagtgctttgtcagtaccgaagtctgaatgcccagtccaatggcatacattatccttaaggtttttaatcccacctggaaaaattgtgatagaattctcacaaaataaacccagggcattacatgttgacaaact

SEQ ID NO: 6603 - protein, 50 aa, Homo sapiens; identical to SEQ ID NO: 6593

SEQ ID NO: 6604 - DNA, 3755 bp, Homo sapiens
gtccgccatgttggccatggcgtattgaagagagcgagcgagagaggagcggagcggcacagcctcccaccctcccggctggtgttagtgcccggacggcgggctctgcgctccgcccctcaagtccccggcagcggttggcgagtggggaccgaacccccggttctccatgatcccgctggccggggccgtttccccagagcggagagggataatatggttataccggtcccagaggcagaaagtaatattgcttactatgagtctatatatcctggggaatttaagatgccaaagcagctcattcacatacagccttttagtttggatgctgaacagcctgattatgatttggattctgaagatgaagtatttgtgaataaactgaaaaagaaaatggacatctgcccattgcaatttgaggagatgattgaccgcctagaaaaaggcagtggtcagcagccagtcagtctgcaggaagccaaactactgctaaaagaagatgatgaactaattagagaagtttatgaatattggattaaaaagagaaaaaactgtcgagggccatctcttattccatcagtaaaacaagagaagcgagatggttccagcacaaatgatccttatgtggcttttagaaggcgtactgaaaaaatgcagactcgaaaaaatcgcaaaaatgatgaagcctcttacgaaaaaatgcttaagctgcgacgagatctaagtcgagctgttactattctagagatgataaaaagaagagaaaaaagtaaaagagagctattgcacttaacactggaaattatggaaaagaggtataatttgggcgactacaatggagagatcatgtctgaggttatggcacagagacagccaatgaaacctacttatgccatccccatcatccctattactaatagcagtcaatttaaacaccaggaagcaatggatgtgaaggagttcaaagttaataagcaagataaagccgatcttatccgaccgaaacggaaatatgaaaagaagcccaaagtcttaccatcgtctgccgctgctactccccaacagacgagtcctgctgcactgccagtcttcaatgctaaagatctgaatcagtatgactttcccagctcagacgaagaacctctctcccaggttttgtctggctcttcggaagctgaggaagacaatgatcctgatggtccttttgctttccgtaggaaagcaggctgtcagtactatgctcctcacttagaccaaactggcaactggccttggactagtcctaaagatggaggattaggggatgtgcgatatagatactgcttaactactctcaccgtaccccaaaggtgtattggatttgcacgaagacgggttgggcgcggtggaagggtcttactggacagagctcattcagactatgacagtgtgtttcaccatctggatttggaaatgctttcctcaccacaacattctccagtcaatcagtttgccaatacctcagaaacaaatacctcggacaaatctttctctaaagacctcagtcagatactagtcaatatcaaatcatgtagatggcggcattttaggcctcggacaccatccctacatgacagtgacaatgatgaactctcctgtagaaaattatataggagtataaaccgaacaggaacagcacaacctgggacccagacatgcagtacctctacgcaaagtaaaagtagcagtggttcagcacactttgcatttacagccgaacaataccagcaacatcaacagcaactggcactcatgcagaaacagcagcttgcacaaattcagcaacagcaagcaaatagtaattcctccaccaacacatcacagggttttgtttctaagactttggattctgctagtgcacagtttgctgcttctgctttggtgacatcagaacaactgatgggattcaagatgaaggatgatgtggtgcttggaatcggggtgaatggcgtccttccagcctcaggagtatacaagggcttacacctcagtagtactacaccaacagcacttgtacatacaagtccatcaacggcaggttcagctttgttacagccttcaaatattacacagacttcaagttcccacagtgcactgagtcatcaagtaactgctgccaattctgcaacaactcaggttctgattgggaacaacattcgattaactgtaccttcatcagttgccactgtaaactctattgccccaataaatgcacgacatatacctaggactttaagtgctgttccatcatctgccttaaagctggccgctgcagcaaactgtcaagtttccaaggtcccatcttcatcctctgtagattcagttccaagggaaaatcatgaatcagaaaagccagcactgaacaacatagcagacaacacagtagcgatggaggtgacgtagcttcctccgagtggaactgcagcctggggacttgattaggtgctatgcatcagtagcattttgaatgcaagggatgatggaaagcagcacatgcgtttctgtggcagctgtggggacttgacagcaatgctcatctctcatgcttcaatttttcttttcttactgttaataggaaaaaaatcaacatctgtaaattaagaatacagcaattatctgtacagtactgcatatttgtaatacccttgtatatatgttacttgaatacagaaatgttcatttgtgatgctttgcacttgggggtggggggtgggagggaaatcaattgcaacaaagagtgtgagatgtgagattgtatagagatgaagtgtcatcacatcatgtgcatggtgcggaacctgctgttttatctatttattgtgccgtgtttacagttttttgtacactgtaccttcattggttcctgtgctgtagtaaatgtgttaggtagctgtggactccttggtattttgtaaatggtataacataacttggttcccctctgggtccttgagttttctgtgtatcatgtgaaaaaaaatggtgacatacatacagaattttacaaaaaaaaaaaaaaaaaaaaaggcatcagtttttttaaaaatggggaatgtactattaaatggggatcttcctggtctactatcattaggacaagtaacaagctaaaaatgaagtctcttgaatctttccatccccaacttgcccacaaagctgtgggtggtttctggtacttaaagcactaatattatgttgctgctctgcgaacagcccagtagtcccatttccttccacaccaaaaagtgttaaatcaagtatgcaaatggagtccttacaactggagtttatgttgtcttgccctttttttagcacaaaaaaaattgtacttttttattgtcgaattgtttaaaagacttcattctttacttgttcttacgaaaaggatataagggagaagaatgcagtaattgctgtacgtgtatcatcattccagtttctaaaaacagccagccagcttttttccttttaagattctccagaaggctgcaaggccagaaccacaaatatcgggtgccttcctttggaaatatttgacctctcttctgtgaagagaatggtacttaacagactactactagtgctttgtcagtaccgaagtctgaatgcccagtccaatggcatacattatccttaaggtttttaatcccacctggaaaaattgtgatagaattctcacaaaataaacccagggcattacatgttgacaaact

SEQ ID NO: 6605 - protein, 742 aa, Homo sapiens; identical to SEQ ID NO: 6597

SEQ ID NO: 6606 - DNA, 4122 bp, Homo sapiens
gtgcccgcgccgctgcgcgatgcagtgtggggaatggctggggttggctgaagagcgcacagtggagttttaatgtccgccatgttggccatggcgtattgaagagagcgagcgagagaggagcggagcggcacagcctcccaccctcccggctggtgttagtgcccggacggcgggctctgcgctccgcccctcaagtccccggcagcggttggcgagtggggaccgaacccccggttctccatgatcccgctggccggggccgtttccccagagcggagaggtatctgctgcgcctgagatgagtaaactgtcgtttcgggcgcgggcgctagacgcctcgaagccgctgccggttttccgctgtgaggatctgcccgacctgcacgaatacgcctcgataaacagggccgtgccgcagatgcccaccggaatggagaaggaagaggagtcggaacatcatcttcagcgggctatttcagcacagcaggtgtatggcgagaagagggataatatggttataccggtcccagaggcagaaagtaatattgcttactatgagtctatatatcctggggaatttaagatgccaaagcagctcattcacatacagccttttagtttggatgctgaacagcctgattatgatttggattctgaagatgaagtatttgtgaataaactgaaaaagaaaatggacatctgcccattgcaatttgaggagatgattgaccgcctagaaaaaggcagtggtcagcagccagtcagtctgcaggaagccaaactactgctaaaagaagatgatgaactaattagagaagtttatgaatattggattaaaaagagaaaaaactgtcgagggccatctcttattccatcagtaaaacaagagaagcgagatggttccagcacaaatgatccttatgtggcttttagaaggcgtactgaaaaaatgcagactcgaaaaaatcgcaaaaatgatgaagcctcttacgaaaaaatgcttaagctgcgacgagatctaagtcgagctgttactattctagagatgataaaaagaagagaaaaaagtaaaagagagctattgcacttaacactggaaattatggaaaagaggtataatttgggcgactacaatggagagatcatgtctgaggttatggcacagagacagccaatgaaacctacttatgccatccccatcatccctattactaatagcagtcaatttaaacaccaggaagcaatggatgtgaaggagttcaaagttaataagcaagataaagccgatcttatccgaccgaaacggaaatatgaaaagaagcccaaagtcttaccatcgtctgccgctgctactccccaacagacgagtcctgctgcactgccagtcttcaatgctaaagatctgaatcagtatgactttcccagctcagacgaagaacctctctcccaggttttgtctggctcttcggaagctgaggaagacaatgatcctgatggtccttttgctttccgtaggaaagcaggctgtcagtactatgctcctcacttagaccaaactggcaactggccttggactagtcctaaagatggaggattaggggatgtgcgatatagatactgcttaactactctcaccgtaccccaaaggtgtattggatttgcacgaagacgggttgggcgcggtggaagggtcttactggacagagctcattcagactatgacagtgtgtttcaccatctggatttggaaatgctttcctcaccacaacattctccagtcaatcagtttgccaatacctcagaaacaaatacctcggacaaatctttctctaaagacctcagtcagatactagtcaatatcaaatcatgtagatggcggcattttaggcctcggacaccatccctacatgacagtgacaatgatgaactctcctgtagaaaattatataggagtataaaccgaacaggaacagcacaacctgggacccagacatgcagtacctctacgcaaagtaaaagtagcagtggttcagcacactttgcatttacagccgaacaataccagcaacatcaacagcaactggcactcatgcagaaacagcagcttgcacaaattcagcaacagcaagcaaatagtaattcctccaccaacacatcacagaaccttgcatctaaccagcagaaaagtggctttcgcctgaatatacagggtttagaaagaacactacagggttttgtttctaagactttggattctgctagtgcacagtttgctgcttctgctttggtgacatcagaacaactgatgggattcaagatgaaggatgatgtggtgcttggaatcggggtgaatggcgtccttccagcctcaggagtatacaagggcttacacctcagtagtactacaccaacagcacttgtacatacaagtccatcaacggcaggttcagctttgttacagccttcaaatattacacagacttcaagttcccacagtgcactgagtcatcaagtaactgctgccaattctgcaacaactcaggttctgattgggaacaacattcgattaactgtaccttcatcagttgccactgtaaactctattgccccaataaatgcacgacatatacctaggactttaagtgctgttccatcatctgccttaaagctggccgctgcagcaaactgtcaagtttccaaggtcccatcttcatcctctgtagattcagttccaagggaaaatcatgaatcagaaaagccagcactgaacaacatagcagacaacacagtagcgatggaggtgacgtagcttcctccgagtggaactgcagcctggggacttgattaggtgctatgcatcagtagcattttgaatgcaagggatgatggaaagcagcacatgcgtttctgtggcagctgtggggacttgacagcaatgctcatctctcatgcttcaatttttcttttcttactgttaataggaaaaaaatcaacatctgtaaattaagaatacagcaattatctgtacagtactgcatatttgtaatacccttgtatatatgttacttgaatacagaaatgttcatttgtgatgctttgcacttgggggtggggggtgggagggaaatcaattgcaacaaagagtgtgagatgtgagattgtatagagatgaagtgtcatcacatcatgtgcatggtgcggaacctgctgttttatctatttattgtgccgtgtttacagttttttgtacactgtaccttcattggttcctgtgctgtagtaaatgtgttaggtagctgtggactccttggtattttgtaaatggtataacataacttggttcccctctgggtccttgagttttctgtgtatcatgtgaaaaaaaatggtgacatacatacagaattttacaaaaaaaaaaaaaaaaaaaaaggcatcagtttttttaaaaatggggaatgtactattaaatggggatcttcctggtctactatcattaggacaagtaacaagctaaaaatgaagtctcttgaatctttccatccccaacttgcccacaaagctgtgggtggtttctggtacttaaagcactaatattatgttgctgctctgcgaacagcccagtagtcccatttccttccacaccaaaaagtgttaaatcaagtatgcaaatggagtccttacaactggagtttatgttgtcttgccctttttttagcacaaaaaaaattgtacttttttattgtcgaattgtttaaaagacttcattctttacttgttcttacgaaaaggatataagggagaagaatgcagtaattgctgtacgtgtatcatcattccagtttctaaaaacagccagccagcttttttccttttaagattctccagaaggctgcaaggccagaaccacaaatatcgggtgccttcctttggaaatatttgacctctcttctgtgaagagaatggtacttaacagactactactagtgctttgtcagtaccgaagtctgaatgcccagtccaatggcatacattatccttaaggtttttaatcccacctggaaaaattgtgatagaattctcacaaaataaacccagggcattacatgttgacaaact

SEQ ID NO: 6607 - protein, 836 aa, Homo sapiens; identical to SEQ ID NO: 903

SEQ ID NO: 6608 - DNA, 4053 bp, Homo sapiens
gtgcccgcgccgctgcgcgatgcagtgtggggaatggctggggttggctgaagagcgcacagtggagttttaatgtccgccatgttggccatggcgtattgaagagagcgagcgagagaggagcggagcggcacagcctcccaccctcccggctggtgttagtgcccggacggcgggctctgcgctccgcccctcaagtccccggcagcggttggcgagtggggaccgaacccccggttctccatgatcccgctggccggggccgtttccccagagcggagaggtatctgctgcgcctgagatgagtaaactgtcgtttcgggcgcgggcgctagacgcctcgaagccgctgccggttttccgctgtgaggatctgcccgacctgcacgaatacgcctcgataaacagggccgtgccgcagatgcccaccggaatggagaaggaagaggagtcggaacatcatcttcagcgggctatttcagcacagcaggtgtatggcgagaagagggataatatggttataccggtcccagaggcagaaagtaatattgcttactatgagtctatatatcctggggaatttaagatgccaaagcagctcattcacatacagccttttagtttggatgctgaacagcctgattatgatttggattctgaagatgaagtatttgtgaataaactgaaaaagaaaatggacatctgcccattgcaatttgaggagatgattgaccgcctagaaaaaggcagtggtcagcagccagtcagtctgcaggaagccaaactactgctaaaagaagatgatgaactaattagagaagtttatgaatattggattaaaaagagaaaaaactgtcgagggccatctcttattccatcagtaaaacaagagaagcgagatggttccagcacaaatgatccttatgtggcttttagaaggcgtactgaaaaaatgcagactcgaaaaaatcgcaaaaatgatgaagcctcttacgaaaaaatgcttaagctgcgacgagatctaagtcgagctgttactattctagagatgataaaaagaagagaaaaaagtaaaagagagctattgcacttaacactggaaattatggaaaagaggtataatttgggcgactacaatggagagatcatgtctgaggttatggcacagagacagccaatgaaacctacttatgccatccccatcatccctattactaatagcagtcaatttaaacaccaggaagcaatggatgtgaaggagttcaaagttaataagcaagataaagccgatcttatccgaccgaaacggaaatatgaaaagaagcccaaagtcttaccatcgtctgccgctgctactccccaacagacgagtcctgctgcactgccagtcttcaatgctaaagatctgaatcagtatgactttcccagctcagacgaagaacctctctcccaggttttgtctggctcttcggaagctgaggaagacaatgatcctgatggtccttttgctttccgtaggaaagcaggctgtcagtactatgctcctcacttagaccaaactggcaactggccttggactagtcctaaagatggaggattaggggatgtgcgatatagatactgcttaactactctcaccgtaccccaaaggtgtattggatttgcacgaagacgggttgggcgcggtggaagggtcttactggacagagctcattcagactatgacagtgtgtttcaccatctggatttggaaatgctttcctcaccacaacattctccagtcaatcagtttgccaatacctcagaaacaaatacctcggacaaatctttctctaaagacctcagtcagatactagtcaatatcaaatcatgtagatggcggcattttaggcctcggacaccatccctacatgacagtgacaatgatgaactctcctgtagaaaattatataggagtataaaccgaacaggaacagcacaacctgggacccagacatgcagtacctctacgcaaagtaaaagtagcagtggttcagcacactttgcatttacagccgaacaataccagcaacatcaacagcaactggcactcatgcagaaacagcagcttgcacaaattcagcaacagcaagcaaatagtaattcctccaccaacacatcacagggttttgtttctaagactttggattctgctagtgcacagtttgctgcttctgctttggtgacatcagaacaactgatgggattcaagatgaaggatgatgtggtgcttggaatcggggtgaatggcgtccttccagcctcaggagtatacaagggcttacacctcagtagtactacaccaacagcacttgtacatacaagtccatcaacggcaggttcagctttgttacagccttcaaatattacacagacttcaagttcccacagtgcactgagtcatcaagtaactgctgccaattctgcaacaactcaggttctgattgggaacaacattcgattaactgtaccttcatcagttgccactgtaaactctattgccccaataaatgcacgacatatacctaggactttaagtgctgttccatcatctgccttaaagctggccgctgcagcaaactgtcaagtttccaaggtcccatcttcatcctctgtagattcagttccaagggaaaatcatgaatcagaaaagccagcactgaacaacatagcagacaacacagtagcgatggaggtgacgtagcttcctccgagtggaactgcagcctggggacttgattaggtgctatgcatcagtagcattttgaatgcaagggatgatggaaagcagcacatgcgtttctgtggcagctgtggggacttgacagcaatgctcatctctcatgcttcaatttttcttttcttactgttaataggaaaaaaatcaacatctgtaaattaagaatacagcaattatctgtacagtactgcatatttgtaatacccttgtatatatgttacttgaatacagaaatgttcatttgtgatgctttgcacttgggggtggggggtgggagggaaatcaattgcaacaaagagtgtgagatgtgagattgtatagagatgaagtgtcatcacatcatgtgcatggtgcggaacctgctgttttatctatttattgtgccgtgtttacagttttttgtacactgtaccttcattggttcctgtgctgtagtaaatgtgttaggtagctgtggactccttggtattttgtaaatggtataacataacttggttcccctctgggtccttgagttttctgtgtatcatgtgaaaaaaaatggtgacatacatacagaattttacaaaaaaaaaaaaaaaaaaaaaggcatcagtttttttaaaaatggggaatgtactattaaatggggatcttcctggtctactatcattaggacaagtaacaagctaaaaatgaagtctcttgaatctttccatccccaacttgcccacaaagctgtgggtggtttctggtacttaaagcactaatattatgttgctgctctgcgaacagcccagtagtcccatttccttccacaccaaaaagtgttaaatcaagtatgcaaatggagtccttacaactggagtttatgttgtcttgccctttttttagcacaaaaaaaattgtacttttttattgtcgaattgtttaaaagacttcattctttacttgttcttacgaaaaggatataagggagaagaatgcagtaattgctgtacgtgtatcatcattccagtttctaaaaacagccagccagcttttttccttttaagattctccagaaggctgcaaggccagaaccacaaatatcgggtgccttcctttggaaatatttgacctctcttctgtgaagagaatggtacttaacagactactactagtgctttgtcagtaccgaagtctgaatgcccagtccaatggcatacattatccttaaggtttttaatcccacctggaaaaattgtgatagaattctcacaaaataaacccagggcattacatgttgacaaact

SEQ ID NO: 6609 - protein, 813 aa, Homo sapiens
MSKLSFRARALDASKPLPVFRCEDLPDLHEYASINRAVPQMPTGMEKEEESEHHLQRAISAQQVYGEKRDNMVIPVPEAESNIAYYESIYPGEFKMPKQLIHIQPFSLDAEQPDYDLDSEDEVFVNKLKKKMDICPLQFEEMIDRLEKGSGQQPVSLQEAKLLLKEDDELIREVYEYWIKKRKNCRGPSLIPSVKQEKRDGSSTNDPYVAFRRRTEKMQTRKNRKNDEASYEKMLKLRRDLSRAVTILEMIKRREKSKRELLHLTLEIMEKRYNLGDYNGEIMSEVMAQRQPMKPTYAIPIIPITNSSQFKHQEAMDVKEFKVNKQDKADLIRPKRKYEKKPKVLPSSAAATPQQTSPAALPVFNAKDLNQYDFPSSDEEPLSQVLSGSSEAEEDNDPDGPFAFRRKAGCQYYAPHLDQTGNWPWTSPKDGGLGDVRYRYCLTTLTVPQRCIGFARRRVGRGGRVLLDRAHSDYDSVFHHLDLEMLSSPQHSPVNQFANTSETNTSDKSFSKDLSQILVNIKSCRWRHFRPRTPSLHDSDNDELSCRKLYRSINRTGTAQPGTQTCSTSTQSKSSSGSAHFAFTAEQYQQHQQQLALMQKQQLAQIQQQQANSNSSTNTSQGFVSKTLDSASAQFAASALVTSEQLMGFKMKDDVVLGIGVNGVLPASGVYKGLHLSSTTPTALVHTSPSTAGSALLQPSNITQTSSSHSALSHQVTAANSATTQVLIGNNIRLTVPSSVATVNSIAPINARHIPRTLSAVPSSALKLAAAANCQVSKVPSSSSVDSVPRENHESEKPALNNIADNTVAMEVT

SEQ ID NO: 6610 - DNA, 4315 bp, Homo sapiens
tcgaaaaaatattttgatggacatcgtttttacatggccaggtttgcatgcagaggatctatcgagtggttgaaaaggatcaacaatctgctcaagaaaaacatgataatgctgttttaaaaaaaaaaaaacaaaaacaaaaaacaaacaaaaaaaccccacatccaagaagccagagtgttccttcagatgttaaaaggggcattcccccgagctcacaggcagccgtgggtgctattgtcttgcagtgtcacttcatagcgagcttagacttttgtcattttggtggctgtgcttttaaaagcccagtgtaaaatggcacacacactgcatttttttccgagctgcaggaggcgggggcagcgggggatagtgcagactgtagggacactgccctcccagccaatcagcgctcgcctgcttgccatcgcaaagttgttaaccccagagtcttctggctgtgctgcctcctctgcttttaatcttctgtggatatttctccgatttcccccaaaagcccacagatcctgggggaagccaccccattcggccaccgatcatggaagaaagtattactttttatttaccaaacattttaaagatgttggaagatccatatgctgcctggaggctgttgtttctagggacacaagtatccagcctatattgttacaattttttttcaagaactgccgtcttctttgcctgcactaatggaacatcatcttcagcgggctatttcagcacagcaggtgtatggcgagaagagggataatatggttataccggtcccagaggcagaaagtaatattgcttactatgagtctatatatcctggggaatttaagatgccaaagcagctcattcacatacagccttttagtttggatgctgaacagcctgattatgatttggattctgaagatgaagtatttgtgaataaactgaaaaagaaaatggacatctgcccattgcaatttgaggagatgattgaccgcctagaaaaaggcagtggtcagcagccagtcagtctgcaggaagccaaactactgctaaaagaagatgatgaactaattagagaagtttatgaatattggattaaaaagagaaaaaactgtcgagggccatctcttattccatcagtaaaacaagagaagcgagatggttccagcacaaatgatccttatgtggcttttagaaggcgtactgaaaaaatgcagactcgaaaaaatcgcaaaaatgatgaagcctcttacgaaaaaatgcttaagctgcgacgagatctaagtcgagctgttactattctagagatgataaaaagaagagaaaaaagtaaaagagagctattgcacttaacactggaaattatggaaaagaggtataatttgggcgactacaatggagagatcatgtctgaggttatggcacagagacagccaatgaaacctacttatgccatccccatcatccctattactaatagcagtcaatttaaacaccaggaagcaatggatgtgaaggagttcaaagttaataagcaagataaagccgatcttatccgaccgaaacggaaatatgaaaagaagcccaaagtcttaccatcgtctgccgctgctactccccaacagacgagtcctgctgcactgccagtcttcaatgctaaagatctgaatcagtatgactttcccagctcagacgaagaacctctctcccaggttttgtctggctcttcggaagctgaggaagacaatgatcctgatggtccttttgctttccgtaggaaagcaggctgtcagtactatgctcctcacttagaccaaactggcaactggccttggactagtcctaaagatggaggattaggggatgtgcgatatagatactgcttaactactctcaccgtaccccaaaggtgtattggatttgcacgaagacgggttgggcgcggtggaagggtcttactggacagagctcattcagactatgacagtgtgtttcaccatctggatttggaaatgctttcctcaccacaacattctccagtcaatcagtttgccaatacctcagaaacaaatacctcggacaaatctttctctaaagacctcagtcagatactagtcaatatcaaatcatgtagatggcggcattttaggcctcggacaccatccctacatgacagtgacaatgatgaactctcctgtagaaaattatataggagtataaaccgaacaggaacagcacaacctgggacccagacatgcagtacctctacgcaaagtaaaagtagcagtggttcagcacactttgcatttacagccgaacaataccagcaacatcaacagcaactggcactcatgcagaaacagcagcttgcacaaattcagcaacagcaagcaaatagtaattcctccaccaacacatcacagggttttgtttctaagactttggattctgctagtgcacagtttgctgcttctgctttggtgacatcagaacaactgatgggattcaagatgaaggatgatgtggtgcttggaatcggggtgaatggcgtccttccagcctcaggagtatacaagggcttacacctcagtagtactacaccaacagcacttgtacatacaagtccatcaacggcaggttcagctttgttacagccttcaaatattacacagacttcaagttcccacagtgcactgagtcatcaagtaactgctgccaattctgcaacaactcaggttctgattgggaacaacattcgattaactgtaccttcatcagttgccactgtaaactctattgccccaataaatgcacgacatatacctaggactttaagtgctgttccatcatctgccttaaagctggccgctgcagcaaactgtcaagtttccaaggtcccatcttcatcctctgtagattcagttccaagggaaaatcatgaatcagaaaagccagcactgaacaacatagcagacaacacagtagcgatggaggtgacgtagcttcctccgagtggaactgcagcctggggacttgattaggtgctatgcatcagtagcattttgaatgcaagggatgatggaaagcagcacatgcgtttctgtggcagctgtggggacttgacagcaatgctcatctctcatgcttcaatttttcttttcttactgttaataggaaaaaaatcaacatctgtaaattaagaatacagcaattatctgtacagtactgcatatttgtaatacccttgtatatatgttacttgaatacagaaatgttcatttgtgatgctttgcacttgggggtggggggtgggagggaaatcaattgcaacaaagagtgtgagatgtgagattgtatagagatgaagtgtcatcacatcatgtgcatggtgcggaacctgctgttttatctatttattgtgccgtgtttacagttttttgtacactgtaccttcattggttcctgtgctgtagtaaatgtgttaggtagctgtggactccttggtattttgtaaatggtataacataacttggttcccctctgggtccttgagttttctgtgtatcatgtgaaaaaaaatggtgacatacatacagaattttacaaaaaaaaaaaaaaaaaaaaaggcatcagtttttttaaaaatggggaatgtactattaaatggggatcttcctggtctactatcattaggacaagtaacaagctaaaaatgaagtctcttgaatctttccatccccaacttgcccacaaagctgtgggtggtttctggtacttaaagcactaatattatgttgctgctctgcgaacagcccagtagtcccatttccttccacaccaaaaagtgttaaatcaagtatgcaaatggagtccttacaactggagtttatgttgtcttgccctttttttagcacaaaaaaaattgtacttttttattgtcgaattgtttaaaagacttcattctttacttgttcttacgaaaaggatataagggagaagaatgcagtaattgctgtacgtgtatcatcattccagtttctaaaaacagccagccagcttttttccttttaagattctccagaaggctgcaaggccagaaccacaaatatcgggtgccttcctttggaaatatttgacctctcttctgtgaagagaatggtacttaacagactactactagtgctttgtcagtaccgaagtctgaatgcccagtccaatggcatacattatccttaaggtttttaatcccacctggaaaaattgtgatagaattctcacaaaataaacccagggcattacatgttgacaaact

SEQ ID NO: 6611 - protein, 763 aa, Homo sapiens
MEHHLQRAISAQQVYGEKRDNMVIPVPEAESNIAYYESIYPGEFKMPKQLIHIQPFSLDAEQPDYDLDSEDEVFVNKLKKKMDICPLQFEEMIDRLEKGSGQQPVSLQEAKLLLKEDDELIREVYEYWIKKRKNCRGPSLIPSVKQEKRDGSSTNDPYVAFRRRTEKMQTRKNRKNDEASYEKMLKLRRDLSRAVTILEMIKRREKSKRELLHLTLEIMEKRYNLGDYNGEIMSEVMAQRQPMKPTYAIPIIPITNSSQFKHQEAMDVKEFKVNKQDKADLIRPKRKYEKKPKVLPSSAAATPQQTSPAALPVFNAKDLNQYDFPSSDEEPLSQVLSGSSEAEEDNDPDGPFAFRRKAGCQYYAPHLDQTGNWPWTSPKDGGLGDVRYRYCLTTLTVPQRCIGFARRRVGRGGRVLLDRAHSDYDSVFHHLDLEMLSSPQHSPVNQFANTSETNTSDKSFSKDLSQILVNIKSCRWRHFRPRTPSLHDSDNDELSCRKLYRSINRTGTAQPGTQTCSTSTQSKSSSGSAHFAFTAEQYQQHQQQLALMQKQQLAQIQQQQANSNSSTNTSQGFVSKTLDSASAQFAASALVTSEQLMGFKMKDDVVLGIGVNGVLPASGVYKGLHLSSTTPTALVHTSPSTAGSALLQPSNITQTSSSHSALSHQVTAANSATTQVLIGNNIRLTVPSSVATVNSIAPINARHIPRTLSAVPSSALKLAAAANCQVSKVPSSSSVDSVPRENHESEKPALNNIADNTVAMEVT

SEQ ID NO: 6612 - DNA, 466 bp, Homo sapiens
tcagaaaataggcatgttccatcaatctccatcttctccaccccttaaatagagaagttgaagtgtataactatcctaaatatttaaggattttataatgctctttttttatgaaaaatgttttgctatactgctttaggcatattaataacagttgtaaaaattgtttgatttgtgtttgcccaaagaacattaaaagatgagcattaccaaaagcttagctgaaaagaaatcattagtaaccttgtaatttttcttctttatcatttctttcctccatatatgcgatacaactatttatttatttatttaagacaggatctttctctgtcacccagactgtaatcccagctactcaggaagctgaggcagggagaatggcttgaacctgggagtcagaggttgcagtgagccgagattgtgccattgcattccagcctgggcgacagagtgagactccatctca

SEQ ID NO: 6613 - protein, 30 aa, Homo sapiens
MKNVLLYCFRHINNSCKNCLICVCPKNIKR

SEQ ID NO: 6614 - DNA, 5653 bp, Homo sapiens
gcgtgcccgcgccgctgcgcgatgcagtgtggggaatggctggggttggctgaagagcgcacagtggagttttaatgtccgccatgttgggcctcgataaacagggccgtgccgcagatgcccaccggaatggagaaggaagaggagtcggaacatcatcttcagcgggctatttcagcacagcaggtgtatggcgagaagagggataatatggttataccggtcccagaggcagaaagtaatattgcttactatgagtctatatatcctggggaatttaagatgccaaagcagctcattcacatacagccttttagtttggatgctgaacagcctgattatgatttggattctgaagatgaagtatttgtgaataaactgaaaaagaaaatggacatctgcccattgcaatttgaggagatgattgaccgcctagaaaaaggcagtggtcagcagccagtcagtctgcaggaagccaaactactgctaaaagaagatgatgaactaattagagaagtttatgaatattggattaaaaagagaaaaaactgtcgagggccatctcttattccatcagtaaaacaagagaagcgagatggttccagcacaaatgatccttatgtggcttttagaaggcgtactgaaaaaatgcagactcgaaaaaatcgcaaaaatgatgaagcctcttacgaaaaaatgcttaagctgcgacgagatctaagtcgagctgttactattctagagatgataaaaagaagagaaaaaagtaaaagagagctattgcacttaacactggaaattatggaaaagaggtaatgtatattttaataatgttagaggaagtatagtgccattaacattttgtatattgagttaatttatttcctatgcaataatctaattacagaaatatctttttttaataatagagactttaaatatgtggtatgatactttttatacttttacatgttttcctctattttctttaaaagtgactggattcacttaagttaaaacataccaagtatttccatttcaaagtggtcttttttggtccttgagttgcatgtaggacttgagttaattgatagtactgcttcttttttaatgcatataaaatttaaaacactggattgttaaatagaaaagggtaaagaaagagggagaaaggcccatatatcttaccactcaagcatttggcaaggtacacaatgaaaacttaaagaaaacttctgccctatttctagtccctatccccaaagaaaaccacttttaaatttcttgtgattacttttagaaaaattagttttaaagcccaggcaattctaattagcagaaagatccttagcaccattttaggcattactttcaacttcaccaaatctttcaccaaaattgctacattaaaattccagcttttgattttttcccaacaatcctctatttatatgccatgataaagctataagccaaaaaagtaaaaggaagaaacaaaaggaattatgtaatctttgagagaaattgaatagtcaaagtttaactacaatcttgccttaaatgtaattggtgtttataattatatctcagtcagctagttattaatggttataaagataaatacttataaaactaactttccaaaattttcttcaaactttcatttgtataattttaggtataatttgggcgactacaatggagagatcatgtctgaggttatggcacagagacagccaatgaaacctacttatgccatccccatcatccctattactaatagcagtcaatttaaacaccaggaagcaatggatgtgaaggagttcaaagttaataagcaagataaagccgatcttatccgaccgaaacggaaatatgaaaagaagcccaaagtcttaccatcgtctgccgctgctactccccaacagacgagtcctgctgcactgccagtcttcaatgctaaagatctgaatcagtatgactttcccagctcagacgaagaacctctctcccaggttttgtctggctcttcggaagctgaggaagacaatgatcctgatggtccttttgctttccgtaggaaagcaggctgtcagtactatgctgtaagtttcagagtgtctttgtaaataacaaactatttacctttaactgacaaaattaaataatttggatttttttttttaagcctcacttagaccaaactggcaactggccttggactagtcctaaagatggaggattaggggatgtgcgatatagatactgcttaactactctcaccgtaccccaaaggtgtattggatttgcacgaagacgggttgggcgcggtggaaggtaaggtatttctgtattcctagcagaaggatattttaggcattagggtgattgaatctaacttttaaagtcaggtaatccctctgaacaactcattagttcctatttgctattcttaactgatctgttgactaaaatatttttgttgctgtgctgcctggttcttacacatccatagtttttgacataactctattgggtccctagtggacctgcttttctccccaaggtggaaaacctcagataaattatcaaggggtagaattgtgagaaagggcaacagatgaagacaagtgtaaatcctgattgcacacagtgtattaagttaaagaaactgcaaaaaagttgtttcacactagctagtataatgggtttaacctgacagtgaaaaggatccatgcataacctgatcttgacatcccagtttgttaggatctaattgttcttcctttgtttaaaccttgtagaattccttccttcatactctaaatgcctttatgcgagttgcttgtatggggacaggaaacaaatagcaaaacacataaactcaaggaatggagagacgttaatgtataatgtgcggggaaaattaaaagggaaagcaaataatagtatcaaggtgctttttcaggaagaaacccaagcgtatatttatgataaactaatggcttatacatatatttttttcatcttcaactcttaattgcagagggtttttttttattatttaaacattggttaagaattatctaggcactaaaatacattttatttagtccgtttttttccatcactgctgacatcaggagcagtgaaaattctctacgttagctatattttattctattactaacattaatcaatgttattattttgacttggagccatttataatgtttatataaataacataagaaacataagaatatatcctctagagtagtggatctcaaatattttgtctataagaaatgttaatggtatactatgttttttgttgcttttcttctctcttctccctttccccccaaaaggaatgaagtttttgcttaaatatagaataaatgtgttcgcaacattttataaagcattcattttggtgctttgtaatggaagtgaaaatctttagttgaaaaacaatttgttaaaagaacttttattagaaattgaggttgtagcctataaaaaccaaacactaaaataatcaactttaaagcttttaaatattcagtatgagttggccttttggcagttgggggtaaaaagaaaaagctttaatatataatctttgaatagctattttaaataactgtttcttgtctgattttttaatagggtcttactggacagagctcattcagactatgacagtgtgtttcaccatctggatttggaaatgctttcctcaccacaacattctccagtcaatcagtttgccaatacctcagaaacaaatacctcggacaaatctttctctaaagacctcagtcagatactagtcaatatcaaatcatgtagatggcggcattttaggcctcggacaccatccctacatgacagtgacaatgatgaactctcctgtagaaaattatataggagtataaaccgaacaggaacagcacaacctgggacccagacatgcagtacctctacgcaaagtaaaagtagcagtggttcagcacactttggtatgttgactgttaatgatgtacgtttctatagaaatgtcaggtccaaccatttcccatttgttcgactatgtggtctgttacatttatggcttaaagtccttttctcttaaacagttaaaaaaaaaatcttggtctaagtatttatttgaatcctgttgctataggagtttgtatgtgtgtgtcttcatttaaacatacctgcatacaaagatggtttatttctatttaatatgtgacatttgtttcctggatatagtccgtgaaccacaagatttatcatatttttcaataatatgagaagaaaatgggccgtaaattgttaaccattttatgttcagatatttctctagtttttacctagtttgctttaacatagagaccagcaagtgaatatatatgcataaccttatatgttgacacaataattcagaataatttgttaaagataaactaatttttcagagaagaacatttaaagggttaatatttttgaaacgttttcagataatatctatttgattattgtggcttctatttgaaatgtgtctaaaataaatgctgtttatttaaaatattcctataatcttagctgtctgttttaaagcataagtttgtgttatttgaagcctatatattgtagaaattcaccattgaattatgttactactgatttttgtaaaggtaatctgaggactatgaagatatttatcattcccctaattcaccctaatttacttggtggttaaaaaaaagtatacttctatgaaatggaagtctttcagctcatgagaaaaataatcacaattcagaaatcagctggaagataaagctattttagggactaacagcttatttataatcccattaatgttactgtctttatcaccaaaagccagtttctctctacttttatagtcttaagaatcaaaataaagaacttttcaataaagacttacttatagtgttagtatagaggttttaacagtataaacctgtcataggttaccctgataattaagctttctaagctgtaaaaattctttaagacttctcagaaaataggcatgttccatcaatctccatcttctccaccccttaaatagagaagttgaagtgtataactatcctaaatatttaaggattttataatgctctttttttatgaaaaatgttttgctatactgctttaggcatattaataacagttgtaaaaattgtttgatttgtgtttgcccaaagaacattaaaagatgagcattaccaaaagcttagctgaaaagaaatcattagtaaccttgtaatttttcttctttatcatttctttcctccatatatgcgatacaactatcaatactactttttaaaaatgagtttatctattttttttcctgttgtcttaattattttcaatttctccttaaattttgctagatcttctaatacttagaggatagatacctacagactactgtagggtaacactgttcatttatatttgtgaatattccagagacctaaagcttttctctgcatactttataaagtatattacaatgcagccatatcataagtgcatttcacttaatccaactccaggcccctgaagaaaaaaaaaacaaaattta

SEQ ID NO: 6615 - protein, 232 aa, Homo sapiens
MPTGMEKEEESEHHLQRAISAQQVYGEKRDNMVIPVPEAESNIAYYESIYPGEFKMPKQLIHIQPFSLDAEQPDYDLDSEDEVFVNKLKKKMDICPLQFEEMIDRLEKGSGQQPVSLQEAKLLLKEDDELIREVYEYWIKKRKNCRGPSLIPSVKQEKRDGSSTNDPYVAFRRRTEKMQTRKNRKNDEASYEKMLKLRRDLSRAVTILEMIKRREKSKRELLHLTLEIMEKR

SEQ ID NO: 6616 - DNA, 449 bp, Homo sapiens
gttagtaaactgtggagccaacattcaaataccagggaactcttgattacaaaatccatgttcttaaccactatactatattgcttgtaaaaatcagaactccttaggggtcatgttttatacctaaagaattaattttattatggtttatttgaaaaaaataaatgagaaacctgataaggaaaaagtatgagtgggaaattaccatactagataataaaatgcagtatgaggctacattgttcttcttctttatttatttttattttttttgagacagggtgtggctatgttgcccaggctggtctcgaactcctgggctcaagtgatccgcctgccttggcctcccaaagtgctgggattacaggcgtgagccaccgtgcccagcccaaggctgtgttgtttaaaacacattaaatactggcataggagagagttgagtggaatgg

SEQ ID NO: 6617 - protein, 62 aa, Homo sapiens [sequence omitted]

SEQ ID NO: 6618 - DNA, 897 bp, Homo sapiens
aatgtccgccatgttggccatggcgtattgaagagagcgagcgagagaggagcggagcggcacagcctcccaccctcccggctggtgttagtgcccggacggcgggctctgcgctccgcccctcaagtccccggcagcggttggcgagtggggaccgaacccccggttctccatgatcccgctggccggggccgtttccccagagcggagaggtatctgctgcgcctgagatgagtaaactgtcgtttcgggcgcgggcgctagacgcctcgaagccgctgccggttttccgctgtgaggatctgcccgacctgcacgaatacgcctcgataaacagggccgtgccgcagatgcccaccggaatggagaaggaagaggagtcgatccttgacagtataacttgatgacttctaatcctaaggaattgcataccttggttttcaggtacagccatttaaacagggtgcagtgtattgacagttcaaggaagtccaggagtcgcgtggatttgtgtgctacaattttgttgtggaaaattgtactgtaatacttctcttggtactgtaagaatttttaatgtagaaattatgctctgtaatgttgtttttggaaataaaactgtttaaactctttgggttgtttaaccttttaaagtgaaatagctgtgacagtgaaatgttacttttgagagtagtgtcttaaatctaactttacagataagccaagtgtatgtagtagctcagattgtctagttgggcactgactttcagcacattgtctcatgagacactacctcttaatttattttacttgtatcaactttagagtagcatggccatttgtttattttttaataagtgatttgtttttaaaaattaaagtacttgtgactgcaga

SEQ ID NO: 6619 - protein, 57 aa, Homo sapiens
MSKLSFRARALDASKPLPVFRCEDLPDLHEYASINRAVPQMPTGMEKEEESILDSIT

SEQ ID NO: 6620 - DNA, 948 bp, Homo sapiens
aatgtccgccatgttggccatggcgtattgaagagagcgagcgagagaggagcggagcggcacagcctcccaccctcccggctggtgttagtgcccggacggcgggctctgcgctccgcccctcaagtccccggcagcggttggcgagtggggaccgaacccccggttctccatgatcccgctggccggggccgtttccccagagcggagaggtatctgctgcgcctgagatgagtaaactgtcgtttcgggcgcgggcgctagacgcctcgaagccgctgccggttttccgctgtgaggatctgcccgacctgcacgaatacgcctcgataaacagggccgtgccgcagatgcccaccggaatggagaaggaagaggagtcggaaatgtcgagggtgcagcgtgtttgcccggacgacttacttttctagaagatccttgacagtataacttgatgacttctaatcctaaggaattgcataccttggttttcaggtacagccatttaaacagggtgcagtgtattgacagttcaaggaagtccaggagtcgcgtggatttgtgtgctacaattttgttgtggaaaattgtactgtaatacttctcttggtactgtaagaatttttaatgtagaaattatgctctgtaatgttgtttttggaaataaaactgtttaaactctttgggttgtttaaccttttaaagtgaaatagctgtgacagtgaaatgttacttttgagagtagtgtcttaaatctaactttacagataagccaagtgtatgtagtagctcagattgtctagttgggcactgactttcagcacattgtctcatgagacactacctcttaatttattttacttgtatcaactttagagtagcatggccatttgtttattttttaataagtgatttgtttttaaaaattaaagtacttgtgactgcaga

SEQ ID NO: 6621 - protein, 66 aa, Homo sapiens
MSKLSFRARALDASKPLPVFRCEDLPDLHEYASINRAVPQMPTGMEKEEESEMSRVQRVCPDDLLF

SEQ ID NO: 6622 - DNA, 909 bp, Homo sapiens
gcgtgcccgcgccgctgcgcgatgcagtgtggggaatggctggggttggctgaagagcgcacagtggagttttaatgtccgccatgttggccatggcgtattgaagagagcgagcgagagaggagcggagcggcacagcctcccaccctcccggctggtgttagtgcccggacggcgggctctgcgctccgcccctcaagtccccggcagcggttggcgagtggggaccgaacccccggttctccatgatcccgctggccggggccgtttccccagagcggagaggtatctgctgcgcctgagatgagtaaactgtcgtttcgggcgcgggcgctagacgcctcgaagccgctgccggttttccgctgtgaggatctgcccgacctgcacgaatacgcctcgataaacagggccgtgccgcagatgcccaccggaatggagaaggaagaggagtcggtacagccatttaaacagggtgcagtgtattgacagttcaaggaagtccaggagtcgcgtggatttgtgtgctacaattttgttgtggaaaattgtactgtaatacttctcttggtactgtaagaatttttaatgtagaaattatgctctgtaatgttgtttttggaaataaaactgtttaaactctttgggttgtttaaccttttaaagtgaaatagctgtgacagtgaaatgttacttttgagagtagtgtcttaaatctaactttacagataagccaagtgtatgtagtagctcagattgtctagttgggcactgactttcagcacattgtctcatgagacactacctcttaatttattttacttgtatcaactttagagtagcatggccatttgtttattttttaataagtgatttgtttttaaaaattaaagtacttgtgactgcaga

SEQ ID NO: 6623 - protein, 61 aa, Homo sapiens
MSKLSFRARALDASKPLPVFRCEDLPDLHEYASINRAVPQMPTGMEKEEESVQPFKQGAVY

SEQ ID NO: 6624 - DNA, 297 bp, Homo sapiens
ctgggcgctcggacaccgggcgccggctcttgggtcgtgctctcctgcagcgcacacgctcactttctcacgctcgctccctcccggcgccgctttctgacgggcgaacaagtttatatttaccatgatgtttatttgatgacaccgtgaacaaaatgtgcaaaatgaggccctaccatgttttaaaaaatgttttcatcaaatggatctcagagggacatgcccaaaactcctgctaccagagtgatcctctcttcatctcttttctctagccaataaatcaaagtttcatttctc

SEQ ID NO: 6625 - protein, 38 aa, Homo sapiens
MCKMRPYHVLKNVFIKWISEGHAQNSCYQSDPLFISFL

SEQ ID NO: 6626 - DNA, 947 bp, Homo sapiens
agacagagtctcactctgttgccaggctggaatgtaatggcatgatctccactcactgcaacctccacctcccggattcatgagattctcctgcttgagcctaggaggttgaggctgtagtggactgtgatcgcgtcactgcactccagcctggggaacggagtaaaaaaaaaaaaaaaagcgggggcggggggggaagaaagtgggtttaaattttcacggtttaaggcacagaaccaatgtctgctgttctttgaataatgatagtgccaagtctacacaaatgaaggttagctgcttcatcatctgtctgagtagatgacaagcacctaggatttaaatatcagtatttctttccagatattagtttagcattttcaaaaactaggctccataaaatactgatgttctgaaatgagagttatgtaaagaattctgtataaaactggtaagttagggaaatactgcttattaaatcttcctctttaagataggtagaggctcaccatgtataggctcagggaagtcctgcagaaaagaaacccatttactgatgcttagcacagtattttccaaagttctctgaccatagaacccctttctgtacactgttaattattacctttagctctataagcgcacactttaggaaatttcattctaggcaattcaaggaaatagaagtttttccaatcaagttatccatctaattactcaagtctgccaaataaactttgaaaaggcataaagatcttataaatttaaaatattatccttatcactgtcttaaaatgtttcatcctgctaaaaattgtgtaatataagacatttaaatataaaattggatgaaattctggcaggtactagaattgagcagattgctacactttgatagtatatatggtttaataacaaattaacgagaaatgtttagctacatttctttc

SEQ ID NO: 6627 - protein, 51 aa, Homo sapiens
CLAQYFPKFSDHRTPFCTLLIITFSSISAHFRKFHSRQFKEIEVFPIKLSI

SEQ ID NO: 6628 - DNA, 3075 bp, Homo sapiens
cagggtatagatgctggggtggggcaggagccagcgcccccaccggaatttgtggccacttcgcctttggctttgcctcctgccatgccccgcaggcccggagaatgtggccccagactgaaatgagaagaaggtggccccgccgagggttgtctcaactgttggagtgatcagacccaacaccaggccatgggggctactaagtctggcggagtcaaaggaacgagaaaagacaagttaaaagagaaagtgggaccatgcagccaatgctagtgtggaggctgcaaaggccctgagctctgggatcccacactatttattgatgatcaaacaaagaaacaggcagtgaagatgtgggggttgaaaggaagcggtgtatcaagtgaatgagctacagctgtgacggtttagcattttctttgaaacatacggctacttgagataaagggagtgctagaagcaaggagccagcaagtctagacacattccaaagaccacgaggggttttaatcctagaccctggacgtgttccaagccctgcctcagcttctctcccaacactcagcttttctcccaacactcaacattggccattgagagccccttcagctggttgcagtgtttgataagcaagatctacatcatggaggtgatgacatcagtgccagctccatgcatacccagagcccggagagatttactagtgctagtgagcttggcaccaacaatgtctcagcctttcagtctgatcaagcagcaagtgaaattgaggtcacatcttcagtacttcatgcaaggtatctactgagcattttactcaacaatacagttcatgttcgacaatattccttgatgacagcatagccagccagcctcatcttacaatgacactaaaatctgtgaccttggcactatattatcatatcaagcaaagcgaaaagaggttttggaggaatattttaagtatgatcctgaacacaaattgatcttcagatttgttcgtactctgtttaaagccatgaggctaacagctgagtttgcaatcgtaagtttgatttacatagaaagacttgtaagttatgctgatatcgacatttgtccaactaactggaagaggattgtcttgggagccattcttcttgcctccaaggtttggagtgatatggctgtgtggaatgaggactactgcaagctctttaagaacattacagttgaagaaatgaatgagttggaaaggcaattcttgaagctaattaattataataacagcattactaacagtgtttatagcagattctacttcgatcttcgcaccttggcacacaacaacggcctgtattcaccagtttatcttcttgacagagaaagagcttggaagctggaggctttttcaaggatggaacaagacaaagttttctacagtgctgccaagaatgggtctctgagtgcagatgatttaattcatcttcagcgtgctaaggccatcctcttctgaaggaagaaatgaggagtaatttaacatctgaacccctcatcaaaaaagacaggaaaatatcacctctcctgctaaagaactagaaaagttggtattttctaaagaagaaacacctcaattcaagttaactcaaggacaactaagattgcacttcgtagtaaagaatgggaccttgtcagggcaacaacacactcttacactcttctgtcctgtttaatgtaaacagagttataaaaaccacttcaaagtgaagactcctgcccacgtacagatatttgcttaatgtgtgggctgatagctgtgaactatgtaaggcttttaaaacaatagtttaactttttagattttaaagataacttttctgtttcttttatgtttttttcttttccccaatattcctgcatatgcatttggaatcagtgcagtatcactgttaaaacatgggagtctaacaactcctaaagccactaggagcagtcccagcattgtcaggtatggaagggctctttcttcctacttttaccatggaagctacagttactggcgatcatcaagcaaaagctgccaattaacatttgccattcgtatcctttgtaagcccttcttattagcagtttagcatgtttgggggtcataaaaagagaaagtattggttattgattatctacttttatgaagctctatggtgtatttcttatgaactataatggttctcatttgctgataaattttcttattaagtaaatgtattcaaagatgttttcatagtgccaagcagcatggtggtccagtggttatataaaaataataaaatacaaggtgtcctgaaagtttcagggcagtttttagctttaatatagtgtgcctgggccctccagaggactgcagcatatgtatacatgctgtaaatctttacaaaatatcatttgaaagtgtaattgtatttattttgcagaatttgaatgttaaacttttaaccttttgtttcagtcaatatctgctatcttcaagaaggactgaaacaataaattaaaagcttaatactcaggagctagtggcaaaactaaataaacgtaaaagaaatacaacaagcttttcaatgatttgtaaatgtttgtagcattgttacttctacaagtatcaaagcttaaaatttcactaagacttttggaattcttgtgtttttataaagtgcccttttctcttgtaaagtagctctttgcaaggcttttatctgcattgatcacctcagattattttccctagatgtgataaagaggaggatccatgttaattcatatgtaacaaattagaaggaattggaccctaatagtagtaggtgatgcaatacattttattatcccacatgttagcctggatgcaggtatcatatttcatgtcctgctatttaaaaagaacttccataaaccttaggaatcctacctcctgaaaaagtatcatttatggaatgcagagcttagagattggagtattgattgcagttttattttcaaaataaatgctacaattgatgtggttttcatttctcatgtttatattaaaagaaaacctagtaaact

SEQ ID NO: 6629 - protein, 158 aa, Homo sapiens
MRLTAEFAIVSLIYIERLVSYADIDICPTNWKRIVLGAILLASKVWSDMAVWNEDYCKLFKNITVEEMNELERQFLKLINYNNSITNSVYSRFYFDLRTLAHNNGLYSPVYLLDRERAWKLEAFSRMEQDKVFYSAAKNGSLSADDLIHLQRAKAILF

SEQ ID NO: 6630 - DNA, 873 bp, Homo sapiens
cagggtatagatgctggggtggggcaggagccagcgcccccaccggaatttgtggccacttcgcctttggctttgcctcctgccatgccccgcaggcccggagaatgtggccccagactgaaatgagaagaaggtggccccgccgagggttgtctcaactgttggagtgatcagacccaacaccaggccatgggggctactaagtctggcggagtcaaaggaacgagaaaagacaagttaaaagagaaagtgggaccatgcagccaatgctagtgtggaggctgcaaaggccctgagctctgggatcccacactatttattgatgatcaaacaaagaaacaggcagtgaagatgtgggggttgaaaggaagcggtgtatcaagtgaatgagctacagctgtgacggtttagcattttctttgaaacatacggctacttgagataaagggagtgctagaagcaaggagccagcaagtctagacacattccaaagaccacgaggggttttaatcctagaccctggacgtgttccaagccctgcctcagcttctctcccaacactcagcttttctcccaacactcaacattggccattgagagccccttcagctggttgcagtgtttgataagcaagatctacatcatggaggtgatgacatcagtgccagctccatgcatacccagagcccggagagatttactagtgctagtgagcttggcaccaacaatgtctcagcctttcagtctgatcaagcagcaagtgaaattgaggtcacatcttcagtacttcatgcaaatatacctttggagcccaacccttctgaccatccaaaggcaagcacaatattcctgagaaaatctcaaacagatggt

SEQ ID NO: 6631 - protein, 69 aa, Homo sapiens
MEVMTSVPAPCIPRARRDLLVLVSLAPTMSQPFSLIKQQVKLRSHLQYFMQIYLWSPTLLTIQRQAQYS

SEQ ID NO: 6632 - DNA, 1161 bp, Homo sapiens
attataaatagttgctccgtgggctttccgcatttcaccctgctccaggcagcgtggtctgtatggctccgccctgggcaggaggagaaagaagagggccaggcaccacgtgcctgcactctccctggatgctggaggctgctccgccgtgggcaggaggagaaggaagagaactgggtgccgcctgcctgcactctctccggatgctggaggctggaggcagtgaggcagcaacagcgcgagggcgaggcgactttggagctgcctcatgcagcgacctcgccttccgctgcgcctcctcccagaacccaagaagcctggaacctgtggcgtccagccctgaaaggaggagacggcaacccagccgcgcttttgcctgcactctccctggatgctggaggctggaggcagtgacgcagcaacagcgcgaggcgactttggagcggcctcatatagcgacctcgccttccgctgcgcgtcctcccagagcccaagaagcccggaacctgtggcatccatctctgaaaggagaagacggcaacccagccgaggcactactgggttggggtctccacgaccgagctggtctcatcaagtggcgtccaacaaggggctcaaacccgggttgaggggttgctggagcgacggagaacgtggaactacactggaggacaccagagtactcttaagcaatcccttgtctgcagatgtggatcccgaatcctgcgagaagtagcccaccatgacgaagctgcctttgcttttatcgctttgcaaaaacagaaaaggggacatgctgggaacaggccctaagcctgtcataaacaggccttaaactgaccatgaacaggatttctgcacgaatgtgacgtgctcctgatggctatgacgcccactgctagaagttgttagtttactggagcagggtagggaacacctggcccacccggagcggaaaactgctcaaaccacaaacaacagcatgagtggcctgagccttaacaacatgtttttgctgcagataatcggccagagactgtttctctactcctctctaagtatgctttgtttttcgtaaggaatgcttttagctaatctgtaacctatagaaacaatgcttatcactggcttgctgtcaataaacatgtgggtcaaactctg

SEQ ID NO: 6633 - protein, 188 aa, Homo sapiens
MAPPWAGGERRGPGTTCLHSPWMLEAAPPWAGGEGRELGAACLHSLRMLEAGGSEAATARGRGDFGAASCSDLAFRCASSQNPRSLEPVASSPERRRRQPSRAFACTLPGCWRLEAVTQQQREATLERPHIATSPSAARPPRAQEARNLWHPSLKGEDGNPAEALLGWGLHDRAGLIKWRPTRGSNPG

SEQ ID NO: 6634 - DNA, 2285 bp, Homo sapiens
attataaatagttgctccgtgggctttccgcatttcaccctgctccaggcagcgtggtctgtatggctccgccctgggcaggaggagaaagaagagggccaggcaccacgtgcctgcactctccctggatgctggaggctgctccgccgtgggcaggaggagaaggaagagaactgggtgccgcctgcctgcactctctccggatgctggaggctggaggcagtgaggcagcaacagcgcgagggcgaggcgactttggagctgcctcatgcagcgacctcgccttccgctgcgcctcctcccagaacccaagaagcctggaacctgtggcgtccagccctgaaaggaggagacggcaacccagccgcgcttttgcctgcactctccctggatgctggaggctggaggcagtgacgcagcaacagcgcgaggcgactttggagcggcctcatatagcgacctcgccttccgctgcgcgtcctcccagagcccaagaagcccggaacctgtggcatccatctctgaaaggagaagacggcaacccagccgaggcactactgggttggggtctccacgaccgagctggtctcatcaagtggcgtccaacaaggggctcaaacccgggttgaggggttgctggagcgacggagaacgtggaactacactggaggacaccagagtactcttaagcaatcccttggccaaaaccagcaactgatttggataccatcaagacacctgaaatcttgtcatgagccagatactgaggaagagattttgggaagaacccaaggaccccccagttgcagccatgtcaagactgacaataaggaagacatcagtcccagcaagcaacattcatcgggcacagccacccatgtggggccagatcaagaagttgacacagatggcggaagaaaatctgaagaaagcggatgaccagctacaatgagtaatctaatgtctgcagatgtggatcccgaatcctgcgagaagtagcccaccatgacgaagctgcctttgcttttatcgctttgcaaaaacagaaaaggggacatgctgggaacaggccctaagcctgtcataaacaggccttaaactgaccatgaacaggatttctgcacgaatgtgacgtgctcctgatggctatgacgcccactgctagaagttgttagtttactggagcagggtagggaacacctggcccacccggagcggaaaactgctcaaaccacaaacaacagcatgagtggcctgagccttaacaacatgtttttgctgcagataatcggccagagactgtttctctactcctctctaagtatgctttgtttttcgtaaggaatgcttttagctaatctgtaacctatagaaacaatgcttatcactggcttgctgtcaataaacatgtgggtcaaactctgtttgtggctctcagctctcaaggctgttttccccctgattcccactttgcactttatttctgtgtgtttgtcttcattcctctagcaccactgggttggggtctccttgaccaagctggtctcggcacatatgcatgtatgcccaggtcctgaaatcagccttgtggagcctgtgggtaggaaaagtcaaccctctgtgcatgtaggcctggaacctgaccaatactgtattttcctaccacgtttggtttcaaatgtggaaactgcccatacggacctactgcatttgtttttaaaaatcctctgtaagtggacctgcacagttcaggcccagattgttccaggatcaaccctacagtagaaatcaagtatctttttcattgtctcttgggatctgccttttcaccaataaaatatgagggctgttgggagcaggcccccccaaatctggccataaactgtccccaaaactggccataaacaaaatctctgcagcactataacatgttcataatggccataacgcccaagttggaaggttgtggatttacaggaatgagggcaaggaacacctggcctgcccagggtggaaaaccacttaaaggcattcttaagccacaaacaatagcatgagtgatctgtgccttaagaacatgctcctgctgcagttaactagcccaacatattcctttaattcagtccatcccttcgtttcccataagggatacttttagttaatttaatatctatagaaagaatgctaatgactggtttgctgttaataaatacgtgggtaaatctctgtttggggctctcaactctgaaggctgtgagacccctgatttcccacttgacacctct

SEQ ID NO: 6635 - protein, 188 aa, Homo sapiens; identical to SEQ ID NO: 6633

SEQ ID NO: 6636 - DNA, 1151 bp, Homo sapiens
agttgctccgtgggctttccgcatttcaccctgctccaggcagcgtggtctgtatggctccgccctgggcaggaggagaaagaagagggccaggcaccacgtgcctgcactctccctggatgctggaggctgctccgccgtgggcaggaggagaaggaagagaactgggtgccgcctgcctgcactctctccggatgctggaggctggaggcagtgaggcagcaacagcgcgagggcgaggcgactttggagctgcctcatgcagcgacctcgccttccgctgcgcctcctcccagaacccaagaagcctggaacctgtggcgtccagccctgaaaggaggagacggcaacccagccgcgcgtgagtccgggagtctgggataccggcggcagaggaaggacaggcaggagtctcggcctctcggggagcgacgtgccgggaaaggcaggagggccccagcggtgggggcgggggttgcgcgccggggagggcggcctcaggctgggagcctggcagatcgtctgactctccccgagccccatcccaggccgagccaggacccctctgatgcacaggcgtctcaggagcccgtttctttcttgaatccggggcccagtgcggcttgaacctagcccccgacctcctcctcgccctctcagagtccgctggggtgggcgctgaaggagcccgggtcggagaggagccctccccttctctcctgcgtggaagccctgcagcctccgtttcttttgggactggggtccggggccttctgcctgacccggggtgagaaagggagccctgatcaggacccggtgagagggcgctggagcccgggagcggcaggagccttgagcggcagcccgggaagaggatggggtcaccttctgccccaggtcccccactgccaggatctctgtcaccttctgggggtcctgtcccctggggtcccaccccccgggctgcctgtgggtatctactctccctggatgctggaggctggaggcagtgacgcagcaacagcgcgaggcgactttggagcggcctcatatagcgacctcgccttccgctgcgcgtcctcccagagcccaagaagcccggaacctgtggcatccatctctgaaaggagaagacggcaacccagccgagg

SEQ ID NO: 6637 - protein, 45 aa, Homo sapiens
MGSPSAPGPPLPGSLSPSGGPVPWGPTPRAACGYLLSLDAGGWRQ

SEQ ID NO: 6638 - DNA, 894 bp, Homo sapiens
tttccgcatttcaccctgctccaggcagcgtggtctgtatggctccgccctgggcaggaggagaaagaagagggccaggcaccacgtgcctgcactctccctggatgctggaggctgctccgccgtgggcaggaggagaaggaagagaactgggtgccgcctgcctgcactctctccggatgctggaggctggaggcagtgaggcagcaacagcgcgagggcgaggcgactttggagctgcctcatgcagcgacctcgccttccgctgcgcctcctcccagaacccaagaagcctggaacctgtggcgtccagccctgaaaggaggagacggcaacccagccgcgcttttgcctgcactctccctggatgctggaggctggaggcagtgacgcagcaacagcgcgaggcgactttggagcggcctcatatagcgacctcgccttccgctgcgcgtcctcccagagcccaagaagcccggaacctgtggcatccatctctgaaaggagaagacggcaacccagccgagggtgagtccgggagtctggggtgccggcagcggaggaaggacaagcaggagtctcggcctcccggggagaatttcacaaaattctctgattatcttgttataatactgttacgtaggctgttgttttgattctgatactggtctcttgtgttctttaatcttttttccttaatcagttttgctagtggtttattaactatgttgtttataaaaacaacttttagccttggtttatttgtgttatgtttttttttccatttcattgatgtttgttatctttattattgccttcatcctgtattctttgcacttgatttttctttcttgattcttgagaaaaaagttgaggtgccgggcacgttggctt

SEQ ID NO: 6639 - protein, 205 aa, Homo sapiens
MAPPWAGGERRGPGTTCLHSPWMLEAAPPWAGGEGRELGAACLHSLRMLEAGGSEAATARGRGDFGAASCSDLAFRCASSQNPRSLEPVASSPERRRRQPSRAFACTLPGCWRLEAVTQQQREATLERPHIATSPSAARPPRAQEARNLWHPSLKGEDGNPAEGESGSLGCRQRRKDKQESRPPGENFTKFSDYLVIILLRRLLF

SEQ ID NO: 6640 - DNA, 774 bp, Homo sapiens
ccgcatttcaccctgctccaggcagcgtggtctgtatggctccgccctgggcaggaggagaaagaagagggccaggcaccacgtgcctgcactctccctggatgctggaggctgctccgccgtgggcaggaggagaaggaagagaactgggtgccgcctgcctgcactctctccggatgctggaggctggaggcagtgaggcagcaacagcgcgagggcgaggcgactttggagctgcctcatgcagcgacctcgccttccgctgcgcctcctcccagaacccaagaagcctggaacctgtggcgtccagccctgaaaggaggagacggcaacccagccgcgcgtgagtccgggagtctgggataccggcggcagaggaaggacaggcaggagtctcggcctctcggggagcgacgtgccgggaaaggcagtctccctggatgctggaggctggaggcagtgacgcagcaacagcgcgaggcgactttggagcggcctcatatagcgacctcgccttccgctgcgcgtcctcccagagcccaagaagcccggaacctgtggcatccatctctgaaaggagaagacggcaacccagccgaggtcaaatgtggaaactgcccatacggacctactgcatttgtttttaaaaatcctctgtaagtggacctgcacagttcaggcccagattgttccaggatcaaccctacagtagaaatcaagtatctttttcattgtctcttgggatctgccttttcaccaataaaatatgagggc

SEQ ID NO: 6641 - protein, 68 aa, Homo sapiens
MLEAGGSDAATARGDFGAASYSDLAFRCASSQSPRSPEPVASISERRRRQPSRGQMWKLPIRTYCICF

SEQ ID NO: 6642 - DNA, 720 bp, Homo sapiens
tcatatgtatttcacaaaattctctgattatcttgttataatactgttatgtagagttgttgttttgattctgatactggtcacttgtgttctttcatcttttttccttaatcagttttgcctgcactctccctggatgctggaggctggaggcagtgacgcagcaacagcgcgaggcgactttggagcggcctcatatagcgacctcgccttccgctgcgcgtcctcccagagcccaagaagcccggaacctgtggcatccatctctgaaaggagaagacggcaacccagccgaggcactactgggttggggtctccacgaccgagctggtctcatcaagtggcgtccaacaaggggctcaaacccgggttgaggggttgctggagcgacggagaacgtggaactacactggaggacaccagagtactcttaagcaatcccttggccaaaaccagcaactgatttggataccatcaagacacctgaaatcttgtcatgagccagatactgaggaagagattttgggaagaacccaaggaccccccagttgcagccatgtcaagactgacaataaggaagacatcagtcccagcaagcaacattcatcgggcacagccacccatgtggggccagatcaagaagttgacacagatggcggaagaaaatctgaagaaagcggatgaccagctacaatgagtaatctaatggtagctatgatg

SEQ ID NO: 6643 - protein, 152 aa, Homo sapiens
MYFTKFSDYLVIILLCRVVVLILILVTCVLSSFFLNQFCLHSPWMLEAGGSDAATARGDFGAASYSDLAFRCASSQSPRSPEPVASISERRRRQPSRGTTGLGSPRPSWSHQVASNKGLKPGLRGCWSDGERGTTLEDTRVLLSNPLAKTSN

SEQ ID NO: 6644 - DNA, 393 bp, Homo sapiens
gctggaggcagtgacgcagcaacagcgcgaggcgactttggagcggcctcatatagcgacctcgccttccgctgcgcgtcctcccagagcccaagaagcccggaacctgtggcatccatctctgaaaggagaagacggcaacccagccgagggtgagtccgggagtctggggtgccggcagcggaggaaggacaagcaggagtctcggcctcccggggagaatttcacaaaattctctgattatcttgttataatactgttacgtaggctgttgttttgattctgatactggtctcttgtgttctttaatcttttttccttaatcagttttgctagtggtttattaactatgttgtttataaaaacaacttttagccttgaaaaaaaaaagaa

SEQ ID NO: 6645 - protein, 92 aa, Homo sapiens
LEAVTQQQREATLERPHIATSPSAARPPRAQEARNLWHPSLKGEDGNPAEGESGSLGCRQRRKDKQESRPPGENFTKFSDYLVIILLRRLLF

SEQ ID NO: 6646 - DNA, 2524 bp, Homo sapiens
ttttctccggtacagcctggtgaaggatgcccggaggcctcggcaggaccgtgcggaaacgggccttctgcccaaaagatgctgcttctctccttattctttcccctcagaatctcgctgtctccttccaaccacctgtggtcggcatccccgcgttgtcactgcgacgcagaggcgagcgaggtcgcagcttcatggcctgatgccttcaggaagtattttgaagtcatcgtggctgtggattgggggatttcttgtttccactgacctgtgaggccgcgcacgtggagggaggcaccccgggtcctccggcactgtccggcctcgcctgtgtccctagtagcagtgggcatttccagacggtgcagcttgtggctaaagtgacaggaagatgtaggagctttcagtcttggatgaggattcgaactgaagggcttaggcccagctgtcttggagcaaaacatctgttgtgggatgtggcggcagaggagggcaaggccgaaggagcagacagcaccgcttcttggggagttgtgaaggcatcatgcggagggccgagcttagcagccaagtggaggacagcaccctccatgcctggattcgttactcgctcgttctcgatgttgagctgctggcatattgcagcacaactagagatgtacggatgcccccatcttgatcttacagaatcagaggtgcagccgcaagaaagctacaccctctcggttttctctgctctgccaacactagtggaatatgatcacatcccagggatcagtgtcatttagggatgtgactatgggcttcactcaagaggagtggcatcatctggaccctgctcagaggaccctgtagaggaatgtgatgctggagaactacagccaccttgtctcagtagggtattgcattcctaaaccagaagtgatcctcaaattggagacaggcaaggagccatggatattagaggaaaaatttcgaagccagagtcatctgggtgagttagtgccagatggaatttaaagaattaattaataccagtagaaactattcaagaatgaagttcaatgagtttaacaaaggtggaaaatgtttctgtgatgaaagcatgaaataattcattttgaagaggaaccttctgaatataataacaatgggaacagcttctggctgaatgaagacctcatttggcatcagaagattaaaaattgggagcaaccttttgaatacaatgaatgtgggaaagctttccctgagaattcactcttccttgtacataagagagcttacacaggacagaaaacatgcaaatatactgaacatgggaaaacctgttatatgtcattttttattactcatcagcaaacacatccaagagagaaccactatgaatgtaatgaatgtggagaaagtatctttgaggaatccattctctttgaacatcagaatgtttacccattcagccagaatttaaatcccactctaattcagagaacccactcaattagcaatattattgaatataatgaatgtggaacctttttcagtgaaaaattagcccttcatttacaacagagaacacatccaggggaaaaaccttatgaatgtcatgaatgtggaaaaaccttcacccagaagtcagcccacacaagacatcagagaacacacacagggaaaaccctatgaatgtcacggatgtgggaagaccttctataagaattcagacctcattagaaatcaaagaattcacacaggggagagaccttacagatgtcatgaatggagaaatccttcagtgaaaagtcatcccttactcaaaatcagagaacacacgtggggagaaatcatgaatgtcatgaatgtgggaaaacctcgtttaagtcagttctaactgtgcatcagaaaacacacaggggagaagccctatgaatgctatgcatgtggcaacacctttctcagaaaatccgacctcattaaacatcagagaattcacacaggagaaaaaccttatgaatgtaatgaatgtgggaagtcattctccgagaagtcaacccttactaaacatctaagaacacacagatgggaaatcttatgcatgtattcaatgtggaaaatttttctgctgctactacagtttcacagaacatctgagaagacacacaggggagaaaccttttggatgtaatgaatgtgggaaaaccttccatcagaagttggccctaattgttcaccagagaactcatataagacagaaaccctatggatgtaatgaatgtggaaaatcattctgtgtgaagtcaaaactcattgcacatcatagaacatacacaggggagaaaccctatgaatgtaatgtttgtggaaaattattattaagtcaaaactaactgtacatcacagaacacacttgaggtgaaaccctataaatgtagtaagtgagggaaattactctgggtgaagtcagaactttgtagagcagagaacataaagggtgagagaaatctgttaatataatgataatgagaac

SEQ ID NO: 6647 - protein, 124 aa, Homo sapiens
MRIRTEGLRPSCLGAKHLLWDVAAEEGKAEGADSTASWGVVKASCGGPSLAAKWRTAPSMPGFVTRSFSMLSCWHIAAQLEMYGCPHLDLTESEVQPQESYTLSVFSALPTLVEYDHIPGISVI

SEQ ID NO: 6648 - DNA, 2944 bp, Homo sapiens
gcatgtgcgcggtgtggctccaggtttgtttttctccggtacagcctggtagggagggctcccggcatctccctgcttcggggcagaggatgccgggggtagagtacgggagggctggagcgagggtggactggaggtgccgcttgtcctggaggtgggagagagggagcggctttgccgcctggcctgcgtcctaatcctgtcctggttcttctgctcccgaagggaacgtaggtcccgcgcctgtgataagtaaggttggattttctcttccctgaggtgaaggatgcccggaggcctcggcaggaccgtgcggaaacgggccttctgcccaaaagatgctgcttctctccttattctttcccctcagaatctcgctgtctccttccaaccacctgtggtcggcatccccgcgttgtcactgcgacgcagaggcgagcgaggtggcgggaagcacccgcggggcggggagggaccctgcgggcgcggactccacaccaagcctctgctcagcgtcaccccgcttgctgtgtcctcgcaggtcgcagcttcatggcctgatgccttcaggaagtattttgaagtcatcgtggctgtggattgggggatttcttgtttccactgacctgtgaggccgcgcacgtggagggaggcaccccgggtcctccggcactgtccggcctcgcctgtgtccctagtagcagtgggcatttccagacggtgcagcttgtggctaaagtgacaggaagatgtaggagctttcagtcttggatgaggattcgaactgaagggcttaggcccagctgtcttggagcaaaacatctgttgtggggtgagaagggaaaggaggggtgagggtgcaggggccctcctaggaggacatcggacctgttgggccgagacctcattagagatctagagcacggatgggaggagcagaggctcgatttgtgtcctgttcagactcccacaggctgggtgatggtgggagatttgtgcccattcagatgtggcggcagaggagggcaaggccgaaggagcagacagcaccgcttcttggggagttgtgaaggcatcatgcggagggccgagcttagcagccaagtggaggacagcaccctccatgcctggattcgttactcgctcgttctcgatgttgagctgctggcatattgcagcacaactagagatgtacggatgcccccatcttgatcttacagaatcagaggtgcagccgcaagaaaggtctgtaagttatctatttcggctttatttaaaagatgggatggggtggggtggacaggaaacaagcttaacatgttaagtgactgttgacattgacacattttgttgtggcagagtcaagaacagacactgagtcgcttgaggactcaggcaggtgtttgctgcattgacaacagagtaagaaaaaatccgtttgctttttaaaatccaaagatggttttgagaacctgaaaccaagttagagcaagttcgttttccttccaaaaaaactgggctctgccgggcgcagtggctcacgcctgtaatcacagcactttgggaggctgaggccggcagatcacgaggtcaggagttcgagaccagcctgaccaacatggtgaaaccccgtctttactaaaaatacaaaaaattagcccgacgtggtggtgcgcacctgtagtcccagctacttgggaggctgaggcaggagaatcacctgaacccaggaggcagaggttacagtgagccaagactgtgccattgcactccagcctgggtgacagggcaggactctgtctcaaaaaagcaaacaaaaaaaaactgggctgaaaaataccacatcacttttttcaaaaccttgttgggattctctggtttataataaagattaaaacctgaatatttttgtttagcatcagttttaatgaaagtattatgttccattctttggcttttcctaacttgcttaattagtttaatatattggtttgcatactctgttagagtacagcataagttgtttataagtcagtagaaaaccaaacgttttcacatttgaaaactaatgtgtccaagcagtacataaccatgccagagtcatgcatggacgtgtgagtatctcccttttagagatgttttgccagctgggaggtggacatttttaggcaagtgacatttctcatgttcttttcttgtttgtaagctacaccctctcggttttctctgctctgccaacactagtggaatatgatcacatcccagagtttcactctttttgcccaggctggagtacagtggtgcgatcttggctcactgcaacatctgcctcctggattttcaagtgattctcctgtcttagcctcctgagtagctgggattacagggatcagtgtcatttagggatgtgactatgggcttcactcaagaggagtggcatcatctggaccctgctcagaggaccctgtagaggaatgtgatgctggagaactacagccaccttgtctcagtagggtattgcattcctaaaccagaagtgatcctcaaattggagacaggcaaggagccatggatattagaggaaaaatttcgaagccagagtcatctgggtgagttagtgccagatggaatttaaagaattaattaataccagtagaaactattcaagaatgaagttcaatgagtttaacaaaggtggaaaatgtttctgtgatgaaagcatgaaataattcattttgaagaggaaccttctgaatataataacaatgggaacagcttctggctgaatgaagacctcatttggcatcagaagattaaaaattgggagcaaccttttgaatacaatgaatgtgggaaagctttccctgagaattcactcttccttgtacataagagagcttacacaggacagaaaacatgcaaatatactgaacatgggaaaacc

SEQ ID NO: 6649 - protein, 51 aa, Homo sapiens [sequence omitted]

SEQ ID NO: 6650 - DNA, 1067 bp, Homo sapiens
gcatgtgcgcggtgtggctccaggtttgtttttctccggtacagcctggtagggagggctcccggcatctccctgcttcggggcagaggatgccgggggtagagtacgggagggctggagcgagggtggactggaggtgccgcttgtcctggaggtgggagagagggagcggctttgccgcctggcctgcgtcctaatcctgtcctggttcttctgctcccgaagggaacgtaggtcccgcgcctgtgataagtaaggttggattttctcttccctgaggtgaaggatgcccggaggcctcggcaggaccgtgcggaaacgggccttctgcccaaaagatgctgcttctctccttattctttcccctcagaatctcgctgtctccttccaaccacctgtggtcggcatccccgcgttgtcactgcgacgcagaggcgagcgaggtggcgggaagcacccgcggggcggggagggaccctgcgggcgcggactccacaccaagcctctgctcagcgtcaccccgcttgctgtgtcctcgcaggtcgcagcttcatggcctgatgccttcaggaagtattttgaagtcatcgtggctgtggattgggggatttcttgtttccactgacctgtgaggccgcgcacgtggagggaggcaccccgggtcctccggcactgtccggcctcgcctgtgtccctagtagcagtgggcatttccagacggtgcagcttgtggctaaagtgacaggaagatgtaggagctttcagtcttggatgaggattcgaactgaagggcttaggcccagctgtcttggagcaaaacatctgttgtgggatgtggcggcagaggagggcaaggccgaaggagcagacagcaccgcttcttggggagttgtgaaggcatcatgcggagggccgagcttagcagccaagtggaggacagcaccctccatgcctggattcgttactcgctcgttctcgatgttgagctgctggcatattgcagcacaactagagatgtacggatgcccccatcttgatcttacagaatcagaggtgcagccgcaaga

SEQ ID NO: 6651 - protein, 97 aa, Homo sapiens
MRIRTEGLRPSCLGAKHLLWDVAAEEGKAEGADSTASWGVVKASCGGPSLAAKWRTAPSMPGFVTRSFSMLSCWHIAAQLEMYGCPHLDLTESEVQP

SEQ ID NO: 6652 - DNA, 776 bp, Homo sapiens
gctttctgcgcatgtgcgcggtgtggctccagggaacgtaggtcccgcgcctgtgataagtaaggttggattttctcttccctgaggtgaaggatgcccggaggcctcggcaggaccgtgcggaaacgggccttctgcccaaaagatgctgcttctctccttattctttcccctcagaatctcgctgtctccttccaaccacctgtggtcggcatccccgcgttgtcactgcgacgcagaggcgagcgaggtcgcagcttcatggcctgatgccttcaggaagtattttgaagtcatcgtggctgtggattgggggatttcttgtttccactgacctgtgaggccgcgcacgtggagggaggcaccccgggtcctccggcactgtccggcctcgcctgtgtccctagtagcagtgggcatttccagacggtgcagcttgtggctaaagtgacaggaagatgtaggagctttcagtcttggatgaggattcgaactgaagggcttaggcccagctgtcttggagcaaaacatctgttgtgggatgtggcggcagaggagggcaaggccgaaggagcagacagcaccgcttcttggggagttgtgaaggcatcatgcggagggccgagcttagcagccaagtggaggacagcaccctccatgcctggattcgttactcgctcgttctcgatgttgagctgctggcatattgcagcacaactagagatgtacggatgcccccatcttgatcttacagaatcagaggtgcagccgcaaga

SEQ ID NO: 6653 - protein, 97 aa, Homo sapiens; identical to SEQ ID NO: 6651

SEQ ID NO: 6654 - DNA, 762 bp, Homo sapiens
agtgtgcactttttggccccggtcgcgggagccgctttgggctttctgcgcatgtgcgcggtgtggctccaggtgaaggatgcccggaggcctcggcaggaccgtgcggaaacgggccttctgcccaaaagatgctgcttctctccttattctttcccctcagaatctcgctgtctccttccaaccacctgtggtcggcatccccgcgttgtcactgcgacgcagaggcgagcgaggtcgcagcttcatggcctgatgccttcaggaagtattttgaagtcatcgtggctgtggattgggggatttcttgtttccactgacctgtgaggccgcgcacgtggagggaggcaccccgggtcctccggcactgtccggcctcgcctgtgtccctagtagcagtgggcatttccagacggtgcagcttgtggctaaagtgacaggaagatgtaggagctttcagtcttggatgaggattcgaactgaagggcttaggcccagctgtcttggagcaaaacatctgttgtgggatgtggcggcagaggagggcaaggccgaaggagcagacagcaccgcttcttggggagttgtgaaggcatcatgcggagggccgagcttagcagccaagtggaggacagcaccctccatgcctggattcgttactcgctcgttctcgatgttgagctgctggcatattgcagcacaactagagatgtacggatgcccccatcttgatcttacagaatcagaggtgcagccgcaaga

SEQ ID NO: 6655 - protein, 97 aa, Homo sapiens; identical to SEQ ID NO: 6651

SEQ ID NO: 6656 - DNA, 606 bp, Homo sapiens; identical to SEQ ID NO: 907

SEQ ID NO: 6657 - protein, 100 aa, Homo sapiens
MCAVWLQVKDARRPRQDRAETGLLPKRCCFSPYSFPSESRCLLPTTCGRHPRVVTATQRRARWREAPAGRGGTLRARTPHQASAQRHPACCVLAGRSFMA

SEQ ID NO: 6658 - DNA, 667 bp, Homo sapiens; identical to SEQ ID NO: 909

SEQ ID NO: 6659 - protein, 112 aa, Homo sapiens [sequence omitted]

SEQ ID NO: 6660 - DNA, 288 bp, Homo sapiens
atggaggtggtgctgatctttctatgcagcctgttggcccacattgtcctggccgatgcagttgagagggagaagcaaattgacccttttcattatgactaccagaccctgaggattagggggttggtatgtgctgtggtcctcttctccattgggatcctccttatcctaggttgcagatgcaagtgcagtttcaatcagaagcccaggaccccaggagaggaggaagcccaggtggagaacctcatcactgcaaatgcaacaaagctccagaaagcagagagctga

SEQ ID NO: 6661 - protein, 95 aa, Homo sapiens [sequence omitted]

SEQ ID NO: 6662 - DNA, 722 bp, Homo sapiens
ctgaccctcaagcaatattaaaataattgtagctcaacaccagatactgactaacctccaacccctgttccacaaaccataactgcagctttgattggacaagagactgatttcatagtatgtgaatggttgcaggccccttgctggtctgtgagaagtctaatttcaagtacaacaagaaatgaagccagcatctaatggagaagtaatgtcgcctacactaacatacgatacaaatattgataaaactgttgccctcctaccaaatgggaaattaattactggatacatacagctatgaaaaaactggacatcaagattgtccatctctacctctgtgccaaactctagactttcattaataagaatgtatcaatattatttcagtcattgtaacatttaccacactcatgtaagatgtgattacaaaaaggatgctgaggtgggggaagggtgtatgagaactttctgtactacttcatcagtttttatgttaattcaaaacagtttcatataatgtccattaatttaaaaaatatggcagcattgttcaggaagtgtttcattttagttaatgtttaacaagcagctaaatatctaaatactacattgagatattctatgctattaaaactgaaacaattttgaagttgtaaatgtatcttctgtagttgtagcactagtgattgacttaataaacttaaatttgcacacatgaaata

SEQ ID NO: 6663 - protein, 49 aa, Homo sapiens
MYQYYFSHCNIYHTHVRCDYKKDAEVGEGCMRTFCTTSSVFMLIQNSFI

SEQ ID NO: 6664 - DNA, 1780 bp, Homo sapiens
aagtcctgcaggaagtaaaaaaatggagttacaaagcaaacataatgaccctggcttttatatttgtctatatagttaactttattggaagtctttattttttcctccagatttgagtctagtttctttttatttcatcttgaaagacaccttttagtgttccctgtatagcaggcctagtagtaacaaactcagcatttgtttatctgggattatcttcatttctctttcattttgaaggacagttttaccagctagagaattctcagatgatagtgtttttctttcaggaatttatatatgtcatccatctgtcttcaggccttcaattgatttctgcggagatatgagctcctgatattaatgagggtctcttgtaaagtaaaaatgccacaaaactttcccaccatttgaagtcgcctttttcctgatttagcattcacttggttactgtaaacctttaattattttccagagttctaacaaggttggtttttatagttctttttttttttttggtgtttctgtgtggggacagttgggagctgtgtactccaccatttgattatgtcactcaacactgttaagtgaatggaccagttgtccattcgagaacaacaacaaaatgagatatgcaaagaaacaggaaaaatgtgacccatgcacaggactatcaataggcaacacaataataactgccattttagttggcagaaactgggttgtctggtgcagatcaatgtatattgtgtaatttgaggaagagccagtaaaataatgaaaaatgaacaaaaccttgggaaacggatatcattaggtgcaccagcatacacaaacgggagtatcaatatgagagaatagaaagggaaagaaaaattttttgaagaattcgcagaaacgcccataatttgttgaagaaaactaatatattcatccaagaagctcagcaaactcataggaggataaatgcaaagagacttatacccagacacgtcataatgaaagatgtttttatcatgctcttatttgacctgccttataaaagtgataatacaagtgctggtgaagatttagagaaactgaattattcatacatttttgatggctcctcttggctatggtggtttcccagactttccttgttttggatgaccttgacagtttggaggaatcctggtgagaagtctggacagctgatcacctgaaagagaggagccaagaaaatcaatctaaacatttgtgggaagttgtattcatcaataatgaaatgctgactaaggaacaagatgtcatcagcctcaggagagagtggtatgtaccttgaaataactcaccgagacacaaacttgctgacttcttgtcctccatctcagagaagatatggaagatatgaaggatggagaaaaagaggaagaggaaatgtgatggtggagtgggtaacataaaaaagggaaggcaaataagtgtatgtgttttcagcggcttctcactttcttttggcccatcaaggaaaccaacacatccgaggagagtgctgataggctgctcttagccgggaccacacttgtgctttgaaaacaacccccaaaatccctgcaggcaattgaaggatgtcccgagaacatcctcccagggagcagatacccattctgtagaagctctaagcctgctgggctaagccctccataggccactttaatgaggaggagaggctgtaggtggtggtaggaccaccatgttgcatgacttttctgtgtgccccgtcttttgactctgtctc

SEQ ID NO: 6665 - protein, 68 aa, Homo sapiens
MKDVFIMLLFDLPYKSDNTSAGEDLEKLNYSYIFDGSSWLWWFPRLSLFWMTLTVWRNPGEKSGQLIT

SEQ ID NO: 6666 - DNA, 786 bp, Homo sapiens
gtttgtctcacgttttgcgtgggaggcggtcccgggatttcaggggtctaccggctctcttatggcgaatgcaacccgaagagagagtgagggtattgtgctcacaaaccagaggtgatcttcaggctggaacaaggagaagaaccatggagactggaggaagaattcccaagccagagctttccagaagtctggacagctgatcacctgaaagagaggagccaagaaaatcaatctaaacatttgtgggaagttgtattcatcaataatgaaatgctgactaaggaacaagatgtcatcagcctcaggagagagtggtatgtaccttgaaataactcaccgagacacaaacttgctgacttcttgtcctccatctcagagaagatatggaagatatgaaggatggagaaaaagaggaagaggaaatgtgatggtggagtgggtaacataaaaaagggaaggcaaataagtgtatgtgttttcagcggcttctcactttcttttggcccatcaaggaaaccaacacatccgaggagagtgctgataggctgctcttagccgggaccacacttgtgctttgaaaacaacccccaaaatccctgcaggcaattgaaggatgtcccgagaacatcctcccagggagcagatacccattctgtagaagctctaagcctgctgggctaagccctccataggccactttaatgaggaggagaggctgtaggtggtggtaggaccaccatgttgcatgacttttctgtgtgccccgtcttttgactctgtctc

SEQ ID NO: 6667 - protein, 52 aa, Homo sapiens
MSSASGESGMYLEITHRDTNLLTSCPPSQRRYGRYEGWRKRGRGNVMVEWVT

SEQ ID NO: 6668 - DNA, 1952 bp, Homo sapiens
gtttgtctcacgttttgcgtgggaggcggtcccgggatttcaggggtctaccggctctcttatggcgaatgcaacccgaagagagagtgagctgtatcttcagagttgtctccgtctttccaagaacagaacaaaatgaacaagggtattgtgctcacaaaccagaggtgatcttcaggctggaacaaggagaagaaccatggagactggaggaagaattcccaagccagagctttccaggctcctcttggctatggtggtttcccagactttccttgttttggatgaccttgacagtttggaggaatcctggtgagaagtctggacagctgatcacctgaaagagaggagccaagaaaatcaatctaaacatttgtgggaagttgtattcatcaataatgaaatgctgactaaggaacaaggcccctgaggtgttcatgcactgatcctggaccttggattaaacccttgcagtgctggaagaagaggactctgcactgcctgccacaccaggactggaagatcaatggccttcccttcttccaaactaccttcccatgaggtggggatggtggtcacatctccaacactggcgtgctgtggaagagacatcagcattctctgcaacaaatttggaaacagcctaaagagacgtttctacttcaaagagatgcactgaggaagtgcactggcactgctggggactcacctggggcccagggctgaggcttctcgtgtccttggagctgctgtcctcccgaggagcgtccacactgcagccagctcagcctcaggtgtcctatctggttttgaaaccaaatctaagtgggaaaagaagattcaagttttatccgatttagtctacataattttaagtatctatttgagctcaacaccaagaatcacttccttctctgtcccatctgtggtctccaaaggaaaggtccctgggttaggagacactggctagcatcctaaagccagagctggccgatgggtgtgtgtccactcttccttcacctcttccccaccctacagttgtttttgtctcatgctcacttgctctttctgcctccctctcactctttaggtctcacaaaggctttggtcaaggactgactgactttccttggctctctgtcatctccccataatcaaaggcatttcataacacacaatccatgtgaagggacctctgatcaaaattcacttaaagaggagctcactaattaccagtacttactgctgagcctggaatcattcgtatataccccagagttcattcattccagacacagtactagataaggagactcctatgagccaaaaacctaactctgaatagactgtgactgtcataatcaaaccctgtggctgcctccttcttactggagggcatagaggaatgcagatttttgtttgtttgttttgagacagagtgtcgctgcaatgcccaggctgaagtacaatggtgcggtctcggctcactgcaacctctgcctcccgggttcaagcaattctcctgccttagcctcctgagtagctgggattacaggcatgcaccatcatgccctggctaatttttgtattttgtgtagagacggggtttcaccatgttggccaggctggtcttgaactcctgaccttgggtgatccacctgcctcggcctcctaaagtgctgagattacaggcgtgagccaccatgctcagccaggaatgtgcttttaatcatttcttagtgtttcatgtggggacttgataactcacaataaggattctatcctaaaagacaagcaatacctgttgacctgctcttatgtcccaggcagtttgtaaaactgtttcatctattctctcaatatgtcacttcaaatatgatcaggaaagaagtcttaaacatggctggaaatgtgggggcaacaaatacattagtgaacaccctggcggatcc

SEQ ID NO: 6669 - protein, 90 aa, Homo sapiens
MQPEERVSCIFRVVSVFPRTEQNEQGYCAHKPEVIFRLEQGEEPWRLEEEFPSQSFPGSSWLWWFPRLSLFWMTLTVWRNPGEKSGQLIT

SEQ ID NO: 6670 - DNA, 1286 bp, Homo sapiens
gtttgtctcacgttttgcgtgggaggcggtcccgggatttcaggggtctaccggctctcttatggcgaatgcaacccgaagagagagtgagctgtatcttcagagttgtctccgtctttccaagaacagaacaaaatgaacaagggtattgtgctcacaaaccagaggtgatcttcaggctggaacaaggagaagaaccatggagactggaggaagaattcccaagccagagctttccagaagtctggacagctgatcacctgaaagagaggagccaagaaaatcaatctaaacatttgtgggaagttgtattcatcaataatgaaatgctgactaaggaacaaggcccctgaggtgttcatgcactgatcctggaccttggattaaacccttgcagtgctggaagaagaggactctgcactgcctgccacaccaggactggaagatcaatggccttcccttcttccaaactaccttcccatgaggtggggatggtggtcacatctccaacactggcgtgctgtggaagagacatcagcattctctgcaacaaatttggaaacagcctaaagagacgtttctacttcaaagagatgcactgaggaagtgcactggcactgctggggactcacctggggcccagggctgaggcttctcgtgtccttggagctgctgtcctcccgaggagcgtccacactgcagccagctcagcctcaggtgtcctatctggttttgaaaccaaatctaagtgggaaaagaagattcaagttttatccgatttagtctacataattttaagtatctatttgagctcaacaccaagaatcacttccttctctgtcccatctgtggtctccaaaggaaaggtccctgggttaggagacactggctagcatcctaaagccagagctggccgatgggtgtgtgtccactcttccttcacctcttccccaccctacagttgtttttgtctcatgctcacttgctctttctgcctccctctcactctttaggtctcacaaaggctttggtcaaggactgactgactttccttggctctctgtcatctccccataatcaaaggcatttcataacacacaatccatgtgaagggacctctgatcaaaattcacttaaagaggagctcactaattaccagtacttactgctgagcctggaatcattcgtatataccccagagttcattcattccagacacagtactagataaggagactcctatgagccaaaaacctaactctgaatagactgtgactgtcataatc

SEQ ID NO: 6671 - protein, 94 aa, Homo sapiens
MQPEERVSCIFRVVSVFPRTEQNEQGYCAHKPEVIFRLEQGEEPWRLEEEFPSQSFPEVWTADHLKERSQENQSKHLWEVVFINNEMLTKEQGP

SEQ ID NO: 6672 - DNA, 1483 bp, Homo sapiens
atgcctcatccactggctacctctgcgtttctgcgtttccgcctttccttttgtttgtctcacgttttgcgtgggaggcggtcccgggatttcaggggtctaccggctctcttatggcgaatgcaacccgaagagagagtgagctgtatcttcagagttgtctccgtctttccaagaacagaacaaaatgaacaaggtagatcagaagttccaggggtcagtatcatttaaagatgtgactgtgggcttcacccaggaggagtggcagcacctggaccctagtcagagggctctgtatagagatgtgatgctggagaactacagcaaccttgtctcagtggggtattgtgctcacaaaccagaggtgatcttcaggctggaacaaggagaagaaccatggagactggaggaagaattcccaagccagagctttccagaagtctggacagctgatcacctgaaagagaggagccaagaaaatcaatctaaacatttgtgggaagttgtattcatcaataatgaaatgctgactaaggaacaaggcccctgaggtgttcatgcactgatcctggaccttggattaaacccttgcagtgctggaagaagaggactctgcactgcctgccacaccaggactggaagatcaatggccttcccttcttccaaactaccttcccatgaggtggggatggtggtcacatctccaacactggcgtgctgtggaagagacatcagcattctctgcaacaaatttggaaacagcctaaagagacgtttctacttcaaagagatgcactgaggaagtgcactggcactgctggggactcacctggggcccagggctgaggcttctcgtgtccttggagctgctgtcctcccgaggagcgtccacactgcagccagctcagcctcaggtgtcctatctggttttgaaaccaaatctaagtgggaaaagaagattcaagttttatccgatttagtctacataattttaagtatctatttgagctcaacaccaagaatcacttccttctctgtcccatctgtggtctccaaaggaaaggtccctgggttaggagacactggctagcatcctaaagccagagctggccgatgggtgtgtgtccactcttccttcacctcttccccaccctacagttgtttttgtctcatgctcacttgctctttctgcctccctctcactctttaggtctcacaaaggctttggtcaaggactgactgactttccttggctctctgtcatctccccataatcaaaggcatttcataacacacaatccatgtgaagggacctctgatcaaaattcacttaaagaggagctcactaattaccagtacttactgctgagcctggaatcattcgtatataccccagagttcattcattccagacacagtactagataaggagactcctatgagccaaaaacctaactctgaatagactgtgactgtcataatc

SEQ ID NO: 6673 - protein, 120 aa, Homo sapiens
MNKVDQKFQGSVSFKDVTVGFTQEEWQHLDPSQRALYRDVMLENYSNLVSVGYCAHKPEVIFRLEQGEEPWRLEEEFPSQSFPEVWTADHLKERSQENQSKHLWEVVFINNEMLTKEQGP

SEQ ID NO: 6674 - DNA, 6030 bp, Homo sapiens
atgcctcatccactggctacctctgcgtttctgcgtttccgcctttccttttgtttgtctcacgttttgcgtgggaggcggtcccgggatttcaggggtctaccggctctcttatggcgaatgcaacccgaagagagagtgagctgtatcttcagagttgtctccgtctttccaagaacagaacaaaatgaacaaggtagatcagaagttccaggggtcagtatcatttaaagatgtgactgtgggcttcacccaggaggagtggcagcacctggaccctagtcagagggctctgtatagagatgtgatgctggagaactacagcaaccttgtctcagtggggtattgtgctcacaaaccagaggtgatcttcaggctggaacaaggagaagaaccatggagactggaggaagaattcccaagccagagctttccagaagtctggacagctgatcacctgaaagagaggagccaagaaaatcaatctaaacatttgtgggaagttgtattcatcaataatgaaatgctgactaaggaacaaggtaatgtaataggaataccatttaacatggacgtaagttcttttccttccagaaaaatgttctgtcagtatgactcacgtggaatgagtttcaacactgtttcagaattggttatcagtaagataaactatttaggaaaaaagtctgacgaatttaatgcatgtgggaaattgttactcaatattaagcatgatgaaactcatactcgagagaaaaatgaagttttgaaaaataggaacactctgagtcatcgtgagaacactttgcagcatgagaagattcaaactttagaccacaattttgaatacagtatatgtcaggaaaccctccttgaaaaggcagtattcaatacacggaagagagagaatgcagaagagaataactgtgactataatgaatttgggagaactttctgtgatagttcatccctcttgttccatcagatacctccatcaaaggacagtcactatgaatttagtgattgtgagaagttcttatgtgtgaagtccaccctttctaaacatgatggggtacctgtgaaacactatgattgtggtgaaagtgggaataatttcaggaggaaattgtgtctgtcacagcttcagaaaggtgataaaggagagaaacactttgaatgtaatgaatgtgggaaagctttctgggagaagtcacatctcactcgacatcagagggtgcacacaggagagaaacactttcaatgtaatcaatgtggaaaaactttctgggagaagtcaaacctcactaaacatcagagatcacacacaggggagaaaccttttgaatgcaatgaatgtgggaaagcctttagccataagtcagccctcacattacaccagagaacacatacaggggagaaaccctatcagtgtaatgcatgtgggaaaactttttaccagaaatctgacctcactaaacatcagagaacacacacagggcagaaaccctatgaatgttatgaatgtggaaaatccttctgtatgaattcacaccttacagtacaccagagaactcacacaggtgagaaaccttttgaatgtcttgagtgtgggaaatccttttgtcaaaagtcacatcttacacagcatcagagaactcacataggagataaaccttatgaatgtaatgcatgtgggaaaactttctaccacaagtcagtactcaccaggcatcagataattcatacagggttgaaaccttatgaatgttatgaatgtgggaaaaccttctgcttgaagtcagacctcacaatacatcagagaacgcacacaggggagaaaccctttgcatgtcctgaatgtgggaaattctttagccataagtcaaccctctctcaacattatagaacacacacgggggagaaaccctatgaatgtcatgaatgtggaaaaatcttttacaataaatcatacctaacaaaacataatagaacacatacaggggagaaaccctatgaatgtaatgaatgtggaaaaaccttctgccagaagtcacaactcactcagcatcagagaattcacataggggagaaaccctatgaatgtaatgagtgtggaaaagctttctgccataagtcagctctaattgtacatcagagaacccatacacaagaaaagccttataaatgtaacgaatgtggaaaatctttctgtgtgaagtcaggacttattttacatgagagaaagcacacgggggagaaaccctatgaatgcaatgaatgtgggaaatccttcagtcacaaatcatcactcacagtacatcacagggctcacacaggagagaaatcttgtcagtgtaatgaatgtggaaaaatcttttaccgtaaatcagaccttgctaaacatcagagatcacatacaggggaaaagccctatgaatgtaacacatgcaggaaaaccttctctcaaaagtcaaatctcattgtacatcagagaacacacataggagaaaaaccttatgaatgaattggatattagaaatttccagccacaagtcagcctccataatgcctcagagtcttcacactgtggagaagggcctgttgacatcctgaatgttcaataactatccacaaactcgccttatgttactccaaagtaacagtaggggataaacccatagactacaacaactataggatggcttttgttaggaagtgatattctgttgaatatcagatggttaatactggcataaaacctcacagatttttttgaatttgtgaaagtttttggcaaaactacaaataggattatgttagcatttacactgaggagaaaattgtcaatttaagaaatctaaagtgaaaattttgcttagaaataaaatatgacaagttctgttttgagtttgatgccataatagtttttaaggtatctaacaataatttatagatgtacattgtggaatgtaaagctttaagaattttttaagaagtaataattaaaataacctcacaagaagttgtaatgagtacagagaattcccgtgtacccttcaccaagcttcctctaaggataatatataatcatagtatatggtcaagtccaagaaatcgatgttaccttgctagtagatgcagacttactcagattttgctatggtttgcgtgcactctgtgtgtgtacgtgtatgtgtgtgtgtgtggttataacaaactggtacttttacatttgagtaaccatcaacacaattagtttacagaatggaaaaggagtctgagatctgtactgtttcaggattacaaaggaatcaggatttagcctcaagtagttcccttgttgtattaataaccacaccctttctgcatccctgtccctggcatccacttgactatgaagctttttgtaaagcatagataaattgaataatcagggcaacagcattaagcacatctgtgaattatccctgaagttcataggacttacatatgtacaagtggtatgtgatataaatcgtgtgtttcatatgcataatggtatttaacgtaattgtgaataggaagtaggtatcctaatttagtagtggttacttcatcaggcccatcccaggtgtttgtcgtgtcctgaaacaatttaaatagagacccacagagctaatgtttatccatttaaaagttataaatcaaaataacagattatctgaaaaaaaatctatcctgtacgtgtgaagatctaggcctgcctccatgttactccctttctcttactacctgtggctcatcccatgccatgaactgcctggggtacatatgtgaacactccagccttcagcgtaagtgatagtccaaattttctttaagcagctgctctccaagacagggccctggaaagaggcccacacatacagcccagttgctgcccagggctgttggactgtcatttcattgctcattgtacccagacagggatctgggccttcagagacttttgagaatatgaagaggagggttgaggctggagaagagccagaatcaagctggcatggggcttttattgacagtgtgaagattgtacactacattacatgatcagatcatacaaataatctaagattttacagtctggtgaccctagattacacaagtaatctaagcttccactttggaaaactagaaaaagaagagcaaattaaatccaaagtaacctggaaaaaaattagagtaaaaatcagtgaaattgaaaagagaaaatcaataaaacccaaaactgttctttgaaaaggtgggtaaaattgataaacctctagctagattaagaaaaaacagaagacaaatactgctaataccaaaagtgaaagaggccatcatagctgatcctatggtcaccaaaaggattagaaagaaatatggacaactctgtccataaatttgataacttagctaaaatggatcaattccttgcaagatgcattctctcaaagctcataaaaggtagatctcagtaggcatatatatctattaaataaattgaagcagtaattaataaccttccaagaccaggcgcggtggctaaaaatacaaaaagttagccgggcgtggtggcatgcgtgtatagtccaagctactcaggaggctgaggcagaagaatcacttgaacctgggaggtggaggttgcagtgagccaagattgtgccactgtactccagcctgggtgacagagtgagactccatctcaataaaattaataataataaaaccttccaaaaaaagtgccgggaccaaatggattcactgatgtgcatttttcgagatacttaaggtagaaatgataccaagtctgtactgtctctttcagaaaataaaagcagggataacacttcccaaatcattttgtgaggccaggattaccctaataccaaagccaggcaaaaacattacaagaaaggaaaactacagatcaatatttccagtgaacacagatgcagaaatccttaaaatgttagcaaatcaggaatgcaagccttgttcaacatttgatattcagtgcaatccattgcatgcattagcagttcaaagattaaatatgatcatatcaataggtacagaaaaagcatttgacaaaatccaatatccattcatgataaaacctctcaacacagaaggaatacaggagaacttactcaatttgataaagaactactacaaaaaaccctacatctagcatcatccttgatgtttccaactaaatgctttcctactaagatcaggaacatggcaaggaacaccactgcttttcagcattgtactggaagtgctatctaatgcagtgataccaaaaaaaaaggaaataaaatgcacataaatttggaaggaggaaatacaactgtctttgttctcaaataacatgattgtctttgtagaaaattctaaataacaaaaacctgctgacattaataagcaattatagcagggttgtagaatgtagtcctcaggtatatgataaaaaagaattagacatcaagtcattaaaagacatataggaaccctaaatgcttattgttaagtgaaaaccaatctgaaaaggctttctatgttgtatgattgcaattatatgacattctgggagaggcaaaactatcgagcgagtcaaaggaccagtggttgctgagagttgaggggaaaggagggatggcaggtaggtgatttttaggacagtgaaagtactctgtagggtactgtaatttgtcaaaatgcagagaatggaaaacagtgaacggaaaacacagagtaaaccctagtgtcaactctggacttcagttaataacagtgtaccactattggctcatcaattgtaacaaatgaaccataatgatgcaagatgttaataattggggagcctgtggaggatgggagggttaaaggtttatatgagaattctctgtactttttgctcaatttttctgtaaccctaaagctgctctaaaaaatgaagtgtattaagtaaataaataagtaaataaccaaccaacc

SEQ ID NO: 6675 - protein, 778 aa, Homo sapiens; identical to SEQ ID NO: 912

SEQ ID NO: 6676 - DNA, 6103 bp, Homo sapiens
atgcctcatccactggctacctctgcgtttctgcgtttccgcctttccttttgtttgtctcacgttttgcgtgggaggcggtcccgggatttcaggggtctaccggctctcttatggcgaatgcaacccgaagagagagtgagctgtatcttcagagttgtctccgtctttccaagaacagaacaaaatgaacaaggtagatcagaagttccaggggtcagtatcatttaaagatgtgactgtgggcttcacccaggaggagtggcagcacctggaccctagtcagagggctctgtatagagatgtgatgctggagaactacagcaaccttgtctcagtggggtattgtgctcacaaaccagaggtgatcttcaggctggaacaaggagaagaaccatggagactggaggaagaattcccaagccagagctttccaggctcctcttggctatggtggtttcccagactttccttgttttggatgaccttgacagtttggaggaatcctggtgagaagtctggacagctgatcacctgaaagagaggagccaagaaaatcaatctaaacatttgtgggaagttgtattcatcaataatgaaatgctgactaaggaacaaggtaatgtaataggaataccatttaacatggacgtaagttcttttccttccagaaaaatgttctgtcagtatgactcacgtggaatgagtttcaacactgtttcagaattggttatcagtaagataaactatttaggaaaaaagtctgacgaatttaatgcatgtgggaaattgttactcaatattaagcatgatgaaactcatactcgagagaaaaatgaagttttgaaaaataggaacactctgagtcatcgtgagaacactttgcagcatgagaagattcaaactttagaccacaattttgaatacagtatatgtcaggaaaccctccttgaaaaggcagtattcaatacacggaagagagagaatgcagaagagaataactgtgactataatgaatttgggagaactttctgtgatagttcatccctcttgttccatcagatacctccatcaaaggacagtcactatgaatttagtgattgtgagaagttcttatgtgtgaagtccaccctttctaaacatgatggggtacctgtgaaacactatgattgtggtgaaagtgggaataatttcaggaggaaattgtgtctgtcacagcttcagaaaggtgataaaggagagaaacactttgaatgtaatgaatgtgggaaagctttctgggagaagtcacatctcactcgacatcagagggtgcacacaggagagaaacactttcaatgtaatcaatgtggaaaaactttctgggagaagtcaaacctcactaaacatcagagatcacacacaggggagaaaccttttgaatgcaatgaatgtgggaaagcctttagccataagtcagccctcacattacaccagagaacacatacaggggagaaaccctatcagtgtaatgcatgtgggaaaactttttaccagaaatctgacctcactaaacatcagagaacacacacagggcagaaaccctatgaatgttatgaatgtggaaaatccttctgtatgaattcacaccttacagtacaccagagaactcacacaggtgagaaaccttttgaatgtcttgagtgtgggaaatccttttgtcaaaagtcacatcttacacagcatcagagaactcacataggagataaaccttatgaatgtaatgcatgtgggaaaactttctaccacaagtcagtactcaccaggcatcagataattcatacagggttgaaaccttatgaatgttatgaatgtgggaaaaccttctgcttgaagtcagacctcacaatacatcagagaacgcacacaggggagaaaccctttgcatgtcctgaatgtgggaaattctttagccataagtcaaccctctctcaacattatagaacacacacgggggagaaaccctatgaatgtcatgaatgtggaaaaatcttttacaataaatcatacctaacaaaacataatagaacacatacaggggagaaaccctatgaatgtaatgaatgtggaaaaaccttctgccagaagtcacaactcactcagcatcagagaattcacataggggagaaaccctatgaatgtaatgagtgtggaaaagctttctgccataagtcagctctaattgtacatcagagaacccatacacaagaaaagccttataaatgtaacgaatgtggaaaatctttctgtgtgaagtcaggacttattttacatgagagaaagcacacgggggagaaaccctatgaatgcaatgaatgtgggaaatccttcagtcacaaatcatcactcacagtacatcacagggctcacacaggagagaaatcttgtcagtgtaatgaatgtggaaaaatcttttaccgtaaatcagaccttgctaaacatcagagatcacatacaggggaaaagccctatgaatgtaacacatgcaggaaaaccttctctcaaaagtcaaatctcattgtacatcagagaacacacataggagaaaaaccttatgaatgaattggatattagaaatttccagccacaagtcagcctccataatgcctcagagtcttcacactgtggagaagggcctgttgacatcctgaatgttcaataactatccacaaactcgccttatgttactccaaagtaacagtaggggataaacccatagactacaacaactataggatggcttttgttaggaagtgatattctgttgaatatcagatggttaatactggcataaaacctcacagatttttttgaatttgtgaaagtttttggcaaaactacaaataggattatgttagcatttacactgaggagaaaattgtcaatttaagaaatctaaagtgaaaattttgcttagaaataaaatatgacaagttctgttttgagtttgatgccataatagtttttaaggtatctaacaataatttatagatgtacattgtggaatgtaaagctttaagaattttttaagaagtaataattaaaataacctcacaagaagttgtaatgagtacagagaattcccgtgtacccttcaccaagcttcctctaaggataatatataatcatagtatatggtcaagtccaagaaatcgatgttaccttgctagtagatgcagacttactcagattttgctatggtttgcgtgcactctgtgtgtgtacgtgtatgtgtgtgtgtgtggttataacaaactggtacttttacatttgagtaaccatcaacacaattagtttacagaatggaaaaggagtctgagatctgtactgtttcaggattacaaaggaatcaggatttagcctcaagtagttcccttgttgtattaataaccacaccctttctgcatccctgtccctggcatccacttgactatgaagctttttgtaaagcatagataaattgaataatcagggcaacagcattaagcacatctgtgaattatccctgaagttcataggacttacatatgtacaagtggtatgtgatataaatcgtgtgtttcatatgcataatggtatttaacgtaattgtgaataggaagtaggtatcctaatttagtagtggttacttcatcaggcccatcccaggtgtttgtcgtgtcctgaaacaatttaaatagagacccacagagctaatgtttatccatttaaaagttataaatcaaaataacagattatctgaaaaaaaatctatcctgtacgtgtgaagatctaggcctgcctccatgttactccctttctcttactacctgtggctcatcccatgccatgaactgcctggggtacatatgtgaacactccagccttcagcgtaagtgatagtccaaattttctttaagcagctgctctccaagacagggccctggaaagaggcccacacatacagcccagttgctgcccagggctgttggactgtcatttcattgctcattgtacccagacagggatctgggccttcagagacttttgagaatatgaagaggagggttgaggctggagaagagccagaatcaagctggcatggggcttttattgacagtgtgaagattgtacactacattacatgatcagatcatacaaataatctaagattttacagtctggtgaccctagattacacaagtaatctaagcttccactttggaaaactagaaaaagaagagcaaattaaatccaaagtaacctggaaaaaaattagagtaaaaatcagtgaaattgaaaagagaaaatcaataaaacccaaaactgttctttgaaaaggtgggtaaaattgataaacctctagctagattaagaaaaaacagaagacaaatactgctaataccaaaagtgaaagaggccatcatagctgatcctatggtcaccaaaaggattagaaagaaatatggacaactctgtccataaatttgataacttagctaaaatggatcaattccttgcaagatgcattctctcaaagctcataaaaggtagatctcagtaggcatatatatctattaaataaattgaagcagtaattaataaccttccaagaccaggcgcggtggctaaaaatacaaaaagttagccgggcgtggtggcatgcgtgtatagtccaagctactcaggaggctgaggcagaagaatcacttgaacctgggaggtggaggttgcagtgagccaagattgtgccactgtactccagcctgggtgacagagtgagactccatctcaataaaattaataataataaaaccttccaaaaaaagtgccgggaccaaatggattcactgatgtgcatttttcgagatacttaaggtagaaatgataccaagtctgtactgtctctttcagaaaataaaagcagggataacacttcccaaatcattttgtgaggccaggattaccctaataccaaagccaggcaaaaacattacaagaaaggaaaactacagatcaatatttccagtgaacacagatgcagaaatccttaaaatgttagcaaatcaggaatgcaagccttgttcaacatttgatattcagtgcaatccattgcatgcattagcagttcaaagattaaatatgatcatatcaataggtacagaaaaagcatttgacaaaatccaatatccattcatgataaaacctctcaacacagaaggaatacaggagaacttactcaatttgataaagaactactacaaaaaaccctacatctagcatcatccttgatgtttccaactaaatgctttcctactaagatcaggaacatggcaaggaacaccactgcttttcagcattgtactggaagtgctatctaatgcagtgataccaaaaaaaaaggaaataaaatgcacataaatttggaaggaggaaatacaactgtctttgttctcaaataacatgattgtctttgtagaaaattctaaataacaaaaacctgctgacattaataagcaattatagcagggttgtagaatgtagtcctcaggtatatgataaaaaagaattagacatcaagtcattaaaagacatataggaaccctaaatgcttattgttaagtgaaaaccaatctgaaaaggctttctatgttgtatgattgcaattatatgacattctgggagaggcaaaactatcgagcgagtcaaaggaccagtggttgctgagagttgaggggaaaggagggatggcaggtaggtgatttttaggacagtgaaagtactctgtagggtactgtaatttgtcaaaatgcagagaatggaaaacagtgaacggaaaacacagagtaaaccctagtgtcaactctggacttcagttaataacagtgtaccactattggctcatcaattgtaacaaatgaaccataatgatgcaagatgttaataattggggagcctgtggaggatgggagggttaaaggtttatatgagaattctctgtactttttgctcaatttttctgtaaccctaaagctgctctaaaaaatgaagtgtattaagtaaataaataagtaaataaccaacc

SEQ ID NO: 6677 - protein, 116 aa, Homo sapiens
MNKVDQKFQGSVSFKDVTVGFTQEEWQHLDPSQRALYRDVMLENYSNLVSVGYCAHKPEVIFRLEQGEEPWRLEEEFPSQSFPGSSWLWWFPRLSLFWMTLTVWRNPGEKSGQLIT

SEQ ID NO: 6678 - DNA, 441 bp, Homo sapiens
gtttgtctcacgttttgcgtgggaggcggtcccgggatttcaggggtctaccggctctcttatggcgaatgcaacccgaagagagagtgagctgtatcttcagagttgtctccgtctttccaagaacagaacaaaatgaacaaggtaagttgtttattaattccctactttattttgcggtggactttgtgagatttgtaagagtcagtatggtttttttgttttgttttgtttagtgagactccatctcaataaaattaataataataaaaccttccaaaaaaagtgccgggaccaaatggattcactgatgtgcatttttcgagatacttaaggtagaaatgataccaagtctgtactgtctctttcagaaaataaaagcagggataacacttcccaaatcattttgtgaggccaggattaccctaataccaaagccag

SEQ ID NO: 6679 - protein, 55 aa, Homo sapiens
MQPEERVSCIFRVVSVFPRTEQNEQGKLFINSLLYFAVDFVRFVRVSMVFLFCFV

SEQ ID NO: 6680 - DNA, 4356 bp, Homo sapiens
tttgcgtgggaggcggtcccgggatttcaggggtctaccggctctcttatggcgaatgcaacccgaagagagagtgaggtagatcagaagttccaggggtcagtatcatttaaagatgtgactgtgggcttcacccaggaggagtggcagcacctggaccctagtcagagggctctgtatagagatgtgatgctggagaactacagcaaccttgtctcagtggggtattgtgctcacaaaccagaggtgatcttcaggctggaacaaggagaagaaccatggagactggaggaagaattcccaagccagagctttccagaagtctggacagctgatcacctgaaagagaggagccaagaaaatcaatctaaacatttgtgggaagttgtattcatcaataatgaaatgctgactaaggaacaaggtaatgtaataggaataccatttaacatggacgtaagttcttttccttccagaaaaatgttctgtcagtatgactcacgtggaatgagtttcaacactgtttcagaattggttatcagtaagataaactatttaggaaaaaagtctgacgaatttaatgcatgtgggaaattgttactcaatattaagcatgatgaaactcatactcgagagaaaaatgaagttttgaaaaataggaacactctgagtcatcgtgagaacactttgcagcatgagaagattcaaactttagaccacaattttgaatacagtatatgtcaggaaaccctccttgaaaaggcagtattcaatacacggaagagagagaatgcagaagagaataactgtgactataatgaatttgggagaactttctgtgatagttcatccctcttgttccatcagatacctccatcaaaggacagtcactatgaatttagtgattgtgagaagttcttatgtgtgaagtccaccctttctaaacatgatggggtacctgtgaaacactatgattgtggtgaaagtgggaataatttcaggaggaaattgtgtctgtcacagcttcagaaaggtgataaaggagagaaacactttgaatgtaatgaatgtgggaaagctttctgggagaagtcacatctcactcgacatcagagggtgcacacaggagagaaacactttcaatgtaatcaatgtggaaaaactttctgggagaagtcaaacctcactaaacatcagagatcacacacaggggagaaaccttttgaatgcaatgaatgtgggaaagcctttagccataagtcagccctcacattacaccagagaacacatacaggggagaaaccctatcagtgtaatgcatgtgggaaaactttttaccagaaatctgacctcactaaacatcagagaacacacacagggcagaaaccctatgaatgttatgaatgtggaaaatccttctgtatgaattcacaccttacagtacaccagagaactcacacaggtgagaaaccttttgaatgtcttgagtgtgggaaatccttttgtcaaaagtcacatcttacacagcatcagagaactcacataggagataaaccttatgaatgtaatgcatgtgggaaaactttctaccacaagtcagtactcaccaggcatcagataattcatacagggttgaaaccttatgaatgttatgaatgtgggaaaaccttctgcttgaagtcagacctcacaatacatcagagaacgcacacaggggagaaaccctttgcatgtcctgaatgtgggaaattctttagccataagtcaaccctctctcaacattatagaacacacacgggggagaaaccctatgaatgtcatgaatgtggaaaaatcttttacaataaatcatacctaacaaaacataatagaacacatacaggggagaaaccctatgaatgtaatgaatgtggaaaaaccttctgccagaagtcacaactcactcagcatcagagaattcacataggggagaaaccctatgaatgtaatgagtgtggaaaagctttctgccataagtcagctctaattgtacatcagagaacccatacacaagaaaagccttataaatgtaacgaatgtggaaaatctttctgtgtgaagtcaggacttattttacatgagagaaagcacacgggggagaaaccctatgaatgcaatgaatgtgggaaatccttcagtcacaaatcatcactcacagtacatcacagggctcacacaggagagaaatcttgtcagtgtaatgaatgtggaaaaatcttttaccgtaaatcagaccttgctaaacatcagagatcacatacaggggaaaagccctatgaatgtaacacatgcaggaaaaccttctctcaaaagtcaaatctcattgtacatcagagaacacacataggagaaaaaccttatgaatgaattggatattagaaatttccagccacaagtcagcctccataatgcctcagagtcttcacactgtggagaagggcctgttgacatcctgaatgttcaataactatccacaaactcgccttatgttactccaaagtaacagtaggggataaacccatagactacaacaactataggatggcttttgttaggaagtgatattctgttgaatatcagatggttaatactggcataaaacctcacagatttttttgaatttgtgaaagtttttggcaaaactacaaataggattatgttagcatttacactgaggagaaaattgtcaatttaagaaatctaaagtgaaaattttgcttagaaataaaatatgacaagttctgttttgagtttgatgccataatagtttttaaggtatctaacaataatttatagatgtacattgtggaatgtaaagctttaagaattttttaagaagtaataattaaaataacctcacaagaagttgtaatgagtacagagaattcccgtgtacccttcaccaagcttcctctaaggataatatataatcatagtatatggtcaagtccaagaaatcgatgttaccttgctagtagatgcagacttactcagattttgctatggtttgcgtgcactctgtgtgtgtacgtgtatgtgtgtgtgtgtggttataacaaactggtacttttacatttgagtaaccatcaacacaattagtttacagaatggaaaaggagtctgagatctgtactgtttcaggattacaaaggaatcaggatttagcctcaagtagttcccttgttgtattaataaccacaccctttctgcatccctgtccctggcatccacttgactatgaagctttttgtaaagcatagataaattgaataatcagggcaacagcattaagcacatctgtgaattatccctgaagttcataggacttacatatgtacaagtggtatgtgatataaatcgtgtgtttcatatgcataatggtatttaacgtaattgtgaataggaagtaggtatcctaatttagtagtggttacttcatcaggcccatcccaggtgtttgtcgtgtcctgaaacaatttaaatagagacccacagagctaatgtttatccatttaaaagttataaatcaaaataacagattatctgaaaaaaaatctatcctgtacgtgtgaagatctaggcctgcctccatgttactccctttctcttactacctgtggctcatcccatgccatgaactgcctggggtacatatgtgaacactccagccttcagcgtaagtgatagtccaaattttctttaagcagctgctctccaagacagggccctggaaagaggcccacacatacagcccagttgctgcccagggctgttggactgtcatttcattgctcattgtacccagacagggatctgggccttcagagacttttgagaatatgaagaggagggttgaggctggagaagagccagaatcaagctggcatggggcttttattgacagtgtgaagattgtacactacattacatgatcagatcatacaaataatctaagattttacagtctggtgaccctagattacacaagtaatctaagcttccactttggaaaactagaaaaagaagagcaaattaaatccaaagtaacctggaaaaaaattagagtaaaaatcagtgaaattgaaaagagaaaatcaataaaacccaaaactgttctttgaaaaggtgggtaaaattgataaacctctagctagattaagaaaaaacagaagacaaatactgctaataccaaaagtgaaagaggccatcatagctgatcctatggtcaccaaaaggattagaaagaaatatggacaactctgtccataaatttgataacttagctaaaatggatcaattccttgcaagatgcattct

SEQ ID NO: 6681 - protein, 785 aa, Homo sapiens
MANATRRESEVDQKFQGSVSFKDVTVGFTQEEWQHLDPSQRALYRDVMLENYSNLVSVGYCAHKPEVIFRLEQGEEPWRLEEEFPSQSFPEVWTADHLKERSQENQSKHLWEVVFINNEMLTKEQGNVIGIPFNMDVSSFPSRKMFCQYDSRGMSFNTVSELVISKINYLGKKSDEFNACGKLLLNIKHDETHTREKNEVLKNRNTLSHRENTLQHEKIQTLDHNFEYSICQETLLEKAVFNTRKRENAEENNCDYNEFGRTFCDSSSLLFHQIPPSKDSHYEFSDCEKFLCVKSTLSKHDGVPVKHYDCGESGNNFRRKLCLSQLQKGDKGEKHFECNECGKAFWEKSHLTRHQRVHTGEKHFQCNQCGKTFWEKSNLTKHQRSHTGEKPFECNECGKAFSHKSALTLHQRTHTGEKPYQCNACGKTFYQKSDLTKHQRTHTGQKPYECYECGKSFCMNSHLTVHQRTHTGEKPFECLECGKSFCQKSHLTQHQRTHIGDKPYECNACGKTFYHKSVLTRHQIIHTGLKPYECYECGKTFCLKSDLTIHQRTHTGEKPFACPECGKFFSHKSTLSQHYRTHTGEKPYECHECGKIFYNKSYLTKHNRTHTGEKPYECNECGKTFCQKSQLTQHQRIHIGEKPYECNECGKAFCHKSALIVHQRTHTQEKPYKCNECGKSFCVKSGLILHERKHTGEKPYECNECGKSFSHKSSLTVHHRAHTGEKSCQCNECGKIFYRKSDLAKHQRSHTGEKPYECNTCRKTFSQKSNLIVHQRTHIGEKPYE

SEQ ID NO: 6682 - DNA, 4436 bp, Homo sapiens
cgttttgcgtgggaggcggtcccgggatttcaggggtctaccggctctcttatggcgaatgcaacccgaagagagagtgaggtagatcagaagttccaggggtcagtatcatttaaagatgtgactgtgggcttcacccaggaggagtggcagcacctggaccctagtcagagggctctgtatagagatgtgatgctggagaactacagcaaccttgtctcagtggggtattgtgctcacaaaccagaggtgatcttcaggctggaacaaggagaagaaccatggagactggaggaagaattcccaagccagagctttccaggctcctcttggctatggtggtttcccagactttccttgttttggatgaccttgacagtttggaggaatcctggtgagaagtctggacagctgatcacctgaaagagaggagccaagaaaatcaatctaaacatttgtgggaagttgtattcatcaataatgaaatgctgactaaggaacaaggtaatgtaataggaataccatttaacatggacgtaagttcttttccttccagaaaaatgttctgtcagtatgactcacgtggaatgagtttcaacactgtttcagaattggttatcagtaagataaactatttaggaaaaaagtctgacgaatttaatgcatgtgggaaattgttactcaatattaagcatgatgaaactcatactcgagagaaaaatgaagttttgaaaaataggaacactctgagtcatcgtgagaacactttgcagcatgagaagattcaaactttagaccacaattttgaatacagtatatgtcaggaaaccctccttgaaaaggcagtattcaatacacggaagagagagaatgcagaagagaataactgtgactataatgaatttgggagaactttctgtgatagttcatccctcttgttccatcagatacctccatcaaaggacagtcactatgaatttagtgattgtgagaagttcttatgtgtgaagtccaccctttctaaacatgatggggtacctgtgaaacactatgattgtggtgaaagtgggaataatttcaggaggaaattgtgtctgtcacagcttcagaaaggtgataaaggagagaaacactttgaatgtaatgaatgtgggaaagctttctgggagaagtcacatctcactcgacatcagagggtgcacacaggagagaaacactttcaatgtaatcaatgtggaaaaactttctgggagaagtcaaacctcactaaacatcagagatcacacacaggggagaaaccttttgaatgcaatgaatgtgggaaagcctttagccataagtcagccctcacattacaccagagaacacatacaggggagaaaccctatcagtgtaatgcatgtgggaaaactttttaccagaaatctgacctcactaaacatcagagaacacacacagggcagaaaccctatgaatgttatgaatgtggaaaatccttctgtatgaattcacaccttacagtacaccagagaactcacacaggtgagaaaccttttgaatgtcttgagtgtgggaaatccttttgtcaaaagtcacatcttacacagcatcagagaactcacataggagataaaccttatgaatgtaatgcatgtgggaaaactttctaccacaagtcagtactcaccaggcatcagataattcatacagggttgaaaccttatgaatgttatgaatgtgggaaaaccttctgcttgaagtcagacctcacaatacatcagagaacgcacacaggggagaaaccctttgcatgtcctgaatgtgggaaattctttagccataagtcaaccctctctcaacattatagaacacacacgggggagaaaccctatgaatgtcatgaatgtggaaaaatcttttacaataaatcatacctaacaaaacataatagaacacatacaggggagaaaccctatgaatgtaatgaatgtggaaaaaccttctgccagaagtcacaactcactcagcatcagagaattcacataggggagaaaccctatgaatgtaatgagtgtggaaaagctttctgccataagtcagctctaattgtacatcagagaacccatacacaagaaaagccttataaatgtaacgaatgtggaaaatctttctgtgtgaagtcaggacttattttacatgagagaaagcacacgggggagaaaccctatgaatgcaatgaatgtgggaaatccttcagtcacaaatcatcactcacagtacatcacagggctcacacaggagagaaatcttgtcagtgtaatgaatgtggaaaaatcttttaccgtaaatcagaccttgctaaacatcagagatcacatacaggggaaaagccctatgaatgtaacacatgcaggaaaaccttctctcaaaagtcaaatctcattgtacatcagagaacacacataggagaaaaaccttatgaatgaattggatattagaaatttccagccacaagtcagcctccataatgcctcagagtcttcacactgtggagaagggcctgttgacatcctgaatgttcaataactatccacaaactcgccttatgttactccaaagtaacagtaggggataaacccatagactacaacaactataggatggcttttgttaggaagtgatattctgttgaatatcagatggttaatactggcataaaacctcacagatttttttgaatttgtgaaagtttttggcaaaactacaaataggattatgttagcatttacactgaggagaaaattgtcaatttaagaaatctaaagtgaaaattttgcttagaaataaaatatgacaagttctgttttgagtttgatgccataatagtttttaaggtatctaacaataatttatagatgtacattgtggaatgtaaagctttaagaattttttaagaagtaataattaaaataacctcacaagaagttgtaatgagtacagagaattcccgtgtacccttcaccaagcttcctctaaggataatatataatcatagtatatggtcaagtccaagaaatcgatgttaccttgctagtagatgcagacttactcagattttgctatggtttgcgtgcactctgtgtgtgtacgtgtatgtgtgtgtgtgtggttataacaaactggtacttttacatttgagtaaccatcaacacaattagtttacagaatggaaaaggagtctgagatctgtactgtttcaggattacaaaggaatcaggatttagcctcaagtagttcccttgttgtattaataaccacaccctttctgcatccctgtccctggcatccacttgactatgaagctttttgtaaagcatagataaattgaataatcagggcaacagcattaagcacatctgtgaattatccctgaagttcataggacttacatatgtacaagtggtatgtgatataaatcgtgtgtttcatatgcataatggtatttaacgtaattgtgaataggaagtaggtatcctaatttagtagtggttacttcatcaggcccatcccaggtgtttgtcgtgtcctgaaacaatttaaatagagacccacagagctaatgtttatccatttaaaagttataaatcaaaataacagattatctgaaaaaaaatctatcctgtacgtgtgaagatctaggcctgcctccatgttactccctttctcttactacctgtggctcatcccatgccatgaactgcctggggtacatatgtgaacactccagccttcagcgtaagtgatagtccaaattttctttaagcagctgctctccaagacagggccctggaaagaggcccacacatacagcccagttgctgcccagggctgttggactgtcatttcattgctcattgtacccagacagggatctgggccttcagagacttttgagaatatgaagaggagggttgaggctggagaagagccagaatcaagctggcatggggcttttattgacagtgtgaagattgtacactacattacatgatcagatcatacaaataatctaagattttacagtctggtgaccctagattacacaagtaatctaagcttccactttggaaaactagaaaaagaagagcaaattaaatccaaagtaacctggaaaaaaattagagtaaaaatcagtgaaattgaaaagagaaaatcaataaaacccaaaactgttctttgaaaaggtgggtaaaattgataaacctctagctagattaagaaaaaacagaagacaaatactgctaataccaaaagtgaaagaggccatcatagctgatcctatggtcaccaaaaggattagaaagaaatatggacaactctgtccataaatttgataacttagctaaaatggatcaattccttgcaagatgcattct

SEQ ID NO: 6683 - protein, 123 aa, Homo sapiens
MANATRRESEVDQKFQGSVSFKDVTVGFTQEEWQHLDPSQRALYRDVMLENYSNLVSVGYCAHKPEVIFRLEQGEEPWRLEEEFPSQSFPGSSWLWWFPRLSLFWMTLTVWRNPGEKSGQLIT

SEQ ID NO: 6684 - DNA, 4354 bp, Homo sapiens
gtttgtctcacgttttgcgtgggaggcggtcccgggatttcaggggtctaccggctctcttatggcgaatgcaacccgaagagagagtgagctgtatcttcagagttgtctccgtctttccaagaacagaacaaaatgaacaagggtattgtgctcacaaaccagaggtgatcttcaggctggaacaaggagaagaaccatggagactggaggaagaattcccaagccagagctttccaggctcctcttggctatggtggtttcccagactttccttgttttggatgaccttgacagtttggaggaatcctggtgagaagtctggacagctgatcacctgaaagagaggagccaagaaaatcaatctaaacatttgtgggaagttgtattcatcaataatgaaatgctgactaaggaacaaggtaatgtaataggaataccatttaacatggacgtaagttcttttccttccagaaaaatgttctgtcagtatgactcacgtggaatgagtttcaacactgtttcagaattggttatcagtaagataaactatttaggaaaaaagtctgacgaatttaatgcatgtgggaaattgttactcaatattaagcatgatgaaactcatactcgagagaaaaatgaagttttgaaaaataggaacactctgagtcatcgtgagaacactttgcagcatgagaagattcaaactttagaccacaattttgaatacagtatatgtcaggaaaccctccttgaaaaggcagtattcaatacacggaagagagagaatgcagaagagaataactgtgactataatgaatttgggagaactttctgtgatagttcatccctcttgttccatcagatacctccatcaaaggacagtcactatgaatttagtgattgtgagaagttcttatgtgtgaagtccaccctttctaaacatgatggggtacctgtgaaacactatgattgtggtgaaagtgggaataatttcaggaggaaattgtgtctgtcacagcttcagaaaggtgataaaggagagaaacactttgaatgtaatgaatgtgggaaagctttctgggagaagtcacatctcactcgacatcagagggtgcacacaggagagaaacactttcaatgtaatcaatgtggaaaaactttctgggagaagtcaaacctcactaaacatcagagatcacacacaggggagaaaccttttgaatgcaatgaatgtgggaaagcctttagccataagtcagccctcacattacaccagagaacacatacaggggagaaaccctatcagtgtaatgcatgtgggaaaactttttaccagaaatctgacctcactaaacatcagagaacacacacagggcagaaaccctatgaatgttatgaatgtggaaaatccttctgtatgaattcacaccttacagtacaccagagaactcacacaggtgagaaaccttttgaatgtcttgagtgtgggaaatccttttgtcaaaagtcacatcttacacagcatcagagaactcacataggagataaaccttatgaatgtaatgcatgtgggaaaactttctaccacaagtcagtactcaccaggcatcagataattcatacagggttgaaaccttatgaatgttatgaatgtgggaaaaccttctgcttgaagtcagacctcacaatacatcagagaacgcacacaggggagaaaccctttgcatgtcctgaatgtgggaaattctttagccataagtcaaccctctctcaacattatagaacacacacgggggagaaaccctatgaatgtcatgaatgtggaaaaatcttttacaataaatcatacctaacaaaacataatagaacacatacaggggagaaaccctatgaatgtaatgaatgtggaaaaaccttctgccagaagtcacaactcactcagcatcagagaattcacataggggagaaaccctatgaatgtaatgagtgtggaaaagctttctgccataagtcagctctaattgtacatcagagaacccatacacaagaaaagccttataaatgtaacgaatgtggaaaatctttctgtgtgaagtcaggacttattttacatgagagaaagcacacgggggagaaaccctatgaatgcaatgaatgtgggaaatccttcagtcacaaatcatcactcacagtacatcacagggctcacacaggagagaaatcttgtcagtgtaatgaatgtggaaaaatcttttaccgtaaatcagaccttgctaaacatcagagatcacatacaggggaaaagccctatgaatgtaacacatgcaggaaaaccttctctcaaaagtcaaatctcattgtacatcagagaacacacataggagaaaaaccttatgaatgaattggatattagaaatttccagccacaagtcagcctccataatgcctcagagtcttcacactgtggagaagggcctgttgacatcctgaatgttcaataactatccacaaactcgccttatgttactccaaagtaacagtaggggataaacccatagactacaacaactataggatggcttttgttaggaagtgatattctgttgaatatcagatggttaatactggcataaaacctcacagatttttttgaatttgtgaaagtttttggcaaaactacaaataggattatgttagcatttacactgaggagaaaattgtcaatttaagaaatctaaagtgaaaattttgcttagaaataaaatatgacaagttctgttttgagtttgatgccataatagtttttaaggtatctaacaataatttatagatgtacattgtggaatgtaaagctttaagaattttttaagaagtaataattaaaataacctcacaagaagttgtaatgagtacagagaattcccgtgtacccttcaccaagcttcctctaaggataatatataatcatagtatatggtcaagtccaagaaatcgatgttaccttgctagtagatgcagacttactcagattttgctatggtttgcgtgcactctgtgtgtgtacgtgtatgtgtgtgtgtgtggttataacaaactggtacttttacatttgagtaaccatcaacacaattagtttacagaatggaaaaggagtctgagatctgtactgtttcaggattacaaaggaatcaggatttagcctcaagtagttcccttgttgtattaataaccacaccctttctgcatccctgtccctggcatccacttgactatgaagctttttgtaaagcatagataaattgaataatcagggcaacagcattaagcacatctgtgaattatccctgaagttcataggacttacatatgtacaagtggtatgtgatataaatcgtgtgtttcatatgcataatggtatttaacgtaattgtgaataggaagtaggtatcctaatttagtagtggttacttcatcaggcccatcccaggtgtttgtcgtgtcctgaaacaatttaaatagagacccacagagctaatgtttatccatttaaaagttataaatcaaaataacagattatctgaaaaaaaatctatcctgtacgtgtgaagatctaggcctgcctccatgttactccctttctcttactacctgtggctcatcccatgccatgaactgcctggggtacatatgtgaacactccagccttcagcgtaagtgatagtccaaattttctttaagcagctgctctccaagacagggccctggaaagaggcccacacatacagcccagttgctgcccagggctgttggactgtcatttcattgctcattgtacccagacagggatctgggccttcagagacttttgagaatatgaagaggagggttgaggctggagaagagccagaatcaagctggcatggggcttttattgacagtgtgaagattgtacactacattacatgatcagatcatacaaataatctaagattttacagtctggtgaccctagattacacaagtaatctaagcttccactttggaaaactagaaaaagaagagcaaattaaatccaaagtaacctggaaaaaaattagagtaaaaatcagtgaaattgaaaagagaaaatcaataaaacccaaaactgttctttgaaaaggtgggtaaaattgataaacctctagctagattaagaaaaaacagaagacaaatactgctaataccaaaagtgaaagaggccatcatagctgatcctatggtcaccaaaaggattagaaagaaatatggacaactctgtccataaatttgataacttagctaaaatggatcaattccttgcaagatgcattct

SEQ ID NO: 6685 - protein, 90 aa, Homo sapiens; identical to SEQ ID NO: 6669

SEQ ID NO: 6686 - DNA, 4627 bp, Homo sapiens
atgcctcatccactggctacctctgcgtttctgcgtttccgcctttccttttgtttgtctcacgttttgcgtgggaggcggtcccgggatttcaggggtctaccggctctcttatggcgaatgcaacccgaagagagagtgagctgtatcttcagagttgtctccgtctttccaagaacagaacaaaatgaacaaggtagatcagaagttccaggggtcagtatcatttaaagatgtgactgtgggcttcacccaggaggagtggcagcacctggaccctagtcagagggctctgtatagagatgtgatgctggagaactacagcaaccttgtctcagtggggtattgtgctcacaaaccagaggtgatcttcaggctggaacaaggagaagaaccatggagactggaggaagaattcccaagccagagctttccaggctcctcttggctatggtggtttcccagactttccttgttttggatgaccttgacagtttggaggaatcctgagcactttctttctgtcactgcaagatggtccaggcttatcttatatatttcctttctgaaatcagtcaccatttcttcagaagtctggacagctgatcacctgaaagagaggagccaagaaaatcaatctaaacatttgtgggaagttgtattcatcaataatgaaatgctgactaaggaacaaggtaatgtaataggaataccatttaacatggacgtaagttcttttccttccagaaaaatgttctgtcagtatgactcacgtggaatgagtttcaacactgtttcagaattggttatcagtaagataaactatttaggaaaaaagtctgacgaatttaatgcatgtgggaaattgttactcaatattaagcatgatgaaactcatactcgagagaaaaatgaagttttgaaaaataggaacactctgagtcatcgtgagaacactttgcagcatgagaagattcaaactttagaccacaattttgaatacagtatatgtcaggaaaccctccttgaaaaggcagtattcaatacacggaagagagagaatgcagaagagaataactgtgactataatgaatttgggagaactttctgtgatagttcatccctcttgttccatcagatacctccatcaaaggacagtcactatgaatttagtgattgtgagaagttcttatgtgtgaagtccaccctttctaaacatgatggggtacctgtgaaacactatgattgtggtgaaagtgggaataatttcaggaggaaattgtgtctgtcacagcttcagaaaggtgataaaggagagaaacactttgaatgtaatgaatgtgggaaagctttctgggagaagtcacatctcactcgacatcagagggtgcacacaggagagaaacactttcaatgtaatcaatgtggaaaaactttctgggagaagtcaaacctcactaaacatcagagatcacacacaggggagaaaccttttgaatgcaatgaatgtgggaaagcctttagccataagtcagccctcacattacaccagagaacacatacaggggagaaaccctatcagtgtaatgcatgtgggaaaactttttaccagaaatctgacctcactaaacatcagagaacacacacagggcagaaaccctatgaatgttatgaatgtggaaaatccttctgtatgaattcacaccttacagtacaccagagaactcacacaggtgagaaaccttttgaatgtcttgagtgtgggaaatccttttgtcaaaagtcacatcttacacagcatcagagaactcacataggagataaaccttatgaatgtaatgcatgtgggaaaactttctaccacaagtcagtactcaccaggcatcagataattcatacagggttgaaaccttatgaatgttatgaatgtgggaaaaccttctgcttgaagtcagacctcacaatacatcagagaacgcacacaggggagaaaccctttgcatgtcctgaatgtgggaaattctttagccataagtcaaccctctctcaacattatagaacacacacgggggagaaaccctatgaatgtcatgaatgtggaaaaatcttttacaataaatcatacctaacaaaacataatagaacacatacaggggagaaaccctatgaatgtaatgaatgtggaaaaaccttctgccagaagtcacaactcactcagcatcagagaattcacataggggagaaaccctatgaatgtaatgagtgtggaaaagctttctgccataagtcagctctaattgtacatcagagaacccatacacaagaaaagccttataaatgtaacgaatgtggaaaatctttctgtgtgaagtcaggacttattttacatgagagaaagcacacgggggagaaaccctatgaatgcaatgaatgtgggaaatccttcagtcacaaatcatcactcacagtacatcacagggctcacacaggagagaaatcttgtcagtgtaatgaatgtggaaaaatcttttaccgtaaatcagaccttgctaaacatcagagatcacatacaggggaaaagccctatgaatgtaacacatgcaggaaaaccttctctcaaaagtcaaatctcattgtacatcagagaacacacataggagaaaaaccttatgaatgaattggatattagaaatttccagccacaagtcagcctccataatgcctcagagtcttcacactgtggagaagggcctgttgacatcctgaatgttcaataactatccacaaactcgccttatgttactccaaagtaacagtaggggataaacccatagactacaacaactataggatggcttttgttaggaagtgatattctgttgaatatcagatggttaatactggcataaaacctcacagatttttttgaatttgtgaaagtttttggcaaaactacaaataggattatgttagcatttacactgaggagaaaattgtcaatttaagaaatctaaagtgaaaattttgcttagaaataaaatatgacaagttctgttttgagtttgatgccataatagtttttaaggtatctaacaataatttatagatgtacattgtggaatgtaaagctttaagaattttttaagaagtaataattaaaataacctcacaagaagttgtaatgagtacagagaattcccgtgtacccttcaccaagcttcctctaaggataatatataatcatagtatatggtcaagtccaagaaatcgatgttaccttgctagtagatgcagacttactcagattttgctatggtttgcgtgcactctgtgtgtgtacgtgtatgtgtgtgtgtgtggttataacaaactggtacttttacatttgagtaaccatcaacacaattagtttacagaatggaaaaggagtctgagatctgtactgtttcaggattacaaaggaatcaggatttagcctcaagtagttcccttgttgtattaataaccacaccctttctgcatccctgtccctggcatccacttgactatgaagctttttgtaaagcatagataaattgaataatcagggcaacagcattaagcacatctgtgaattatccctgaagttcataggacttacatatgtacaagtggtatgtgatataaatcgtgtgtttcatatgcataatggtatttaacgtaattgtgaataggaagtaggtatcctaatttagtagtggttacttcatcaggcccatcccaggtgtttgtcgtgtcctgaaacaatttaaatagagacccacagagctaatgtttatccatttaaaagttataaatcaaaataacagattatctgaaaaaaaatctatcctgtacgtgtgaagatctaggcctgcctccatgttactccctttctcttactacctgtggctcatcccatgccatgaactgcctggggtacatatgtgaacactccagccttcagcgtaagtgatagtccaaattttctttaagcagctgctctccaagacagggccctggaaagaggcccacacatacagcccagttgctgcccagggctgttggactgtcatttcattgctcattgtacccagacagggatctgggccttcagagacttttgagaatatgaagaggagggttgaggctggagaagagccagaatcaagctggcatggggcttttattgacagtgtgaagattgtacactacattacatgatcagatcatacaaataatctaagattttacagtctggtgaccctagattacacaagtaatctaagcttccactttggaaaactagaaaaagaagagcaaattaaatccaaagtaacctggaaaaaaattagagtaaaaatcagtgaaattgaaaagagaaaatcaataaaacccaaaactgttctttgaaaaggtgggtaaaattgataaacctctagctagattaagaaaaaacagaagacaaatactgctaataccaaaagtgaaagaggccatcatagctgatcctatggtcaccaaaaggattagaaagaaatatggacaactctgtccataaatttgataacttagctaaaatggatcaattccttgcaagatgcattct

SEQ ID NO: 6687 - protein, 829 aa, Homo sapiens
MNKVDQKFQGSVSFKDVTVGFTQEEWQHLDPSQRALYRDVMLENYSNLVSVGYCAHKPEVIFRLEQGEEPWRLEEEFPSQSFPGSSWLWWFPRLSLFWMTLTVWRNPEHFLSVTARWSRLILYISFLKSVTISSEVWTADHLKERSQENQSKHLWEVVFINNEMLTKEQGNVIGIPFNMDVSSFPSRKMFCQYDSRGMSFNTVSELVISKINYLGKKSDEFNACGKLLLNIKHDETHTREKNEVLKNRNTLSHRENTLQHEKIQTLDHNFEYSICQETLLEKAVFNTRKRENAEENNCDYNEFGRTFCDSSSLLFHQIPPSKDSHYEFSDCEKFLCVKSTLSKHDGVPVKHYDCGESGNNFRRKLCLSQLQKGDKGEKHFECNECGKAFWEKSHLTRHQRVHTGEKHFQCNQCGKTFWEKSNLTKHQRSHTGEKPFECNECGKAFSHKSALTLHQRTHTGEKPYQCNACGKTFYQKSDLTKHQRTHTGQKPYECYECGKSFCMNSHLTVHQRTHTGEKPFECLECGKSFCQKSHLTQHQRTHIGDKPYECNACGKTFYHKSVLTRHQIIHTGLKPYECYECGKTFCLKSDLTIHQRTHTGEKPFACPECGKFFSHKSTLSQHYRTHTGEKPYECHECGKIFYNKSYLTKHNRTHTGEKPYECNECGKTFCQKSQLTQHQRIHIGEKPYECNECGKAFCHKSALIVHQRTHTQEKPYKCNECGKSFCVKSGLILHERKHTGEKPYECNECGKSFSHKSSLTVHHRAHTGEKSCQCNECGKIFYRKSDLAKHQRSHTGEKPYECNTCRKTFSQKSNLIVHQRTHIGEKPYE

SEQ ID NO: 6688 - DNA, 1977 bp, Homo sapiens
atgcctcatccactggctacctctgcgtttctgcgtttccgcctttccttttgtttgtctcacgttttgcgtgggaggcggtcccgggatttcaggggtctaccggctctcttatggcgaatgcaacccgaagagagagtgagctgtatcttcagagttgtctccgtctttccaagaacagaacaaaatgaacaaggtagatcagaagttccaggggtcagtatcatttaaagatgtgactgtgggcttcacccaggaggagtggcagcacctggaccctagtcagagggctctgtatagagatgtgatgctggagaactacagcaaccttgtctcagtggggtattgtgctcacaaaccagaggtgatcttcaggctggaacaaggagaagaaccatggagactggaggaagaattcccaagccagagctttccagaagtctggacagctgatcacctgaaagagaggagccaagaaaatcaatctaaacatttgtgggaagttgtattcatcaataatgaaatgctgactaaggaacaaggtaatgtaataggaataccatttaacatggacgtaagttcttttccttccagaaaaatgttctgtcagtatgactcacgtggaatgagtttcaacactgtttcagaattggttatcagtaagataaactatttaggaaaaaagtctgacgaatttaatgcatgtgggaaattgttactcaatattaagcatgatgaaactcatactcgagagaaaaatgaagttttgaaaaataggaacactctgagtcatcgtgagaacactttgcagcatgagaagattcaaactttagaccacaattttgaatacagtatatgtcaggaaaccctccttgaaaaggcagtattcaatacacggaagagagagaatgcagaagagaataactgtgactataatgaatttgggagaactttctgtgatagttcatccctcttgttccatcagatacctccatcaaaggacagtcactatgaatttagtgattgtgagaagttcttatgtgtgaagtccaccctttctaaacatgatggggtacctgtgaaacactatgattgtggtgaaagtgggaataatttcaggaggaaattgtgtctgtcacagcttcagaaaggtgataaaggagagaaacactttgaatgtaatgaatgtgggaaagctttctgggagaagtcacatctcactcgacatcagagggtgcacacaggagagaaacactttcaatgtaatcaatgtggaaaaactttctgggagaagtcaaacctcactaaacatcagagatcacacacaggggagaaaccttttgaatgcaatgaatgtgggaaagcctttagccataagtcagccctcacattacaccagagaacacatacaggggagaaaccctatcagtgtaatgcatgtgggaaaactttttaccagaaatctgacctcactaaacatcagagaacacacacagggcagaaaccctatgaatgttatgaatgtggaaaatccttctgtatgaattcacaccttacagtacaccagagaactcacacaggtgagaaaccttttgaatgtcttgagtgtgggaaatccttttgtcaaaagtcacatcttacacagcatcagagaactcacataggagataaaccttatgaatgtaatgcatgtgggaaaactttctaccacaagtcagtactcaccaggcatcagataattcatacagggttgaaaccttatgaatgttatgaatgtgggaaaaccttctgcttgaagtcagacctcacaatacatcagagaacgcacacaggggagaaaccctttgcatgtcctgaatgtgggaaattctttagccataagtcaaccctctctcaacattatagaacacacacgggggagaaaccctatgaatgtcatgaatgtggaaaaatcttttacaataaatcatacctaac

SEQ ID NO: 6689 - protein, 595 aa, Homo sapiens
MNKVDQKFQGSVSFKDVTVGFTQEEWQHLDPSQRALYRDVMLENYSNLVSVGYCAHKPEVIFRLEQGEEPWRLEEEFPSQSFPEVWTADHLKERSQENQSKHLWEVVFINNEMLTKEQGNVIGIPFNMDVSSFPSRKMFCQYDSRGMSFNTVSELVISKINYLGKKSDEFNACGKLLLNIKHDETHTREKNEVLKNRNTLSHRENTLQHEKIQTLDHNFEYSICQETLLEKAVFNTRKRENAEENNCDYNEFGRTFCDSSSLLFHQIPPSKDSHYEFSDCEKFLCVKSTLSKHDGVPVKHYDCGESGNNFRRKLCLSQLQKGDKGEKHFECNECGKAFWEKSHLTRHQRVHTGEKHFQCNQCGKTFWEKSNLTKHQRSHTGEKPFECNECGKAFSHKSALTLHQRTHTGEKPYQCNACGKTFYQKSDLTKHQRTHTGQKPYECYECGKSFCMNSHLTVHQRTHTGEKPFECLECGKSFCQKSHLTQHQRTHIGDKPYECNACGKTFYHKSVLTRHQIIHTGLKPYECYECGKTFCLKSDLTIHQRTHTGEKPFACPECGKFFSHKSTLSQHYRTHTGEKPYECHECGKIFYNKSY

SEQ ID NO: 6690 - DNA, 1257 bp, Homo sapiens
atgcctcatccactggctacctctgcgtttctgcgtttccgcctttccttttgtttgtctcacgttttgcgtgggaggcggtcccgggatttcaggggtctaccggctctcttatggcgaatgcaacccgaagagagagtgagctgtatcttcagagttgtctccgtctttccaagaacagaacaaaatgaacaaggtagatcagaagttccaggggtcagtatcatttaaagatgtgactgtgggcttcacccaggaggagtggcagcacctggaccctagtcagagggctctgtatagagatgtgatgctggagaactacagcaaccttgtctcagtggggtattgtgctcacaaaccagaggtgatcttcaggctggaacaaggagaagaaccatggagactggaggaagaattcccaagccagagctttccaggctcctcttggctatggtggtttcccagactttccttgttttggatgaccttgacagtttggaggaatcctggtgagaagtctggacagctgatcacctgaaagagaggagccaagaaaatcaatctaaacatttgtgggaagttgtattcatcaataatgaaatgctgactaaggaacaaggtaatgtaataggaataccatttaacatggacgtaagttcttttccttccagaaaaatgttctgtcagtatgactcacgtggaatgagtttcaacactgtttcagaattggttatcagtaagataaactatttaggaaaaaagtctgacgaatttaatgcatgtgggaaattgttactcaatattaagcatgatgaaactcatactcgagagaaaaatgaagttttgaaaaataggaacactctgagtcatcgtgagaacactttgcagcatgagaagattcaaactttagaccacaattttgaatacagtatatgtcaggaaaccctccttgaaaaggcagtattcaatacacggaagagagagaatgcagaagagaataactgtgactataatgaatttgggagaactttctgtgatagttcatccctcttgttccatcagatacctccatcaaaggacagtcactatgaatttagtgattgtgagaagttcttatgtgtgaagtccaccctttctaaacatgatggggtacctgtgaaacactatgattgtggtgaaagtgggaataatttcaggaggaaattgtgtctgtcacagcttcagaaaggtgataaaggagagaaacactttgaatgt

SEQ ID NO: 6691 - protein, 116 aa, Homo sapiens; identical to SEQ ID NO: 6677

SEQ ID NO: 6692 - DNA, 1057 bp, Homo sapiens
tttgcgtgggaggcggtcccgggatttcaggggtctaccggctctcttatggcgaatgcaacccgaagagagagtgaggtagatcagaagttccaggggtcagtatcatttaaagatgtgactgtgggcttcacccaggaggagtggcagcacctggaccctagtcagagggctctgtatagagatgtgatgctggagaactacagcaaccttgtctcagtggggtattgtgctcacaaaccagaggtgatcttcaggctggaacaaggagaagaaccatggagactggaggaagaattcccaagccagagctttccagaagtctggacagctgatcacctgaaagagaggagccaagaaaatcaatctaaacatttgtgggaagttgtattcatcaataatgaaatgctgactaaggaacaaggtaatgtaataggaataccatttaacatggacgtaagttcttttccttccagaaaaatgttctgtcagtatgactcacgtggaatgagtttcaacactgtttcagaattggttatcagtaagataaactatttaggaaaaaagtctgacgaatttaatgcatgtgggaaattgttactcaatattaagcatgatgaaactcatactcgagagaaaaatgaagttttgaaaaataggaacactctgagtcatcgtgagaacactttgcagcatgagaagattcaaactttagaccacaattttgaatacagtatatgtcaggaaaccctccttgaaaaggcagtattcaatacacggaagagagagaatgcagaagagaataactgtgactataatgaatttgggagaactttctgtgatagttcatccctcttgttccatcagatacctccatcaaaggacagtcactatgaatttagtgattgtgagaagttcttatgtgtgaagtccaccctttctaaacatgatggggtacctgtgaaacactatgattgtggtgaaagtgggaataatttcaggaggaaattgtgtctgtcacagcttcagaaaggtgataaaggagagaaacactttg

SEQ ID NO: 6693 - protein, 335 aa, Homo sapiens
MANATRRESEVDQKFQGSVSFKDVTVGFTQEEWQHLDPSQRALYRDVMLENYSNLVSVGYCAHKPEVIFRLEQGEEPWRLEEEFPSQSFPEVWTADHLKERSQENQSKHLWEVVFINNEMLTKEQGNVIGIPFNMDVSSFPSRKMFCQYDSRGMSFNTVSELVISKINYLGKKSDEFNACGKLLLNIKHDETHTREKNEVLKNRNTLSHRENTLQHEKIQTLDHNFEYSICQETLLEKAVFNTRKRENAEENNCDYNEFGRTFCDSSSLLFHQIPPSKDSHYEFSDCEKFLCVKSTLSKHDGVPVKHYDCGESGNNFRRKLCLSQLQKGDKGEKH

SEQ ID NO: 6694 - DNA, 1137 bp, Homo sapiens
cgttttgcgtgggaggcggtcccgggatttcaggggtctaccggctctcttatggcgaatgcaacccgaagagagagtgaggtagatcagaagttccaggggtcagtatcatttaaagatgtgactgtgggcttcacccaggaggagtggcagcacctggaccctagtcagagggctctgtatagagatgtgatgctggagaactacagcaaccttgtctcagtggggtattgtgctcacaaaccagaggtgatcttcaggctggaacaaggagaagaaccatggagactggaggaagaattcccaagccagagctttccaggctcctcttggctatggtggtttcccagactttccttgttttggatgaccttgacagtttggaggaatcctggtgagaagtctggacagctgatcacctgaaagagaggagccaagaaaatcaatctaaacatttgtgggaagttgtattcatcaataatgaaatgctgactaaggaacaaggtaatgtaataggaataccatttaacatggacgtaagttcttttccttccagaaaaatgttctgtcagtatgactcacgtggaatgagtttcaacactgtttcagaattggttatcagtaagataaactatttaggaaaaaagtctgacgaatttaatgcatgtgggaaattgttactcaatattaagcatgatgaaactcatactcgagagaaaaatgaagttttgaaaaataggaacactctgagtcatcgtgagaacactttgcagcatgagaagattcaaactttagaccacaattttgaatacagtatatgtcaggaaaccctccttgaaaaggcagtattcaatacacggaagagagagaatgcagaagagaataactgtgactataatgaatttgggagaactttctgtgatagttcatccctcttgttccatcagatacctccatcaaaggacagtcactatgaatttagtgattgtgagaagttcttatgtgtgaagtccaccctttctaaacatgatggggtacctgtgaaacactatgattgtggtgaaagtgggaataatttcaggaggaaattgtgtctgtcacagcttcagaaaggtgataaaggagagaaacactttg

SEQ ID NO: 6695 - protein, 123 aa, Homo sapiens; identical to SEQ ID NO: 6683

SEQ ID NO: 6696 - DNA, 1055 bp, Homo sapiens
gtttgtctcacgttttgcgtgggaggcggtcccgggatttcaggggtctaccggctctcttatggcgaatgcaacccgaagagagagtgagctgtatcttcagagttgtctccgtctttccaagaacagaacaaaatgaacaagggtattgtgctcacaaaccagaggtgatcttcaggctggaacaaggagaagaaccatggagactggaggaagaattcccaagccagagctttccaggctcctcttggctatggtggtttcccagactttccttgttttggatgaccttgacagtttggaggaatcctggtgagaagtctggacagctgatcacctgaaagagaggagccaagaaaatcaatctaaacatttgtgggaagttgtattcatcaataatgaaatgctgactaaggaacaaggtaatgtaataggaataccatttaacatggacgtaagttcttttccttccagaaaaatgttctgtcagtatgactcacgtggaatgagtttcaacactgtttcagaattggttatcagtaagataaactatttaggaaaaaagtctgacgaatttaatgcatgtgggaaattgttactcaatattaagcatgatgaaactcatactcgagagaaaaatgaagttttgaaaaataggaacactctgagtcatcgtgagaacactttgcagcatgagaagattcaaactttagaccacaattttgaatacagtatatgtcaggaaaccctccttgaaaaggcagtattcaatacacggaagagagagaatgcagaagagaataactgtgactataatgaatttgggagaactttctgtgatagttcatccctcttgttccatcagatacctccatcaaaggacagtcactatgaatttagtgattgtgagaagttcttatgtgtgaagtccaccctttctaaacatgatggggtacctgtgaaacactatgattgtggtgaaagtgggaataatttcaggaggaaattgtgtctgtcacagcttcagaaaggtgataaaggagagaaacactttg

SEQ ID NO: 6697 - protein, 90 aa, Homo sapiens; identical to SEQ ID NO: 6669

SEQ ID NO: 6698 - DNA, 1328 bp, Homo sapiens
atgcctcatccactggctacctctgcgtttctgcgtttccgcctttccttttgtttgtctcacgttttgcgtgggaggcggtcccgggatttcaggggtctaccggctctcttatggcgaatgcaacccgaagagagagtgagctgtatcttcagagttgtctccgtctttccaagaacagaacaaaatgaacaaggtagatcagaagttccaggggtcagtatcatttaaagatgtgactgtgggcttcacccaggaggagtggcagcacctggaccctagtcagagggctctgtatagagatgtgatgctggagaactacagcaaccttgtctcagtggggtattgtgctcacaaaccagaggtgatcttcaggctggaacaaggagaagaaccatggagactggaggaagaattcccaagccagagctttccaggctcctcttggctatggtggtttcccagactttccttgttttggatgaccttgacagtttggaggaatcctgagcactttctttctgtcactgcaagatggtccaggcttatcttatatatttcctttctgaaatcagtcaccatttcttcagaagtctggacagctgatcacctgaaagagaggagccaagaaaatcaatctaaacatttgtgggaagttgtattcatcaataatgaaatgctgactaaggaacaaggtaatgtaataggaataccatttaacatggacgtaagttcttttccttccagaaaaatgttctgtcagtatgactcacgtggaatgagtttcaacactgtttcagaattggttatcagtaagataaactatttaggaaaaaagtctgacgaatttaatgcatgtgggaaattgttactcaatattaagcatgatgaaactcatactcgagagaaaaatgaagttttgaaaaataggaacactctgagtcatcgtgagaacactttgcagcatgagaagattcaaactttagaccacaattttgaatacagtatatgtcaggaaaccctccttgaaaaggcagtattcaatacacggaagagagagaatgcagaagagaataactgtgactataatgaatttgggagaactttctgtgatagttcatccctcttgttccatcagatacctccatcaaaggacagtcactatgaatttagtgattgtgagaagttcttatgtgtgaagtccaccctttctaaacatgatggggtacctgtgaaacactatgattgtggtgaaagtgggaataatttcaggaggaaattgtgtctgtcacagcttcagaaaggtgataaaggagagaaacactttg

SEQ ID NO: 6699 - protein, 379 aa, Homo sapiens
MNKVDQKFQGSVSFKDVTVGFTQEEWQHLDPSQRALYRDVMLENYSNLVSVGYCAHKPEVIFRLEQGEEPWRLEEEFPSQSFPGSSWLWWFPRLSLFWMTLTVWRNPEHFLSVTARWSRLILYISFLKSVTISSEVWTADHLKERSQENQSKHLWEVVFINNEMLTKEQGNVIGIPFNMDVSSFPSRKMFCQYDSRGMSFNTVSELVISKINYLGKKSDEFNACGKLLLNIKHDETHTREKNEVLKNRNTLSHRENTLQHEKIQTLDHNFEYSICQETLLEKAVFNTRKRENAEENNCDYNEFGRTFCDSSSLLFHQIPPSKDSHYEFSDCEKFLCVKSTLSKHDGVPVKHYDCGESGNNFRRKLCLSQLQKGDKGEKH

SEQ ID NO: 6700 - DNA, 1175 bp, Homo sapiens
atgcctcatccactggctacctctgcgtttctgcgtttccgcctttccttttgtttgtctcacgttttgcgtgggaggcggtcccgggatttcaggggtctaccggctctcttatggcgaatgcaacccgaagagagagtgagctgtatcttcagagttgtctccgtctttccaagaacagaacaaaatgaacaaggtagatcagaagttccaggggtcagtatcatttaaagatgtgactgtgggcttcacccaggaggagtggcagcacctggaccctagtcagagggctctgtatagagatgtgatgctggagaactacagcaaccttgtctcagtggggtattgtgctcacaaaccagaggtgatcttcaggctggaacaaggagaagaaccatggagactggaggaagaattcccaagccagagctttccagaagtctggacagctgatcacctgaaagagaggagccaagaaaatcaatctaaacatttgtgggaagttgtattcatcaataatgaaatgctgactaaggaacaaggtaatgtaataggaataccatttaacatggacgtaagttcttttccttccagaaaaatgttctgtcagtatgactcacgtggaatgagtttcaacactgtttcagaattggttatcagtaagataaactatttaggaaaaaagtctgacgaatttaatgcatgtgggaaattgttactcaatattaagcatgatgaaactcatactcgagagaaaaatgaagttttgaaaaataggaacactctgagtcatcgtgagaacactttgcagcatgagaagattcaaactttagaccacaattttgaatacagtatatgtcaggaaaccctccttgaaaaggcagtattcaatacacggaagagagagaatgcagaagagaataactgtgactataatgaatttgggagaactttctgtgatagttcatccctcttgttccatcagatacctccatcaaaggacagtcactatgaatttagtgattgtgagaagttcttatgtgtgaagtccaccctttctaaacatgatggggtacctgtgaaacactatgattgtggtgaaagtgggaataatttcaggaggaaattgtgtctgtcacagcttcagaaaggtgataaaggagagaaacactttg

SEQ ID NO: 6701 - protein, 328 aa, Homo sapiens
MNKVDQKFQGSVSFKDVTVGFTQEEWQHLDPSQRALYRDVMLENYSNLVSVGYCAHKPEVIFRLEQGEEPWRLEEEFPSQSFPEVWTADHLKERSQENQSKHLWEVVFINNEMLTKEQGNVIGIPFNMDVSSFPSRKMFCQYDSRGMSFNTVSELVISKINYLGKKSDEFNACGKLLLNIKHDETHTREKNEVLKNRNTLSHRENTLQHEKIQTLDHNFEYSICQETLLEKAVFNTRKRENAEENNCDYNEFGRTFCDSSSLLFHQIPPSKDSHYEFSDCEKFLCVKSTLSKHDGVPVKHYDCGESGNNFRRKLCLSQLQKGDKGEKH

SEQ ID NO: 6702 - DNA, 630 bp, Homo sapiens
atgcctcatccactggctacctctgcgtttctgcgtttccgcctttccttttgtttgtctcacgttttgcgtgggaggcggtcccgggatttcaggggtctaccggctctcttatggcgaatgcaacccgaagagagagtgagctgtatcttcagagttgtctccgtctttccaagaacagaacaaaatgaacaaggtagatcagaagttccaggggtcagtatcatttaaagatgtgactgtgggcttcacccaggaggagtggcagcacctggaccctagtcagagggctctgtatagagatgtgatgctggagaactacagcaaccttgtctcagtggggtattgtgctcacaaaccagaggtgatcttcaggctggaacaaggagaagaaccatggagactggaggaagaattcccaagccagagctttccagggtggagtgcaatggcgcgatcttggctcactgcaacctctgcttctgggattcaagcgattctgctgtctcagcctcccaagtagctaggactacaggcacatgccatcatgcctggctaacttttttgtatttttagtagagacagggtttcaccatgttggccgggctggtctcaacctcctgacatcag

SEQ ID NO: 6703 - protein, 111 aa, Homo sapiens
MNKVDQKFQGSVSFKDVTVGFTQEEWQHLDPSQRALYRDVMLENYSNLVSVGYCAHKPEVIFRLEQGEEPWRLEEEFPSQSFPGWSAMARSWLTATSASGIQAILLSQPPK

SEQ ID NO: 6704 - DNA, 436 bp, Homo sapiens
gtgaagcaggaactcgctgagcttcaaggaatatgaaaccgcttcttttagctctcccagaactctccacattgatcccactctggctactagcaccagctggacagtaacgactttcagaggtgaacacaatgtgcttcaacatgccttcctgaaagttcagttagcaactggacagcatctgaattccagttctgcaaagctcttctctgaatacctgaggtaccagcatgatcctggcactgcccctgcctccgctgtcttgtctaattctagctctctggggccactcttgtgagtttctaggttccgagaaccttaatcttttccattgtttcccagccctagacaggtagctgctacctgatgttgtcatcctgtgttagctcagtgttcatttttaccattaaaacacctgctttaaataatcttcatc

SEQ ID NO: 6705 - protein, 41 aa, Homo sapiens
MILALPLPPLSCLILALWGHSCEFLGSENLNLFHCFPALDR

SEQ ID NO: 6706 - DNA, 1847 bp, Homo sapiens
agaacattggctgcgacgacagcgactgaagcgcagctggagtggtaagatggcggacgagcagctgcagcagctccgtgcggtgctacagggggaggggaaggtggtttctcctgacacaagctggaggccggagcctgtggcaccctggcttgcctcactgaagctggtggctgtgacagggactgcacggctgctggagtggtagaaaggcagcccaggagccgcagccccagtgggcccaacggttcctgtgggtggggagccagccaccttggagtctccagttcactgaaacctgtcactgccacccagtggccaccatgacaaggaagccatcattctgtagaaggcagtgacggaacagtaccagcagaaattgaaggaccagcagaagggatcatggccaaagttgcagtgtccccccgctcgttgaagatgaggagttctcagagagcgggatgtttgtgacattcctcatgtcagctctcgagtccatgactctcactcggtcgtccaggctggagtgcagtggcaccatcttggctcattgcaacatctggctcccaggttcaatcgattcttctgcctcagccttctgagtagctggaattaacaggtgtatgccaacttatctggctaattttgttgtgtatttttctttcagtacagactgggtttcaccatgttggccatgctggtcttgagctcctcacctcaggtgatccacatgcctcagcctcctaaagtgctgggattataggcgtcagccaccgcttctggcctagatcattaacatatcactatgatactaaaattccctctgccaaagaaaatcttgccattttgtgacatgagttgtataaagatgtatgtttatatgcactgaacctgtgcacctagagttccaccctgctcatgctaacgttgttctccctccccgtacctagttcttaaaaactccatgccttccatttttcagggaaagggtgtctttagagcaagaactcttttcttctccatcccaggcagggaaaaaacccacttggccttgtttctgattgggttttcttgctttgcgactaatacaaagcaggaaaaaactccctttatcagtgataaaaacaagtaagattattatttacccacctattctagctaggggtcatgggtggccggagtctctcctagcaactcagggcgctaggcagaaccagccctggatctggaatagggtgccatcatatggcagagtgtacatacacacacacacacacacacacacacacacacacacagagctcaaatggggactatttagaaatgatagttcacataatgggcacatctttgagatgtgggaggaaactgggagtacccagtgaaaacccatgtggacctggggagaatgtgtaaaggacacacaggaagtggccagctgggagttgattgttttttcttatcaacattacaatgaaatgatactgaacgaaatgacattattcaagtacctgctgtaatagtcagactccttcatataaaattcaaagccctctacactcgggcactacattggacttccatcctacacctacattctagccactgtactacacatcatttaccaaaggcgctgtatacttctgtgctaccaaacatttgccagtctggttccctctgcatttcaagattacacacccctcataatcctgcaaagcctttcgtatcaatttttctgtgaagcttttcagaatccaccaccactcccaccatcaccccaactccctgagagggcagatctctctctccgtttggcagccacttttaataaagcatttttcactgat

SEQ ID NO: 6707 - protein, 46 aa, Homo sapiens
MFVTFLMSALESMTLTRSSRLECSGTILAHCNIWLPGSIDSSASAF

SEQ ID NO: 6708 - DNA, 519 bp, Homo sapiens
ctggagtggtaagatggcggacgagcagctgcagcagctccgtgcggtgctacagggggaggggaaggtggtttctcctgacacaagctggaggccggagcctgtggcaccctggcttgcctcactgaagctggtggctgtgacagggactgcacggctgctggagtggtagaaaggcagcccaggtaggaagccatcattctgtagaaggcagtgacggaacagtaccagcagaaattgaaggaccagcagaagggatcatggccaaagttgcagtgtccccccgctcgttgaagatgaggagttctcagagagcgggatgtttgtgacattcctcatgtcagctctcgagtccatgactctcactcggtcgtccaggctggagtgcagtggcaccatcttggctcattgcaacatctggctcccaggttcaatcgattcttctgcctcagccttctgagtagctggaattaacaggtgtatgccaacttatctggctaattttgttgtgtatttttc

SEQ ID NO: 6709 - protein, 46 aa, Homo sapiens; identical to SEQ ID NO: 6707

SEQ ID NO: 6710 - DNA, 939 bp, Homo sapiens
atgctccactcacacctggctcaggtgccagcagaaggatgggaccctccagattctgcaggagaagggggaggactcctccttgccctggcggcacctccactgctgccaccgaggccgacggtacagcacccacagcttcctacccacgccaggccaggtggctccgcagtgctcctactcccacttcccaggacccccagacttgctgctgctgccaccactaaggccaatgccaatacaaccactgctgctgtcaccctcgatgcaccggcactccctacaaggcccctactagctggccacagccacagccctgccacaggtggccacagctggctgccctcctacctactgctccaaagtgccacccaccgcagtgacgccagccgccacgtcccaggctccaggctccagcctccaccctccagcgtgtggcaggttgctcctccttctggcacagagcagctgggccacgcccccaacccgtccccacctcgaacactgcagcacccaatagagaccccaacccgcccccacactgggagaaataacgcccgtaacagtgccccaagccccactccatccccgggcagtgcagccctggatagcaccccaacccgctcctggctgcaggcagtgatgcccggaatagcgcccccaagccgctccccaccgtgggcagtgcagttgagaatactcacctacctgggctgcctttctaccactccagcagccgtgcagtccctgtcacagccaccagcttcagtgaggcaagccagggtgccacaggctccggcctccagcttgtgtcaggagaaaccaccttcccctccccctgtagcaccgcacggagctgctgcagctgctcgtccgccatcttaccactccagctgcgcttcagtcgctgtcgtcgcagccaatgttctaattggatga

SEQ ID NO: 6711 - protein, 312 aa, Homo sapiens [sequence omitted]

SEQ ID NO: 6712 - DNA, 3957 bp, Homo sapiens
cttcctgccatgtggtgacagattaaaagctgctatacactttggaactggaaactgagctcccaatataaaggagataagccatcatgcttacaatatgttgtgcagagctcactggtgggcagtttttcttaacaatgcatcaggacttttgctatttgtaaaggaagcttaaaggaagctgagagtgctgagggcacatctgaaaccactggaggttggcgacgtggaggtcaggtagtagtgctctcccaccaggagtccctctgcacccctggagagagcagtcattatgcaggacaacccatctgctcagaactttcagtggcgacttgtggtgtgactctgttcccattcatctatgtgctgctgtaggcttagcttcccacagcctccccagctttgccatttgtcattatcatttactcttaatatttattctatctatgaccctgatgcacagagtgatagctgatagtctcttaaaacaacgtttacaattattttgacagtttaccgtgttttgttctctcaacaatacttagaatttgtctgagttatagttgcatagacggcaattttcctgacctagttttctgactatgatttatgggtcagtaaactccttaaatgatggaatataacatctcaggccacagggaacacttactatcacatgctcactgttgcaggacggatgcgtggccagcctcaggttgctaaatgttagggtgatctgccttccttctggggcggtgattctccacttgtagatccggccatgaggatttaggttcgggtagttgggagaagtagatgttccagcagagccctgaagatccccaccacactctgatgtgggggaagaaagccaagaaaacttccaatcaaatcaaaatgtctccttccatcaggaaagctctcaaaattcaggtgtcctgcgtgtacaaagaaaataataaaaaacaagaccttgcccatgaagaaatattaatctctctcaagaaaacaggaaaacatgaatgaaaattaacatattcaaatatatgaagaagtgaaaaaaatgcaaccagttaggggaaggatatctcaggataatgaggaaggccagttttttggttgaaaaagtggtttgagacaacagagtgacaaatatctgccttatgctactgccaggagacatgcatgaccctctttctgcctcaagctatagaacacccctcaaataacggcatctggcaatgggatgtctcagcagcaacaggttgccttcccactaccgttgctctccccaggtggcctccagggtaggctatatgacacctgggctctggacatccattgttaatggtagaattgaggtagagaatcactggtactgcccaaagcccattaatctgcacttctttgcagagtatagacatgctttgcctttcttggaagtgaagaaacttcagaggctgaataagtacatgcgaaaataaacaccccaaagagagcagatatatttcactaaccagaagtatgatagtcccaggtctccacaaagtctttttcacagccagaggaattctgaaggttaaaatcttcaaaagagatggtgagatagtgtctggagagcccctggagatgccaatcacagaataagttgtctctatatggaagcattagatggccaatgctttcaacaacaccactttgccctgttactcttcccccacactgagctgaaaaaaaaaagaaagaaagaaagaaaagaaagaaaggattctattacaaactgtgtttttttcatttcaccagcacatgtgaaaacttttaggtgccaagtgactatgaattgaagtttttaaaattctgaaaatgcttagtgctttcctcattatttgaattctagggttgatgtaaacagaagtgataccacaagtccaatccaataatgggaaacaagatgacgaccaaatggcacattctgtaatgtcacattaattcttttgggacactatgtaagagctatcagttgcaagcaagtttcatctcaagaacaaactggtagactcatctgacctgcctagaaccttgtgttgattctaaagactgaacccaagctcacctggaaggggggacacctgctatatctagttttactatcaactaaactttcactactgtaactgatatctcagggccttgaaaattactattcaattatgtcttattagctggatgtggtagctaattgaattatatgcagcttgacccgggatataatatgatctatggtgtagttaaatactgttacaactagcctttctgaacttttgctatattaaatatttgtttggtttgtgtctagacctatcagatactaaattgtgtgctattgtgaccatactatagtgaatcttcaacaagcaaagttactgctcaatttttaagtaaggaaatcaaaatcctgaagagacatatttgctttttatccagtgactgatttggcactagagactcagagaaaaaaaaaaagcttaatcattttatatatgatgaggaattcaaagacattgttctaaatatagttatctggttcttaaatagttgtattacttaaagtaataaacatactgtagttcttccttttccttggcggatacattccaagtccccccagtgagtgcctaaaaccttggatagtaccaaaccctatatagacatatagacaatttttttctacatatatgtacctatgataaagcttgctttatcaattaaacgtagtaagagattaactaataataaaatagaacaatcataacaatatactgtaagaaaagttatgtaaatgtggtctctcaaaatatcttggtgtactgtactcacctattttttgggcctctgtttaccaagtgcattgaaaccatggaacatgaaaccatggataagagagaactactgaatttcatagtaagcagaagaaacaggagtttgatttaactacacatatttcttcacaaataagttagaaaaaatataaaatattcaagtttactaagattacattttaaaataaaaattaaaagagaaattaaagttgatgactgtggttttaaacatttacactccttacttatttatagcattaaaatatttttaaaattatgcagatagaatgacttctttttaaaaagtcatggttttaaaaaaagttttaacatattcatcctgtaataactcttttatttaatataaaaatgttttccagggtttttatagttttgtgttttacagttaagtcttcaatctatcttgaattgatttttgtatatggtataaggaaggggtccagtttcaatcttccgcatattgctagccagttctcccagcatcatttattggatagggagtcttttccccattgcttgcttttgtcagctttgttgaagatcagatgcctgtaagtgtgaggccctatttctaagctctctattccattttattggtctatgtgtctatttttgtaccagtaccatgctgttttggttactgtacccctgtagtatagtttcaagtcaggtattgtgatgcctccagctttgttcttttagtttaggattgccttggttatttgggttctttctggggtccatatgagttttaaaatagttttttctagtactgtgaagaatgtcatggtagtttgataggaatagcattgaatatgtaaatttggggaagcagtatgaccactttaataatactgattcttcctatctatgagcatggaattttttttcatttgatagggtggagggtgggagaagggagaggggcagaaaaaatagctattagatactaggcttagtacctgagtgatgaaataatctttataatgacccccatggcacgagtttacctatataacaaacctgcacatgtaaccctgaacctaaaataaaagtt

SEQ ID NO: 6713 - protein, 69 aa, Homo sapiens
MFQQSPEDPHHTLMWGKKAKKTSNQIKMSPSIRKALKIQVSCVYKENNKKQDLAHEEILISLKKTGKHE

SEQ ID NO: 6714 - DNA, 2350 bp, Homo sapiens
ctgtggctctgtggtaggggaatgccaccaactccctgaggagcagccgtgtggtatgattggtttttgaaaataaagttaattcagagaaggtaaaactttctcttcggaatttcccacataatgattatgaggatgtttttgaagagccttcagaaagtggcagtgatcccagcatgtggacagccagaggccccttcagaagagacaggtggagcagtgaggatgaggaggctgcagggccatcacaggctctctcccctctactttctgatacgcgcaaaattgtttctgaaggagaactagatcagttggctcagattcggccattaatattcaattttcatgagcagacagccatcaaggattgtttgaaaatccttgaggaaaaaacagcagcgtatgatatcatgcaggaatttatgacgggaactagtcactctgtaaaacagttgcagttcaccaagtggccagaccatggcactcctgcctcagcagatagcttcataaaatatattcgttatgcaaggaagagccaccttacaggacccatggttgttcactgcagtgccggcataggccggacaggggtgttcctatgtgtggatgtcgtgttctgtgccatcgtaaagaactgttcattcaacatcatggatatagtggcccaaatgagagaacaacgttctggcatggttcaaacgaaggagcagtatcacttttgttacgatattgtgcttgaagttcttcggaaacttctgactttggattaagaaagacttctgttgcctctcacttgaaattaccaagtgggtttgcacctcctcataaagaacatgtttgcactgtgctgaagggctttgctatgcatacaatctgctttcttggtttatcagtttattttctttctaaaagctccctgaagggcaatatcatttggcttggggtgatcagtgtttacttattgatcttgctagacaatatcaaaataacttcccacattttccagtgaaacagatgttacataaaacgattgcagcttggctatttggttgaagggattacagagcccaataaaggatttaaaatatattcattaagattttatttggaaaggtggctggagagagctgaggatttccaggactttgtaagttcttattctgggagaacataaggccaataatcatgacctcttccaggcatttttaagacagatgtctattcatgttctttagctagagcctgtactttttgctggcatttgaataacccagtttaaaaagagtccagttagggtggactaactttggacacaaattggcttccatttcctacattttcatactgctgccttcctacagctgctagaccaagacctgttggtctgggaagcatttcatggatagggagagctcctctcggtgaacagtccaaaactaaaatagatgtttatatagaaagcccaagaggagacttttgccatgcctgagttctttcctatcccaccctaacacttaacatattacttagtctgctttgttaaaagcaagtattacctttaacttgcctcttactctttgccctttagctaactaataaagtttgatataggcattattatataattctgagtcattcatggtatctctcatgtttgatgtatttttcaaactaagatctatgatagttttttttccagagttccattaaatcatttatttcctttactttctcacctctgttgaaacatttagaaactggatttgggaacccaattttggaaaaccagattcatagtcatgaaaatggaaacttccatattctgtttttgaaaagatgtggccattattacagtaattttattataggactttgcctcgtacaattaatagtgatattttggacaaggagttctggtgacaagctatacctaattataagctataaaacaatagatatgagtgtttgtacagtttaactcaatggagatcagaatattctatgtattgagaaaatgtttaatatcaatctataaatcttgaatttctaagaggcttattttgttcttttggctgaatgagtatatttgaattggttgaataattaataattctcattgtaaaaataattatatgccaaaaatatatttgatgttaaatcaaatagatgattctgtttacattgttcatatgaataataatctgtgttaatttcattttgataattggcctttaatatttgtatctctaattttattttctctctgttactgtaaaataatagctataatgtataacaattttcttcagaagaattctatgctattattaaaataaaatatttactgtgt

SEQ ID NO: 6715 - protein, 197 aa, Homo sapiens
MWTARGPFRRDRWSSEDEEAAGPSQALSPLLSDTRKIVSEGELDQLAQIRPLIFNFHEQTAIKDCLKILEEKTAAYDIMQEFMTGTSHSVKQLQFTKWPDHGTPASADSFIKYIRYARKSHLTGPMVVHCSAGIGRTGVFLCVDVVFCAIVKNCSFNIMDIVAQMREQRSGMVQTKEQYHFCYDIVLEVLRKLLTLD

SEQ ID NO: 6716 - DNA, 2322 bp, Homo sapiens
ctgtggctctgtggtaggggaatgccaccaactccctgaggagcagccgtgtggtatgattgatgattcaacacgcgttcctcttggaaaaagcaaggactacatcaatgctagttatattagaatagtcaattgtggagaagagtatttttatatcgctactcaaggaccactgctgagcaccatagatgacttttggcaaatggtgttggaaaataattcaaatgttattgccatgataaccagagagatagaaggtggaattatcaaatgctaccattactggcccatttctctgaagaagccattggaattgaaacacttccgtgtattcctggagaactaccagatacttcaatatttcatcattcgaatgtttcaagttgtggagaagtccacgggaactagtcactctgtaaaacagttgcagttcaccaagtggccagaccatggcactcctgcctcagcagatagcttcataaaatatattcgttatgcaaggaagagccaccttacaggacccatggttgttcactgcagtgccggcataggccggacaggggtgttcctatgtgtggatgtcgtgttctgtgccatcgtaaagaactgttcattcaacatcatggatatagtggcccaaatgagagaacaacgttctggcatggttcaaacgaaggagcagtatcacttttgttacgatattgtgcttgaagttcttcggaaacttctgactttggattaagaaagacttctgttgcctctcacttgaaattaccaagtgggtttgcacctcctcataaagaacatgtttgcactgtgctgaagggctttgctatgcatacaatctgctttcttggtttatcagtttattttctttctaaaagctccctgaagggcaatatcatttggcttggggtgatcagtgtttacttattgatcttgctagacaatatcaaaataacttcccacattttccagtgaaacagatgttacataaaacgattgcagcttggctatttggttgaagggattacagagcccaataaaggatttaaaatatattcattaagattttatttggaaaggtggctggagagagctgaggatttccaggactttgtaagttcttattctgggagaacataaggccaataatcatgacctcttccaggcatttttaagacagatgtctattcatgttctttagctagagcctgtactttttgctggcatttgaataacccagtttaaaaagagtccagttagggtggactaactttggacacaaattggcttccatttcctacattttcatactgctgccttcctacagctgctagaccaagacctgttggtctgggaagcatttcatggatagggagagctcctctcggtgaacagtccaaaactaaaatagatgtttatatagaaagcccaagaggagacttttgccatgcctgagttctttcctatcccaccctaacacttaacatattacttagtctgctttgttaaaagcaagtattacctttaacttgcctcttactctttgccctttagctaactaataaagtttgatataggcattattatataattctgagtcattcatggtatctctcatgtttgatgtatttttcaaactaagatctatgatagttttttttccagagttccattaaatcatttatttcctttactttctcacctctgttgaaacatttagaaactggatttgggaacccaattttggaaaaccagattcatagtcatgaaaatggaaacttccatattctgtttttgaaaagatgtggccattattacagtaattttattataggactttgcctcgtacaattaatagtgatattttggacaaggagttctggtgacaagctatacctaattataagctataaaacaatagatatgagtgtttgtacagtttaactcaatggagatcagaatattctatgtattgagaaaatgtttaatatcaatctataaatcttgaatttctaagaggcttattttgttcttttggctgaatgagtatatttgaattggttgaataattaataattctcattgtaaaaataattatatgccaaaaatatatttgatgttaaatcaaatagatgattctgtttacattgttcatatgaataataatctgtgttaatttcattttgataattggcctttaatatttgtatctctaattttattttctctctgttactgtaaaataatagctataatgtataacaattttcttcagaagaattctatgctattattaaaataaaatatttactgtgt

SEQ ID NO: 6717 - protein, 228 aa, Homo sapiens
MIDDSTRVPLGKSKDYINASYIRIVNCGEEYFYIATQGPLLSTIDDFWQMVLENNSNVIAMITREIEGGIIKCYHYWPISLKKPLELKHFRVFLENYQILQYFIIRMFQVVEKSTGTSHSVKQLQFTKWPDHGTPASADSFIKYIRYARKSHLTGPMVVHCSAGIGRTGVFLCVDVVFCAIVKNCSFNIMDIVAQMREQRSGMVQTKEQYHFCYDIVLEVLRKLLTLD

SEQ ID NO: 6718 - DNA, 2386 bp, Homo sapiens
ctgtggctctgtggtaggggaatgccaccaactccctgaggagcagccgtgtggtatgattggtgaacaaaaattgtttgctggcccccaggatactaactagacctttggcctgactcacaggacactaaggctccttttctgaagaagccttttaccagtctcatttaggggatgggaacaacatgtcttcacctagggactttagagcagagcctgtaaacgattatgagggaaatgactctgaagcagaagacttgaatttcagggagactttgccttcatcaagtcaggaaaacacacctagatcaaaggtttttgaaaataaagttaattcagagaaggtaaaactttctcttcggaatttcccacataatgattatgaggatgtttttgaagagccttcagaaagtggcagtgatcccagcatgtggacagccagaggccccttcagaagagacaggtggagcagtgaggatgaggaggctgcagggccatcacaggctctctcccctctactttctgatacgcgcaaaattgtttctgaaggagaactagatcagttggctcagattcggccattaatattcaattttcatgagcagacagccatcaaggattgtttgaaaatccttgaggaaaaaacagcagcgtatgatatcatgcaggaatttatgttcaacatcatggatatagtggcccaaatgagagaacaacgttctggcatggttcaaacgaaggagcagtatcacttttgttacgatattgtgcttgaagttcttcggaaacttctgactttggattaagaaagacttctgttgcctctcacttgaaattaccaagtgggtttgcacctcctcataaagaacatgtttgcactgtgctgaagggctttgctatgcatacaatctgctttcttggtttatcagtttattttctttctaaaagctccctgaagggcaatatcatttggcttggggtgatcagtgtttacttattgatcttgctagacaatatcaaaataacttcccacattttccagtgaaacagatgttacataaaacgattgcagcttggctatttggttgaagggattacagagcccaataaaggatttaaaatatattcattaagattttatttggaaaggtggctggagagagctgaggatttccaggactttgtaagttcttattctgggagaacataaggccaataatcatgacctcttccaggcatttttaagacagatgtctattcatgttctttagctagagcctgtactttttgctggcatttgaataacccagtttaaaaagagtccagttagggtggactaactttggacacaaattggcttccatttcctacattttcatactgctgccttcctacagctgctagaccaagacctgttggtctgggaagcatttcatggatagggagagctcctctcggtgaacagtccaaaactaaaatagatgtttatatagaaagcccaagaggagacttttgccatgcctgagttctttcctatcccaccctaacacttaacatattacttagtctgctttgttaaaagcaagtattacctttaacttgcctcttactctttgccctttagctaactaataaagtttgatataggcattattatataattctgagtcattcatggtatctctcatgtttgatgtatttttcaaactaagatctatgatagttttttttccagagttccattaaatcatttatttcctttactttctcacctctgttgaaacatttagaaactggatttgggaacccaattttggaaaaccagattcatagtcatgaaaatggaaacttccatattctgtttttgaaaagatgtggccattattacagtaattttattataggactttgcctcgtacaattaatagtgatattttggacaaggagttctggtgacaagctatacctaattataagctataaaacaatagatatgagtgtttgtacagtttaactcaatggagatcagaatattctatgtattgagaaaatgtttaatatcaatctataaatcttgaatttctaagaggcttattttgttcttttggctgaatgagtatatttgaattggttgaataattaataattctcattgtaaaaataattatatgccaaaaatatatttgatgttaaatcaaatagatgattctgtttacattgttcatatgaataataatctgtgttaatttcattttgataattggcctttaatatttgtatctctaattttattttctctctgttactgtaaaataatagctataatgtataacaattttcttcagaagaattctatgctattattaaaataaaatatttactgtgt

SEQ ID NO: 6719 - protein, 206 aa, Homo sapiens
MSSPRDFRAEPVNDYEGNDSEAEDLNFRETLPSSSQENTPRSKVFENKVNSEKVKLSLRNFPHNDYEDVFEEPSESGSDPSMWTARGPFRRDRWSSEDEEAAGPSQALSPLLSDTRKIVSEGELDQLAQIRPLIFNFHEQTAIKDCLKILEEKTAAYDIMQEFMFNIMDIVAQMREQRSGMVQTKEQYHFCYDIVLEVLRKLLTLD

SEQ ID NO: 6720 - DNA, 2118 bp, Homo sapiens
ctgtggctctgtggtaggggaatgccaccaactccctgaggagcagccgtgtggtatgattgtgttttctatttgatcagtttttccccccgcctttgttcagtaaacgattatgagggaaatgactctgaagcagaagacttgaatttcagggagactttgccttcatcaagtcaggaaaacacacctagatcaaaggtttttgaaaataaagttaattcagagaaggtaaaactttctcttcggaatttcccacataatgattatgaggatgtttttgaagagccttcagaaagtggcagtgatcccagcatgtggacagccagaggccccttcagaagagacaggtggagcagtgaggatgaggaggctgcagggccatcacaggctctctcccctctactttctgttcaacatcatggatatagtggcccaaatgagagaacaacgttctggcatggttcaaacgaaggagcagtatcacttttgttacgatattgtgcttgaagttcttcggaaacttctgactttggattaagaaagacttctgttgcctctcacttgaaattaccaagtgggtttgcacctcctcataaagaacatgtttgcactgtgctgaagggctttgctatgcatacaatctgctttcttggtttatcagtttattttctttctaaaagctccctgaagggcaatatcatttggcttggggtgatcagtgtttacttattgatcttgctagacaatatcaaaataacttcccacattttccagtgaaacagatgttacataaaacgattgcagcttggctatttggttgaagggattacagagcccaataaaggatttaaaatatattcattaagattttatttggaaaggtggctggagagagctgaggatttccaggactttgtaagttcttattctgggagaacataaggccaataatcatgacctcttccaggcatttttaagacagatgtctattcatgttctttagctagagcctgtactttttgctggcatttgaataacccagtttaaaaagagtccagttagggtggactaactttggacacaaattggcttccatttcctacattttcatactgctgccttcctacagctgctagaccaagacctgttggtctgggaagcatttcatggatagggagagctcctctcggtgaacagtccaaaactaaaatagatgtttatatagaaagcccaagaggagacttttgccatgcctgagttctttcctatcccaccctaacacttaacatattacttagtctgctttgttaaaagcaagtattacctttaacttgcctcttactctttgccctttagctaactaataaagtttgatataggcattattatataattctgagtcattcatggtatctctcatgtttgatgtatttttcaaactaagatctatgatagttttttttccagagttccattaaatcatttatttcctttactttctcacctctgttgaaacatttagaaactggatttgggaacccaattttggaaaaccagattcatagtcatgaaaatggaaacttccatattctgtttttgaaaagatgtggccattattacagtaattttattataggactttgcctcgtacaattaatagtgatattttggacaaggagttctggtgacaagctatacctaattataagctataaaacaatagatatgagtgtttgtacagtttaactcaatggagatcagaatattctatgtattgagaaaatgtttaatatcaatctataaatcttgaatttctaagaggcttattttgttcttttggctgaatgagtatatttgaattggttgaataattaataattctcattgtaaaaataattatatgccaaaaatatatttgatgttaaatcaaatagatgattctgtttacattgttcatatgaataataatctgtgttaatttcattttgataattggcctttaatatttgtatctctaattttattttctctctgttactgtaaaataatagctataatgtataacaattttcttcagaagaattctatgctattattaaaataaaatatttactgtgt

SEQ ID NO: 6721 - protein, 92 aa, Homo sapiens
MIMRMFLKSLQKVAVIPACGQPEAPSEETGGAVRMRRLQGHHRLSPLYFLFNIMDIVAQMREQRSGMVQTKEQYHFCYDIVLEVLRKLLTLD

SEQ ID NO: 6722 - DNA, 2504 bp, Homo sapiens
ccagctgcactgtgacgcgtgttggggcgcctatgcgagacgggaccgggacaggaaccctgtggctctgtggtaggggaatgccaccaactccctgaggagcagccgtgtggtatgattgtaaacgattatgagggaaatgactctgaagcagaagacttgaatttcagggagactttgccttcatcaagtcaggaaaacacacctagatcaaaggtttttgaaaataaagttaattcagagaaggtaaaactttctcttcggaatttcccacataatgattatgaggatgtttttgaagagccttcagaaagtggcagtgatcccagcatgtggacagccagaggccccttcagaagagacaggtggagcagtgaggatgaggaggctgcagggccatcacaggctctctcccctctactttctgatacgcgcaaaattgtttctgaaggagaactagatcagttggctcagattcggccattaatattcaattttcatgagcagacagccatcaaggattgtttgaaaatccttgaggaaaaaacagcagcgtatgatatcatgcaggaatttatgacgggaactagtcactctgtaaaacagttgcagttcaccaagtggccagaccatggcactcctgcctcagcagatagcttcataaaatatattcgttatgcaaggaagagccaccttacaggacccatggttgttcactgcagtgccggcataggccggacaggggtgttcctatgtgtggatgtcgtgttctgtgccatcgtaaagaactgttcattcaacatcatggatatagtggcccaaatgagagaacaacgttctggcatggttcaaacgaaggagcagtatcacttttgttacgatattgtgcttgaagttcttcggaaacttctgactttggattaagaaagacttctgttgcctctcacttgaaattaccaagtgggtttgcacctcctcataaagaacatgtttgcactgtgctgaagggctttgctatgcatacaatctgctttcttggtttatcagtttattttctttctaaaagctccctgaagggcaatatcatttggcttggggtgatcagtgtttacttattgatcttgctagacaatatcaaaataacttcccacattttccagtgaaacagatgttacataaaacgattgcagcttggctatttggttgaagggattacagagcccaataaaggatttaaaatatattcattaagattttatttggaaaggtggctggagagagctgaggatttccaggactttgtaagttcttattctgggagaacataaggccaataatcatgacctcttccaggcatttttaagacagatgtctattcatgttctttagctagagcctgtactttttgctggcatttgaataacccagtttaaaaagagtccagttagggtggactaactttggacacaaattggcttccatttcctacattttcatactgctgccttcctacagctgctagaccaagacctgttggtctgggaagcatttcatggatagggagagctcctctcggtgaacagtccaaaactaaaatagatgtttatatagaaagcccaagaggagacttttgccatgcctgagttctttcctatcccaccctaacacttaacatattacttagtctgctttgttaaaagcaagtattacctttaacttgcctcttactctttgccctttagctaactaataaagtttgatataggcattattatataattctgagtcattcatggtatctctcatgtttgatgtatttttcaaactaagatctatgatagttttttttccagagttccattaaatcatttatttcctttactttctcacctctgttgaaacatttagaaactggatttgggaacccaattttggaaaaccagattcatagtcatgaaaatggaaacttccatattctgtttttgaaaagatgtggccattattacagtaattttattataggactttgcctcgtacaattaatagtgatattttggacaaggagttctggtgacaagctatacctaattataagctataaaacaatagatatgagtgtttgtacagtttaactcaatggagatcagaatattctatgtattgagaaaatgtttaatatcaatctataaatcttgaatttctaagaggcttattttgttcttttggctgaatgagtatatttgaattggttgaataattaataattctcattgtaaaaataattatatgccaaaaatatatttgatgttaaatcaaatagatgattctgtttacattgttcatatgaataataatctgtgttaatttcattttgataattggcctttaatatttgtatctctaattttattttctctctgttactgtaaaataatagctataatgtataacaattttcttcagaagaattctatgctattattaaaataaaatatttactgtgt

SEQ ID NO: 6723 - protein, 269 aa, Homo sapiens
MIVNDYEGNDSEAEDLNFRETLPSSSQENTPRSKVFENKVNSEKVKLSLRNFPHNDYEDVFEEPSESGSDPSMWTARGPFRRDRWSSEDEEAAGPSQALSPLLSDTRKIVSEGELDQLAQIRPLIFNFHEQTAIKDCLKILEEKTAAYDIMQEFMTGTSHSVKQLQFTKWPDHGTPASADSFIKYIRYARKSHLTGPMVVHCSAGIGRTGVFLCVDVVFCAIVKNCSFNIMDIVAQMREQRSGMVQTKEQYHFCYDIVLEVLRKLLTLD

SEQ ID NO: 6724 - DNA, 2479 bp, Homo sapiens
tggacccaactggcgaggctgctggggttgcagcgggacagttggggcggccccgcaggcccaggtgaacaaaaattgtttgctggcccccaggatactaactagacctttggcctgactcacaggacactaaggctccttttctgaagaagccttttaccagtctcatttaggggatgggaacaacatgtcttcacctagggactttagagcagagcctgtaaacgattatgagggaaatgactctgaagcagaagacttgaatttcagggagactttgccttcatcaagtcaggaaaacacacctagatcaaaggtttttgaaaataaagttaattcagagaaggtaaaactttctcttcggaatttcccacataatgattatgaggatgtttttgaagagccttcagaaagtggcagtgatcccagcatgtggacagccagaggccccttcagaagagacaggtggagcagtgaggatgaggaggctgcagggccatcacaggctctctcccctctactttctgatacgcgcaaaattgtttctgaaggagaactagatcagttggctcagattcggccattaatattcaattttcatgagcagacagccatcaaggattgtttgaaaatccttgaggaaaaaacagcagcgtatgatatcatgcaggaatttatggctttagaacttaagaatctgcctggtgagttcaactctgggaatcaaccaagcaacagagaaaaaaatagataccgagatattcttccatttcaacatcatggatatagtggcccaaatgagagaacaacgttctggcatggttcaaacgaaggagcagtatcacttttgttacgatattgtgcttgaagttcttcggaaacttctgactttggattaagaaagacttctgttgcctctcacttgaaattaccaagtgggtttgcacctcctcataaagaacatgtttgcactgtgctgaagggctttgctatgcatacaatctgctttcttggtttatcagtttattttctttctaaaagctccctgaagggcaatatcatttggcttggggtgatcagtgtttacttattgatcttgctagacaatatcaaaataacttcccacattttccagtgaaacagatgttacataaaacgattgcagcttggctatttggttgaagggattacagagcccaataaaggatttaaaatatattcattaagattttatttggaaaggtggctggagagagctgaggatttccaggactttgtaagttcttattctgggagaacataaggccaataatcatgacctcttccaggcatttttaagacagatgtctattcatgttctttagctagagcctgtactttttgctggcatttgaataacccagtttaaaaagagtccagttagggtggactaactttggacacaaattggcttccatttcctacattttcatactgctgccttcctacagctgctagaccaagacctgttggtctgggaagcatttcatggatagggagagctcctctcggtgaacagtccaaaactaaaatagatgtttatatagaaagcccaagaggagacttttgccatgcctgagttctttcctatcccaccctaacacttaacatattacttagtctgctttgttaaaagcaagtattacctttaacttgcctcttactctttgccctttagctaactaataaagtttgatataggcattattatataattctgagtcattcatggtatctctcatgtttgatgtatttttcaaactaagatctatgatagttttttttccagagttccattaaatcatttatttcctttactttctcacctctgttgaaacatttagaaactggatttgggaacccaattttggaaaaccagattcatagtcatgaaaatggaaacttccatattctgtttttgaaaagatgtggccattattacagtaattttattataggactttgcctcgtacaattaatagtgatattttggacaaggagttctggtgacaagctatacctaattataagctataaaacaatagatatgagtgtttgtacagtttaactcaatggagatcagaatattctatgtattgagaaaatgtttaatatcaatctataaatcttgaatttctaagaggcttattttgttcttttggctgaatgagtatatttgaattggttgaataattaataattctcattgtaaaaataattatatgccaaaaatatatttgatgttaaatcaaatagatgattctgtttacattgttcatatgaataataatctgtgttaatttcattttgataattggcctttaatatttgtatctctaattttattttctctctgttactgtaaaataatagctataatgtataacaattttcttcagaagaattctatgctattattaaaataaaatatttactgtgt

SEQ ID NO: 6725 - protein, 226 aa, Homo sapiens; identical to SEQ ID NO: 915

SEQ ID NO: 6726 - DNA, 1994 bp, Homo sapiens
aggctaggcgtggacccaactggcgaggctgctggggttgcagcgggacagttggggcggccccgcaggcccaggtttttgaaaataaagttaattcagagaaggtaaaactttctcttcggaatttcccacataatgattatgaggatgtttttgaagagccttcagaaagtggcagtgatcccagcatgtggacagccagaggccccttcagaagagacaggtggagcagtgaggatgaggaggctgcagggccatcacaggctctctcccctctactttctgttcaacatcatggatatagtggcccaaatgagagaacaacgttctggcatggttcaaacgaaggagcagtatcacttttgttacgatattgtgcttgaagttcttcggaaacttctgactttggattaagaaagacttctgttgcctctcacttgaaattaccaagtgggtttgcacctcctcataaagaacatgtttgcactgtgctgaagggctttgctatgcatacaatctgctttcttggtttatcagtttattttctttctaaaagctccctgaagggcaatatcatttggcttggggtgatcagtgtttacttattgatcttgctagacaatatcaaaataacttcccacattttccagtgaaacagatgttacataaaacgattgcagcttggctatttggttgaagggattacagagcccaataaaggatttaaaatatattcattaagattttatttggaaaggtggctggagagagctgaggatttccaggactttgtaagttcttattctgggagaacataaggccaataatcatgacctcttccaggcatttttaagacagatgtctattcatgttctttagctagagcctgtactttttgctggcatttgaataacccagtttaaaaagagtccagttagggtggactaactttggacacaaattggcttccatttcctacattttcatactgctgccttcctacagctgctagaccaagacctgttggtctgggaagcatttcatggatagggagagctcctctcggtgaacagtccaaaactaaaatagatgtttatatagaaagcccaagaggagacttttgccatgcctgagttctttcctatcccaccctaacacttaacatattacttagtctgctttgttaaaagcaagtattacctttaacttgcctcttactctttgccctttagctaactaataaagtttgatataggcattattatataattctgagtcattcatggtatctctcatgtttgatgtatttttcaaactaagatctatgatagttttttttccagagttccattaaatcatttatttcctttactttctcacctctgttgaaacatttagaaactggatttgggaacccaattttggaaaaccagattcatagtcatgaaaatggaaacttccatattctgtttttgaaaagatgtggccattattacagtaattttattataggactttgcctcgtacaattaatagtgatattttggacaaggagttctggtgacaagctatacctaattataagctataaaacaatagatatgagtgtttgtacagtttaactcaatggagatcagaatattctatgtattgagaaaatgtttaatatcaatctataaatcttgaatttctaagaggcttattttgttcttttggctgaatgagtatatttgaattggttgaataattaataattctcattgtaaaaataattatatgccaaaaatatatttgatgttaaatcaaatagatgattctgtttacattgttcatatgaataataatctgtgttaatttcattttgataattggcctttaatatttgtatctctaattttattttctctctgttactgtaaaataatagctataatgtataacaattttcttcagaagaattctatgctattattaaaataaaatatttactgtgt

SEQ ID NO: 6727 - protein, 92 aa, Homo sapiens; identical to SEQ ID NO: 6721

SEQ ID NO: 6728 - DNA, 1928 bp, Homo sapiens
gcaggtgggattggatagcgacgaaggccggcaggctaggcgtggacccaactggcgaggctgctggggttgcagcgggacagttggggcggccccgcaggcccagtggcagtgatcccagcatgtggacagccagaggccccttcagaagagacaggtggagcagtgaggatgaggaggctgcagggccatcacaggctctctcccctctactttctgttcaacatcatggatatagtggcccaaatgagagaacaacgttctggcatggttcaaacgaaggagcagtatcacttttgttacgatattgtgcttgaagttcttcggaaacttctgactttggattaagaaagacttctgttgcctctcacttgaaattaccaagtgggtttgcacctcctcataaagaacatgtttgcactgtgctgaagggctttgctatgcatacaatctgctttcttggtttatcagtttattttctttctaaaagctccctgaagggcaatatcatttggcttggggtgatcagtgtttacttattgatcttgctagacaatatcaaaataacttcccacattttccagtgaaacagatgttacataaaacgattgcagcttggctatttggttgaagggattacagagcccaataaaggatttaaaatatattcattaagattttatttggaaaggtggctggagagagctgaggatttccaggactttgtaagttcttattctgggagaacataaggccaataatcatgacctcttccaggcatttttaagacagatgtctattcatgttctttagctagagcctgtactttttgctggcatttgaataacccagtttaaaaagagtccagttagggtggactaactttggacacaaattggcttccatttcctacattttcatactgctgccttcctacagctgctagaccaagacctgttggtctgggaagcatttcatggatagggagagctcctctcggtgaacagtccaaaactaaaatagatgtttatatagaaagcccaagaggagacttttgccatgcctgagttctttcctatcccaccctaacacttaacatattacttagtctgctttgttaaaagcaagtattacctttaacttgcctcttactctttgccctttagctaactaataaagtttgatataggcattattatataattctgagtcattcatggtatctctcatgtttgatgtatttttcaaactaagatctatgatagttttttttccagagttccattaaatcatttatttcctttactttctcacctctgttgaaacatttagaaactggatttgggaacccaattttggaaaaccagattcatagtcatgaaaatggaaacttccatattctgtttttgaaaagatgtggccattattacagtaattttattataggactttgcctcgtacaattaatagtgatattttggacaaggagttctggtgacaagctatacctaattataagctataaaacaatagatatgagtgtttgtacagtttaactcaatggagatcagaatattctatgtattgagaaaatgtttaatatcaatctataaatcttgaatttctaagaggcttattttgttcttttggctgaatgagtatatttgaattggttgaataattaataattctcattgtaaaaataattatatgccaaaaatatatttgatgttaaatcaaatagatgattctgtttacattgttcatatgaataataatctgtgttaatttcattttgataattggcctttaatatttgtatctctaattttattttctctctgttactgtaaaataatagctataatgtataacaattttcttcagaagaattctatgctattattaaaataaaatatttactgtgt

SEQ ID NO: 6729 - protein, 64 aa, Homo sapiens
MWTARGPFRRDRWSSEDEEAAGPSQALSPLLSVQHHGYSGPNERTTFWHGSNEGAVSLLLRYCA

SEQ ID NO: 6730 - DNA, 440 bp, Homo sapiens
cttttaccagtctcatttaggggatgggaacaacatgtcttcacctagggactttagagcagagcctggtttttgaaaataaagttaattcagagaaggtaaaactttctcttcggaatttcccacataatgattatgaggatgtttttgaagagccttcagaaagtggcagtgatcccagcatgtggacagccagaggccccttcagaagagacaggtggagcagtgaggatgaggaggctgcagggccatcacaggctctctcccctctactttctggtatgacatcatcctatttgtagtagcaagttgaggctctattttagagatatgcacaaagatatttctaatacaaatgaaagaaagagctagggaaaacttcaaaaatgggaaaatatggttttctaggattttcttttaaaaataaaaaaatgcaatta

SEQ ID NO: 6731 - protein, 92 aa, Homo sapiens
MGTTCLHLGTLEQSLVFENKVNSEKVKLSLRNFPHNDYEDVFEEPSESGSDPSMWTARGPFRRDRWSSEDEEAAGPSQALSPLLSGMTSSYL

SEQ ID NO: 6732 - DNA, 1684 bp, Homo sapiens
gaagaagggagtgagactgctcagagaggcaggattcctgctgactccagggggacacctggcacctcagcttcctttcccacttctccaggctgcatggaggggtgccgggcaggggcctcctggaagggaacctcctgcagcctcaagcaccaggtcatgacatgacatctatccctttcccaggtgaccgactcctgcaggtggatggagtgattctgtgcggcctcacccacaagcaggctgtgcagtgcctgaagggtcctgggcaggttgcaagactggtcttagagagaagagtccccaggagtacacagcagtgtccttctgctaatgacagcatgggagatgaacgcacggctgtttccttggtaacagccttgcctggcaggccttcgagctgtgtctcggtgacagatggtcctaagtttgaagtcaaactaaaaaagaatgccaatggtttgggattcagtttcgtgcagatggagaaagagagctgcagccatctcaaaagtgatcttgtgaggattaagaggctctttccggggcagccagctgaggagaatggggccattgcagctggtgacattatcctggccgtgaatggaaggtccacggaaggcctcatcttccaggaggtgctgcatttactgagaggggccccacaggaagtcacgctcctcctttgccgaccccctccaggtgcgctgcctgagatggagcaggaatggcagacacctgaactctcagctgacaaagaattcaccagggcaacatgtactgactcatgtaccagccccatcctggatcaagaggacagctggagggacagtgcctccccagatgcaggggaaggcctgggtctcaggccagagtcttcccaaaaggccatcagagaggcacaatggggccaaaacagagagagaccttgggccagttccttgacacattctcctgagtcccaccctcatttatgcaaacttcaccaagaaagggatgaatcaacattggcgacctctttggaaaaggatgtgaggcaaaactgctattcagtttgtgatatcatgagacttggaagatattccttctcatctcctctaaccagactttcgacagatattttctgagcaccttctctgcatgtctgcagtgctgtgtaaaatgccctacctttgcatggactattctttctaatcaagaggcgtgtgtggcgaacttggggcagcccctggaagtcttgttctttgaccattacgtctgcggctgcatcaccagataatgagcttcaccacttgtctgcctcctgtgtccttccgcggggagtaaatgtcacttcagcttgccgcatctctaaataggcaaattttcagtgctcagaaaaggacctgatctttgcacaaagtgctttgatggttgcctgcttgagtcactcccaatcccttcctgaagccctttctttataattcttctgttgaaatagccatcatattcacagtactaatcacagcatctcacatttactaaaaacttaccccataccaggaacccagagttgggggggctgtgtcagaattatgtaatttacgtgtcccaataatcctagatgcttcttgaccatctagttttgtcaaatgagaaaactgaggttccaaagaagtcaataaacttgtccaaagtctgaccg

SEQ ID NO: 6733 - protein, 320 aa, Homo sapiens
MTSIPFPGDRLLQVDGVILCGLTHKQAVQCLKGPGQVARLVLERRVPRSTQQCPSANDSMGDERTAVSLVTALPGRPSSCVSVTDGPKFEVKLKKNANGLGFSFVQMEKESCSHLKSDLVRIKRLFPGQPAEENGAIAAGDIILAVNGRSTEGLIFQEVLHLLRGAPQEVTLLLCRPPPGALPEMEQEWQTPELSADKEFTRATCTDSCTSPILDQEDSWRDSASPDAGEGLGLRPESSQKAIREAQWGQNRERPWASSLTHSPESHPHLCKLHQERDESTLATSLEKDVRQNCYSVCDIMRLGRYSFSSPLTRLSTDIF

SEQ ID NO: 6734 - DNA, 551 bp, Homo sapiens
agttgctattgttaagcttatgaacacctaatcttattgctcagtggagaatacaatctaaacaaacaggtgaatacagaagacagtgccagtcggagggtggcattaacaccagtgtgccatatggtggtatctatgtgaaatccattgttcctggaggaccagctgccaaggaagggcagatcctacagggtgaccgactcctgcaggtggatggagtgattctgtgcggcctcacccacaagcaggctgtgcagtgcctgaagggtcctgggcaggttgcaagactggtcttagagagaagagtccccaggagtacacagcagtgtccttctgctaatgacagcatgggagatgaacgcacggctgtttccttggtaacagccttgcctggcaggccttcgagctgtgtctcggtgacagatggtcctaagtttgaagtcaaactaaaaaagaatgccaatggtttgggattcagtttcgtgcagatggagaaagagagctgcagccatctcaaaagtgatcttgtgaggattaagaggctctttccg

SEQ ID NO: 6735 - protein, 67 aa, Homo sapiens
MGDERTAVSLVTALPGRPSSCVSVTDGPKFEVKLKKNANGLGFSFVQMEKESCSHLKSDLVRIKRLF

SEQ ID NO: 6736 - DNA, 523 bp, Homo sapiens
aagctctctcagggagcaggggacagagctgggattcagattggcctccagagcagaaaccttcaccccaggccttcctctgggtgctggttcttcttgtcctccatcacctccagaaatcagtgctggtgaaatctactttgtggaactggttaaagaagatgggacacttggattcagcgtaactgtaagagtttttaggagagcttgaaaagcagttaacaagatgtccgtctagaacctggtggccattccacccagatggcaacctctgacagtgtgcttagtttgcacaaatgtaaggggtaaataaaaaagcaaatgggggcctgcactgggggatgagttcagagacaaacagaggtactggggaacctcaggatgagcagggcatgcactaggggactccaaactcatgaggaggcagtgtgggcagagttggctgatgtgtcctgactctgaggtcaagctggactgcagagagagagaagcacattggggcttcagggacacaagctaaagg

SEQ ID NO: 6737 - protein, 34 aa, Homo sapiens
MRRQCGQSWLMCPDSEVKLDCREREAHWGFRDTS

SEQ ID NO: 6738 - DNA, 3593 bp, Homo sapiens
ctacaatgtcatttcccatccaagcttgacttctacctttactttcgctatactttctgatactcatgcttaagcaattgggcatctttattgaaataggactgtggtaagccactttatggctctcgattttgtatgagaaaatcatgcttagtgccttgttagtaaaagaaagaaaacctgaaagtccctgccatggaaggaagaaatagcggggagaaaagggagttggtaagtttcagcatttcagagcttggaggtgccagttaggtttctattttatggagaaggaggtggaggcaggatgggtcctaaggtgtcattcaaaacacacagccataactctttattgagagtagagctagggccccagggattgctgtggtcaagttgcggacaaaaatgaccactcgttggaagacaggagaggagtgtttagttacaaaagcagtcaacaattcaggtgtatctatattcagacagcaaataaaagttgttcaacttggttgctaatgggacccactctactgaggctttgtatagaactcatagaggaagctggcttcaaggaatgaactaccctgtgcttttcttaggactaaaatctcaggaagctggtgatgaatgaaaaccttagtcccactggcactgcacgaggggccaggagagcagcagcatcataagccacagggtggggcagccaaggcaggggcattctgagctgttggggaggggtggcaggcagggtggggcactgtgaggtgtcggggagggcattgtgaagtggggggtggggcattgtgtgccacatgcctgggctcccacctggggccagtgggcttcagtctgtaggtgactacagaaggagaaggagctccgtctgttctctcttcaggcagttgttgtgtctctcagcgcttgttgggttcacaacctattaaataagccggctggtcttcaccctcccagacaagtcaactcaggggaggcagcagggtgcgggccttggcccgcaaccctagccggggccggggccggggccggggccagggctggtgcccggggccgcgctgtgaggtgggcaggcgaggagcgggaagaccatctctgcaagtgcagcatagcctcggcctaggacagcgggagtgcgtggccaaagctgtgagcagaggcacaggtggtggcagacagtagaggcgccccatggggaacatactgacctgtcgtgtgcaccctagcgtcagcctcgagtttgaccagcagcaggggtcggtgtgtccctctgaatctgagatctatgaggcaggagctgaggacaggatggcaggagcgcccatggctgctgctgtacagcctgctgaggtgactgttgaagttggtgaggacctccacatgcaccaggttcgtgaccgggagatgcctgaagctttggagtttaacctttctgccaatccagaggcaagcacaatattccagaggaactctcaaacagatgctttggagtttaacccttctgccaatccagaggcaagcacaatattccagaggaactctcaaacagatgttgtagaaataagaagaagcaactgtacaaaccatgtatctactgtgcgtttcagtcaacaatacagcttgtgttcgacaatattccttgatgacagcacagccatccagcattatcttacaatgacaataatatcatgatgtgaccttggagatacctcatcatatcacacaaagagatgcagatagatctttgagcatacctgatgaacagttacactcatttgcggtttccaccgtgcacattatgaagaaaagaaatggaggtgggagtttaaataactattcctcctccattccaccgactcccagcaccagccaggaggaccctcagttcagtgttcctcccactgccaacacacccacgcccgtttgcaagcggtccatgcgctggtccaacctgtttacatctgagaaagggagtgacccagacaaagagaggaaagccccggagaatcatgctgacaccatcgggagcggcagagccatccccattaaacagggcatgctcttaaagcgaagtgggaaatggctgaagacatggaaaaagaaatacgtcaccctgtgttccaatggcgtgctcacctattattcaagcttaggtgattatatgaagaatattcataaaaaagagattgaccttcagacatctaccatcaaagtcccaggaaagtggccatccctagccacatcggcctgcgcacccatctccagctctaaaagcaatggcctatccaaggacatggacatcgggctgggtgactccatatgcttcagccccagtatctccagcaccaccagccccaagctcaacccacccccctcccctcatgccaataaaaagaaacacctaaagaagaaaagcaccaacaactttatgattgtgtctgccactggccaaacgtggcactttgaagccacgacgtatgaggagcgggatgcatgggtccaagccatccagagccagatcctggccagcctgcagtcatgcgagagcagtaaaagcaagtcccagctgaccagccagagcgaggccatggccctgcagtcgatccaaaacatgcgtgggaacgcccactgtgtggactgtgagacccagaatcctaagtgggccagtttgaacttgggagtcctcatgtgtattgaatgctcaggtatccaccgcagtcttggcacccgcctttcccgtgtgcgatctctggagctggatgactggccagttgagctcaggaaggttatgtcatctattggcaatgacctagccaacagcatctgggaagggagcagccaggggcagacaaaaccctcagaaaagtccacgagggaagagaaagaacggtggatccgttccaaatatgaggagaagctctttctggccccactaccctgcactgagctgtccctgggccagcagctgctgcgggccaccgctgatgaggacctgcagacagccatcctgctgctggcacatggctcccgtgaggaggtgaacgagacctgtggggagggagacggctgcacggcgctccatctggcctgccgcaaggggaatgtggtcctggcgcagctcctgatctggtacggggtggacgtcatggcccgagatgcccacgggaacacagcgctgacctacgcccggcaggcctccagccaggagtgcatcaacgtgcttctgcagtacggctgccccgacgagtgcgtgtagtatctgttttatttgactgcagtctccttggtgcaaaaacaaaatgggaaaaataaggataactcagaatttcaaaaggaaatcacaaattcagctagtaatagcattttcagtacttttcgtaaactaagtaaatacacaaaatgttgatttttctgaccataagacatattttatgtccttttgccgaggtggatgtgttagtctcaggccctcctggccacattgcccaagtcacacaggcttctgtattatgtatttagataaaatgtgtgaaaatatatttgaaaaaaagttcataaatatgcattgatttttgtacaca

SEQ ID NO: 6739 - protein, 166 aa, Homo sapiens
MGNILTCRVHPSVSLEFDQQQGSVCPSESEIYEAGAEDRMAGAPMAAAVQPAEVTVEVGEDLHMHQVRDREMPEALEFNLSANPEASTIFQRNSQTDALEFNPSANPEASTIFQRNSQTDVVEIRRSNCTNHVSTVRFSQQYSLCSTIFLDDSTAIQHYLTMTIIS

SEQ ID NO: 6740 - DNA, 3524 bp, Homo sapiens
ctacaatgtcatttcccatccaagcttgacttctacctttactttcgctatactttctgatactcatgcttaagcaattgggcatctttattgaaataggactgtggtaagccactttatggctctcgattttgtatgagaaaatcatgcttagtgccttgttagtaaaagaaagaaaacctgaaagtccctgccatggaaggaagaaatagcggggagaaaagggagttggtaagtttcagcatttcagagcttggaggtgccagttaggtttctattttatggagaaggaggtggaggcaggatgggtcctaaggtgtcattcaaaacacacagccataactctttattgagagtagagctagggccccagggattgctgtggtcaagttgcggacaaaaatgaccactcgttggaagacaggagaggagtgtttagttacaaaagcagtcaacaattcaggtgtatctatattcagacagcaaataaaagttgttcaacttggttgctaatgggacccactctactgaggctttgtatagaactcatagaggaagctggcttcaaggaatgaactaccctgtgcttttcttaggactaaaatctcaggaagctggtgatgaatgaaaaccttagtcccactggcactgcacgaggggccaggagagcagcagcatcataagccacagggtggggcagccaaggcaggggcattctgagctgttggggaggggtggcaggcagggtggggcactgtgaggtgtcggggagggcattgtgaagtggggggtggggcattgtgtgccacatgcctgggctcccacctggggccagtgggcttcagtctgtaggtgactacagaaggagaaggagctccgtctgttctctcttcaggcagttgttgtgtctctcagcgcttgttgggttcacaacctattaaataagccggctggtcttcaccctcccagacaagtcaactcaggggaggcagcagggtgcgggccttggcccgcaaccctagccggggccggggccggggccggggccagggctggtgcccggggccgcgctgtgaggtgggcaggcgaggagcgggaagaccatctctgcaagtgcagcatagcctcggcctaggacagcgggagtgcgtggccaaagctgtgagcagaggcacaggtggtggcagacagtagaggcgccccatggggaacatactgacctgtcgtgtgcaccctagcgtcagcctcgagtttgaccagcagcaggggtcggtgtgtccctctgaatctgagatctatgaggcaggagctgaggacaggatggcaggagcgcccatggctgctgctgtacagcctgctgaggtgactgttgaagttggtgaggacctccacatgcaccaggttcgtgaccgggagatgcctgaagctttggagtttaacccttctgccaatccagaggcaagcacaatattccagaggaactctcaaacagatgttgtagaaataagaagaagcaactgtacaaaccatgtatctactgtgcgtttcagtcaacaatacagcttgtgttcgacaatattccttgatgacagcacagccatccagcattatcttacaatgacaataatatcatgatgtgaccttggagatacctcatcatatcacacaaagagatgcagatagatctttgagcatacctgatgaacagttacactcatttgcggtttccaccgtgcacattatgaagaaaagaaatggaggtgggagtttaaataactattcctcctccattccaccgactcccagcaccagccaggaggaccctcagttcagtgttcctcccactgccaacacacccacgcccgtttgcaagcggtccatgcgctggtccaacctgtttacatctgagaaagggagtgacccagacaaagagaggaaagccccggagaatcatgctgacaccatcgggagcggcagagccatccccattaaacagggcatgctcttaaagcgaagtgggaaatggctgaagacatggaaaaagaaatacgtcaccctgtgttccaatggcgtgctcacctattattcaagcttaggtgattatatgaagaatattcataaaaaagagattgaccttcagacatctaccatcaaagtcccaggaaagtggccatccctagccacatcggcctgcgcacccatctccagctctaaaagcaatggcctatccaaggacatggacatcgggctgggtgactccatatgcttcagccccagtatctccagcaccaccagccccaagctcaacccacccccctcccctcatgccaataaaaagaaacacctaaagaagaaaagcaccaacaactttatgattgtgtctgccactggccaaacgtggcactttgaagccacgacgtatgaggagcgggatgcatgggtccaagccatccagagccagatcctggccagcctgcagtcatgcgagagcagtaaaagcaagtcccagctgaccagccagagcgaggccatggccctgcagtcgatccaaaacatgcgtgggaacgcccactgtgtggactgtgagacccagaatcctaagtgggccagtttgaacttgggagtcctcatgtgtattgaatgctcaggtatccaccgcagtcttggcacccgcctttcccgtgtgcgatctctggagctggatgactggccagttgagctcaggaaggttatgtcatctattggcaatgacctagccaacagcatctgggaagggagcagccaggggcagacaaaaccctcagaaaagtccacgagggaagagaaagaacggtggatccgttccaaatatgaggagaagctctttctggccccactaccctgcactgagctgtccctgggccagcagctgctgcgggccaccgctgatgaggacctgcagacagccatcctgctgctggcacatggctcccgtgaggaggtgaacgagacctgtggggagggagacggctgcacggcgctccatctggcctgccgcaaggggaatgtggtcctggcgcagctcctgatctggtacggggtggacgtcatggcccgagatgcccacgggaacacagcgctgacctacgcccggcaggcctccagccaggagtgcatcaacgtgcttctgcagtacggctgccccgacgagtgcgtgtagtatctgttttatttgactgcagtctccttggtgcaaaaacaaaatgggaaaaataaggataactcagaatttcaaaaggaaatcacaaattcagctagtaatagcattttcagtacttttcgtaaactaagtaaatacacaaaatgttgatttttctgaccataagacatattttatgtccttttgccgaggtggatgtgttagtctcaggccctcctggccacattgcccaagtcacacaggcttctgtattatgtatttagataaaatgtgtgaaaatatatttgaaaaaaagttcataaatatgcattgatttttgtacaca

SEQ ID NO: 6741 - protein, 143 aa, Homo sapiens
MGNILTCRVHPSVSLEFDQQQGSVCPSESEIYEAGAEDRMAGAPMAAAVQPAEVTVEVGEDLHMHQVRDREMPEALEFNPSANPEASTIFQRNSQTDVVEIRRSNCTNHVSTVRFSQQYSLCSTIFLDDSTAIQHYLTMTIIS

SEQ ID NO: 6742 - DNA, 4418 bp, Homo sapiens
ataataataataataataataataatctacaatgtcatttcccatccaagcttgacttctacctttactttctgatatggttttgccatgtccccacccaaatctcatcatgaattataatccccataatcctgatgtgtcgagggaggggcctagggggaggtgattggatcatgggggcagttatcctcatgctgttcttgtgatattcagtaagtcctcatgagatcttatagggttttgttttgttttttgggatggagtcttgctctgttgtccaggcaggagtgccatggcatgatcttggctcactgcagtctctgcctcttgagttccattgattctcctgcctcagcctcctgagtagctgggattacaggcatgcaccaccacacccagctaatttttgtatttttagtagagacaggatttcactacattagctaggctggtctcaaactcctgacctcagttgatccacctgccttggcctcccaaagtactagggttacaagtgtgagccaccgtgcccagctgagatctgatggttttatacatgtttgacagttgctccttcacatgttcccactctctgtgcggccaccatgtaagtcggacctgcccttctgccatgattgtaagtttcctgaaggacttccccctctgccatgattgttaagtttcctgaggcctccccagccatgtgaaactgagtcaattaaacctctttcctttaaaaattacccaacctcaggtgtttctttatatcagtgtgaaaacagactgctatactttctgatactcatgcttaagcaattggggaattcagactacctgggatcaaactatggccccacccttagcagtcatgtgaccttggggaggttacttaccttctccatctcaacaacttctgtaaaatctgtaacatgagattgtttctgagggttaaatgagcatagcacagtggggacactgtcaggcacacactacttgccagatgtcgagtattcatctttattgaaataggactgtggtaagccactttatggctctcgattttgtatgagaaaatcatgcttagtgccttgttagtaaaagaaagaaaacctgaaagtccctgccatggaaggaagaaatagcggggagaaaagggagttggtaagtttcagcatttcagagcttggaggtgccagttaggtttctattttatggagaaggaggtggaggcaggatgggtcctaaggtgtcattcaaaacacacagccataactctttattgagagtagagctagggccccagggattgctgtggtcaagttgcggacaaaaatgaccactcgttggaagacaggagaggagtgtttagttacaaaagcagtcaacaattcaggtgtatctatattcagacagcaaataaaagttgttcaacttggttgctaatgggacccactctactgaggctttgtatagaactcatagaggaagctggcttcaaggaatgaactaccctgtgcttttcttaggactaaaatctcaggaagctggtgatgaatgaaaaccttagtcccactggcactgcacgaggggccaggagagcagcagcatcataagccacagggtggggcagccaaggcaggggcattctgagctgttggggaggggtggcaggcagggtggggcactgtgaggtgtcggggagggcattgtgaagtggggggtggggcattgtgtgccacatgcctgggctcccacctggggccagtgggcttcagtctgtaggtgactacagaaggagaaggagctccgtctgttctctcttcaggcagttgttgtgtctctcagcgcttgttgggttcacaacctattaaataagccggctggtcttcaccctcccagacaagtcaactcaggggaggcagcagggtgcgggccttggcccgcaaccctagccggggccggggccggggccggggccagggctggtgcccggggccgcgctgtgaggtgggcaggcgaggagcgggaagaccatctctgcaagtgcagcatagcctcggcctaggacagcgggagtgcgtggccaaagctgtgagcagaggcacaggtggtggcagacagtagaggcgccccatggggaacatactgacctgtcgtgtgcaccctagcgtcagcctcgagtttgaccagcagcaggggtcggtgtgtccctctgaatctgagatctatgaggcaggagctgaggacaggatggcaggagcgcccatggctgctgctgtacagcctgctgaggtgactgttgaagttggtgaggacctccacatgcaccaggttcgtgaccgggagatgcctgaagctttggagtttaacctttctgccaatccagaggcaagcacaatattccagaggaactctcaaacagatgctttggagtttaacccttctgccaatccagaggcaagcacaatattccagaggaactctcaaacagatgttgtagaaataagaagaagcaactgtacaaaccattgtgaccttggagatacctcatcatatcacacaaagagatgcagatagatctttgagcatacctgatgaacagttacactcatttgcggtttccaccgtgcacattatgaagaaaagaaatggaggtgggagtttaaataactattcctcctccattccaccgactcccagcaccagccaggaggaccctcagttcagtgttcctcccactgccaacacacccacgcccgtttgcaagcggtccatgcgctggtccaacctgtttacatctgagaaagggagtgacccagacaaagagaggaaagccccggagaatcatgctgacaccatcgggagcggcagagccatccccattaaacagggcatgctcttaaagcgaagtgggaaatggctgaagacatggaaaaagaaatacgtcaccctgtgttccaatggcgtgctcacctattattcaagcttaggtgattatatgaagaatattcataaaaaagagattgaccttcagacatctaccatcaaagtcccaggaaagtggccatccctagccacatcggcctgcgcacccatctccagctctaaaagcaatggcctatccaaggacatggacatcgggctgggtgactccatatgcttcagccccagtatctccagcaccaccagccccaagctcaacccacccccctcccctcatgccaataaaaagaaacacctaaagaagaaaagcaccaacaactttatgattgtgtctgccactggccaaacgtggcactttgaagccacgacgtatgaggagcgggatgcatgggtccaagccatccagagccagatcctggccagcctgcagtcatgcgagagcagtaaaagcaagtcccagctgaccagccagagcgaggccatggccctgcagtcgatccaaaacatgcgtgggaacgcccactgtgtggactgtgagacccagaatcctaagtgggccagtttgaacttgggagtcctcatgtgtattgaatgctcaggtatccaccgcagtcttggcacccgcctttcccgtgtgcgatctctggagctggatgactggccagttgagctcaggaaggttatgtcatctattggcaatgacctagccaacagcatctgggaagggagcagccaggggcagacaaaaccctcagaaaagtccacgagggaagagaaagaacggtggatccgttccaaatatgaggagaagctctttctggccccactaccctgcactgagctgtccctgggccagcagctgctgcgggccaccgctgatgaggacctgcagacagccatcctgctgctggcacatggctcccgtgaggaggtgaacgagacctgtggggagggagacggctgcacggcgctccatctggcctgccgcaaggggaatgtggtcctggcgcagctcctgatctggtacggggtggacgtcatggcccgagatgcccacgggaacacagcgctgacctacgcccggcaggcctccagccaggagtgcatcaacgtgcttctgcagtacggctgccccgacgagtgcgtgtagtatctgttttatttgactgcagtctccttggtgcaaaaacaaaatgggaaaaataaggataactcagaatttcaaaaggaaatcacaaattcagctagtaatagcattttcagtacttttcgtaaactaagtaaatacacaaaatgttgatttttctgaccataagacatattttatgtccttttgccgaggtggatgtgttagtctcaggccctcctggccacattgcccaagtcacacaggcttctgtattatgtatttagataaaatgtgtgaaaatatatttgaaaaaaagttcataaatatgcattgatttttgtacaca

SEQ ID NO: 6743 - protein, 147 aa, Homo sapiens
MGNILTCRVHPSVSLEFDQQQGSVCPSESEIYEAGAEDRMAGAPMAAAVQPAEVTVEVGEDLHMHQVRDREMPEALEFNLSANPEASTIFQRNSQTDALEFNPSANPEASTIFQRNSQTDVVEIRRSNCTNHCDLGDTSSYHTKRCR

SEQ ID NO: 6744 - DNA, 3112 bp, Homo sapiens
tggcctgtttattctcttaagagagaaaatgaggggattaatggactgtagttctggacaaggtggaaaactcttaaagtggaagtattggggcgaatgctctgacaggctaggatggtgcagtcagtcccttcacccagaaatcagtagaatgttagcagttcagactcaaaccttgtgaaaaacaggtggtggaaaggaaatccctcacagcaactggcaccataatcaagacaatgtttgcagaataaatggagttacctgctttcagccccaggtcatagctattgtctgccctgctgatatgtgataataatttgtgatcatgttgtcttaaaatggggtcactcatctccagtagaattaagtccacagtgaagttgtccccccatccccaaagagataaacatatatgaatgaactcacgtgataacaactactgctgcctgggatcatgagagacctgaactgaactgataggaagtgaaaggtggctgagataatgagaatagacccatctgcagaggatcataaaaccagcaaagacaatatcttgtctaagatgccttcacaaactttgtccatgagaactcttaaggatttcaccagacctgttggctgctgctgtgatctctgcccaagaggagcctctgaccaacatccaaagggcttctggacccactggactcctctggaggactaaaatctcaggaagctggtgatgaatgaaaaccttagtcccactggcactgcacgaggggccaggagagcagcagcatcataagccacaggcgtcagcctcgagtttgaccagcagcaggggtcggtgtgtccctctgaatctgagatctatgaggcaggagctgaggacaggatggcaggagcgcccatggctgctgctgtacagcctgctgaggtgactgttgaagttggtgaggacctccacatgcaccaggttcgtgaccgggagatgcctgaagctttggagtttaacctttctgccaatccagaggcaagcacaatattccagaggaactctcaaacagatgctttggagtttaacccttctgccaatccagaggcaagcacaatattccagaggaactctcaaacagatggtatctactgtgcgtttcagtcaacaatacagcttgtgttcgacaatattccttgatgacagcacagccatccagcattatcttacaatgacaataatatcatgatgtgaccttggagatacctcatcatatcacacaaagagatgcagatagatctttgagcatacctgatgaacagttacactcatttgcggtttccaccgtgcacattatgaagaaaagaaatggaggtgggagtttaaataactattcctcctccattccaccgactcccagcaccagccaggaggaccctcagttcagtgttcctcccactgccaacacacccacgcccgtttgcaagcggtccatgcgctggtccaacctgtttacatctgagaaagggagtgacccagacaaagagaggaaagccccggagaatcatgctgacaccatcgggagcggcagagccatccccattaaacagggcatgctcttaaagcgaagtgggaaatggctgaagacatggaaaaagaaatacgtcaccctgtgttccaatggcgtgctcacctattattcaagcttaggtgattatatgaagaatattcataaaaaagagattgaccttcagacatctaccatcaaagtcccaggaaagtggccatccctagccacatcggcctgcgcacccatctccagctctaaaagcaatggcctatccaaggacatggacatcgggctgggtgactccatatgcttcagccccagtatctccagcaccaccagccccaagctcaacccacccccctcccctcatgccaataaaaagaaacacctaaagaagaaaagcaccaacaactttatgattgtgtctgccactggccaaacgtggcactttgaagccacgacgtatgaggagcgggatgcatgggtccaagccatccagagccagatcctggccagcctgcagtcatgcgagagcagtaaaagcaagtcccagctgaccagccagagcgaggccatggccctgcagtcgatccaaaacatgcgtgggaacgcccactgtgtggactgtgagacccagaatcctaagtgggccagtttgaacttgggagtcctcatgtgtattgaatgctcaggtatccaccgcagtcttggcacccgcctttcccgtgtgcgatctctggagctggatgactggccagttgagctcaggaaggttatgtcatctattggcaatgacctagccaacagcatctgggaagggagcagccaggggcagacaaaaccctcagaaaagtccacgagggaagagaaagaacggtggatccgttccaaatatgaggagaagctctttctggccccactaccctgcactgagctgtccctgggccagcagctgctgcgggccaccgctgatgaggacctgcagacagccatcctgctgctggcacatggctcccgtgaggaggtgaacgagacctgtggggagggagacggctgcacggcgctccatctggcctgccgcaaggggaatgtggtcctggcgcagctcctgatctggtacggggtggacgtcatggcccgagatgcccacgggaacacagcgctgacctacgcccggcaggcctccagccaggagtgcatcaacgtgcttctgcagtacggctgccccgacgagtgcgtgtagtatctgttttatttgactgcagtctccttggtgcaaaaacaaaatgggaaaaataaggataactcagaatttcaaaaggaaatcacaaattcagctagtaatagcattttcagtacttttcgtaaactaagtaaatacacaaaatgttgatttttctgaccataagacatattttatgtccttttgccgaggtggatgtgttagtctcaggccctcctggccacattgcccaagtcacacaggcttctgtattatgtatttagataaaatgtgtgaaaatatatttgaaaaaaagttcataaatatgcattgatttttgtacaca

SEQ ID NO: 6745 - protein, 99 aa, Homo sapiens
MAGAPMAAAVQPAEVTVEVGEDLHMHQVRDREMPEALEFNLSANPEASTIFQRNSQTDALEFNPSANPEASTIFQRNSQTDGIYCAFQSTIQLVFDNIP

SEQ ID NO: 6746 - DNA, 5220 bp, Homo sapiens
ctggatgccttgtctacctgtgccttacagagtgacaccattgtggtgtggtcgatcagaggggcaggaggctttcagagggagtgggaagtggtggggcttggtttgtttgcccatggatgacagcaaaagtgagttggcttcccaagaacttttaccagtagcctgttttgctacaattctagacccagactggggtcccaaggcatcatagcccacagcttcttagcaagtgcatgttcagttggatcccccagctcagcctgggtcatccccacattctgcctcttgggccatacatagctcagctctgtactgagccatcatcccatggtgagcaagaccccattcttggtcttcagtctctttccctgcagcatgcaatcaaggtggtggctggaaggggccaaggagccacatgtcacagtgccctgctgcctgaacaaggaccagaggcctgtggaacacatggctctcagatttctcccatttgatgactcatcagctgcccccacatggctttctagctcacagcagatctagccttctctgagcagtgaagatgggatgttttatggtcattttccctggtgtgcagagctcaagtggagttcttcagcacaccctacaccatcccctcactaacacccccacctgtccagtcttacctgccttcatatcaaaagcactcagttaacccagagggcttcagccctgccctgcctgactttctaggaagcccctctctccacccaccctaatcagacactgtctgaaagttccccctcatcattttaaaaggaagagaaatttttctgacacagaggttctggtgaagtggccagctcccacatcacagggtgatggcggtttggactggaccaggatcagacagtgctgtcctggggctggccatctgataaggggctccagaaagggcagtgatggacccctgggaggctttctgctctcctgatcacaggtttttggtgagaggacctattggccactagggtgtctgcgggtgtgtgtatgtgtgtgtgtgtgtgtgtgtgtgtgtgtgtgtgtgatgtgtgtttacttggagtgacttctttcagcatgaagcccactgttttgctgaatgtatctcactgtttcctgaaactcagtacattcagctggcttaagggtcctggggcctcgctgtgtcatatttgcacaagcctagtgtctgtgcagactgtacactggagttcagttgtaagacccttttgaacccttattctgttcctgtaatagaaaagccatttcactcaatggaatagaaacccagatctaatggagagatgttctaatctgccatacactggggcagtggctagtgatttggactttgtggcacagatggaaatttccaggttctctaggtggtaggcagaggcctccctttttaagaaactccccactccacccctgccaatgaggacgttgcttagaggtatttctatcagtgttgagtagaagagatcatttcttggtgttgaatttcaggtaaggatgccagcttctgcatatcagggtgatgatgtttgggctgcgacaggtctagacagcagtctgaaagggggctcaaggaagtagctgtgaaaggcccctgggatgttttctgctcccctttctgcaaatcccctggagggagatcctgttagtcactacaggatgtgtgtgtgtgtgtgtgtgtgtgtgtgtgttcatcacttgttgcttgggggtgggaagagacaacaactgttggcagattcagattggtgccccaggcatctgtgcctgtaactgcagtttcagcgggctcaggaccaggctaaagggcctccaagcttcctccagtttcctggtgcatgcatgtgcaatatgctcccctggcctgggtctttcctgctgcttcttgccagttgggtcagaactagcttattaaccagtttttcttctgagctttaatcgaactggctccaaccagttggaggcttgaaaagggctacgtgctagttatagagagaagatcctttaaaaaatacatctaaatcttttatctcagatttgccttgtggcaaaaggtggggtactttttctgacatgatgaggcagagaaagatgaggtgggtgcatcctgtgcatatgattttctcactaaaattgcttaggtagaaggagacagattggatttttgtgtgtttggtatttgggataagagggatgtgggtgtgtacttgacatgggttgtttattctcgctctctctctgtttattctcttatcccttcacccagaaatcagtagaatgttagcagttcagactcaaaccttgtgaaaaacaggtggtggaaaggaaatccctcacagcaactggcaccataatcaagacaatgtttgcagaataaatggagttacctgctttcagccccaggtcatagctattgtctgccctgctgatatgtgataataatttgtgatcatgttgtcttaaaatggggtcactcatctccagtagaattaagtccacagtgaagttgtccccccatccccaaagagataaacatatatgaatgaactcacgtgataacaactactgctgcctgggatcatgagagacctgaactgaactgataggaagtgaaaggtggctgagataatgagaatagacccatctgcagaggatcataaaaccagcaaagacaatatcttgtctaagatgccttcacaaactttgtccatgagaactcttaaggatttcaccagacctgttggctgctgctgtgatctctgcccaagaggagcctctgaccaacatccaaagggcttctggacccactggactcctctggagcgtcagcctcgagtttgaccagcagcaggggtcggtgtgtccctctgaatctgagatctatgaggcaggagctgaggacaggatggcaggagcgcccatggctgctgctgtacagcctgctgaggtgactgttgaagttggtgaggacctccacatgcaccaggttcgtgaccgggagatgcctgaagctttggagtttaacctttctgccaatccagaggcaagcacaatattccagaggaactctcaaacagatgctttggagtttaacccttctgccaatccagaggcaagcacaatattccagaggaactctcaaacagatgttgtagaaataagaagaagcaactgtacaaaccatgtatctactgtgcgtttcagtcaacaatacagcttgtgttcgacaatattccttgatgacagcacagccatccagcattatcttacaatgacaataatatcatgatgtgaccttggagatacctcatcatatcacacaaagagatgcagatagatctttgagcatacctgatgaacagttacactcatttgcggtttccaccgtgcacattatgaagaaaagaaatggaggtgggagtttaaataactattcctcctccattccaccgactcccagcaccagccaggaggaccctcagttcagtgttcctcccactgccaacacacccacgcccgtttgcaagcggtccatgcgctggtccaacctgtttacatctgagaaagggagtgacccagacaaagagaggaaagccccggagaatcatgctgacaccatcgggagcggcagagccatccccattaaacagggcatgctcttaaagcgaagtgggaaatggctgaagacatggaaaaagaaatacgtcaccctgtgttccaatggcgtgctcacctattattcaagcttaggtgattatatgaagaatattcataaaaaagagattgaccttcagacatctaccatcaaagtcccaggaaagtggccatccctagccacatcggcctgcgcacccatctccagctctaaaagcaatggcctatccaaggacatggacatcgggctgggtgactccatatgcttcagccccagtatctccagcaccaccagccccaagctcaacccacccccctcccctcatgccaataaaaagaaacacctaaagaagaaaagcaccaacaactttatgattgtgtctgccactggccaaacgtggcactttgaagccacgacgtatgaggagcgggatgcatgggtccaagccatccagagccagatcctggccagcctgcagtcatgcgagagcagtaaaagcaagtcccagctgaccagccagagcgaggccatggccctgcagtcgatccaaaacatgcgtgggaacgcccactgtgtggactgtgagacccagaatcctaagtgggccagtttgaacttgggagtcctcatgtgtattgaatgctcaggtatccaccgcagtcttggcacccgcctttcccgtgtgcgatctctggagctggatgactggccagttgagctcaggaaggttatgtcatctattggcaatgacctagccaacagcatctgggaagggagcagccaggggcagacaaaaccctcagaaaagtccacgagggaagagaaagaacggtggatccgttccaaatatgaggagaagctctttctggccccactaccctgcactgagctgtccctgggccagcagctgctgcgggccaccgctgatgaggacctgcagacagccatcctgctgctggcacatggctcccgtgaggaggtgaacgagacctgtggggagggagacggctgcacggcgctccatctggcctgccgcaaggggaatgtggtcctggcgcagctcctgatctggtacggggtggacgtcatggcccgagatgcccacgggaacacagcgctgacctacgcccggcaggcctccagccaggagtgcatcaacgtgcttctgcagtacggctgccccgacgagtgcgtgtagtatctgttttatttgactgcagtctccttggtgcaaaaacaaaatgggaaaaataaggataactcagaatttcaaaaggaaatcacaaattcagctagtaatagcattttcagtacttttcgtaaactaagtaaatacacaaaatgttgatttttctgaccataagacatattttatgtccttttgccgaggtggatgtgttagtctcaggccctcctggccacattgcccaagtcacacaggcttctgtattatgtatttagataaaatgtgtgaaaatatatttgaaaaaaagttcataaatatgcattgatttttgtacaca

SEQ ID NO: 6747 - protein, 127 aa, Homo sapiens
MAGAPMAAAVQPAEVTVEVGEDLHMHQVRDREMPEALEFNLSANPEASTIFQRNSQTDALEFNPSANPEASTIFQRNSQTDVVEIRRSNCTNHVSTVRFSQQYSLCSTIFLDDSTAIQHYLTMTIIS

SEQ ID NO: 6748 - DNA, 3599 bp, Homo sapiens
aggttagagttacttgttattggtaaatagccactatggagactaaggaccagaagaaacacagaaagaaaaacagtggacccaaagctgcaaagaaaaagaagtggcatctgcaggatctccagctaggagacgaagaaaatgcccagaagagaaatgccaatgcttttgcagttcagtctgctgtgtggatgtctcgatcctttcacaggactctggatttgaagacacaaaagcatcatattccagtggttgatggaactccactagagccgccaccaatagcggtagtggtgacggggcctccaaagttggaaagagcactttgatataatgcctcattcggaacttcacctggcagaagttcaccgagatcagaggccctgtgacgatcgtgtcaggtaaaaagcgcagactcaccattattgaatgtgggtgtgacattaacatgatgattgatctggctaaagtagcagatctggtactgatgcttatagatgccagctttgggtttgaaatggaaatgtttgagtttctaaacatctgtcaagcacatggctttcctaaaattctgggagttctcacccacctcgactccttcaagcataacaagcaactgaagaagacaaagaagtgattaaaacacaggttctggacagaagtttaccaggttgccaaactgttctacctttctggaatggtgcatggagaatatcaaaaccaagaaatccacaatctgggccattttattacagttatgaagtttaggcctctcatggcaaacttttcacccttatatcctggcagacagttaaaaggatggaagatttgacaaacccggaggatatccaaacaaacatcaaatgtgacctgcaggtgtcactttatggttatttaagaggagcacacttgaaaaataaaagccaaattcacatgccaggacaaggtggggctcacccatgagctggtccagagtctcatctccacctactccaccattgatgccaagatggcttcaagtcgagtgatgctgctttccaattccaaaccacttgggtcagaggctatagataatcaagggtgttattcctgtattctaacttatccatcccttatgtgtcagagatggctttggattccctgttctgtgtgctcctgtctggctcctgaacccagctggagaggtgtgtcaatcccaactggtgaagtactgagaggaagctacacaaaaggcagcaaggtagcgtcagcctcgagtttgaccagcagcaggggtcggtgtgtccctctgaatctgagatctatgaggcaggagctgaggacaggatggcaggagcgcccatggctgctgctgtacagcctgctgaggtgactgttgaagttggtgaggacctccacatgcaccaggttcgtgaccgggagatgcctgaagctttggagtttaacctttctgccaatccagaggcaagcacaatattccagaggaactctcaaacagatgctttggagtttaacccttctgccaatccagaggcaagcacaatattccagaggaactctcaaacagatgttgtagaaataagaagaagcaactgtacaaaccatgtatctactgtgcgtttcagtcaacaatacagcttgtgttcgacaatattccttgatgacagcacagccatccagcattatcttacaatgacaataatatcatgatgtgaccttggagatacctcatcatatcacacaaagagatgcagatagatctttgagcatacctgatgaacagttacactcatttgcggtttccaccgtgcacattatgaagaaaagaaatggaggtgggagtttaaataactattcctcctccattccaccgactcccagcaccagccaggaggaccctcagttcagtgttcctcccactgccaacacacccacgcccgtttgcaagcggtccatgcgctggtccaacctgtttacatctgagaaagggagtgacccagacaaagagaggaaagccccggagaatcatgctgacaccatcgggagcggcagagccatccccattaaacagggcatgctcttaaagcgaagtgggaaatggctgaagacatggaaaaagaaatacgtcaccctgtgttccaatggcgtgctcacctattattcaagcttaggtgattatatgaagaatattcataaaaaagagattgaccttcagacatctaccatcaaagtcccaggaaagtggccatccctagccacatcggcctgcgcacccatctccagctctaaaagcaatggcctatccaaggacatggacatcgggctgggtgactccatatgcttcagccccagtatctccagcaccaccagccccaagctcaacccacccccctcccctcatgccaataaaaagaaacacctaaagaagaaaagcaccaacaactttatgattgtgtctgccactggccaaacgtggcactttgaagccacgacgtatgaggagcgggatgcatgggtccaagccatccagagccagatcctggccagcctgcagtcatgcgagagcagtaaaagcaagtcccagctgaccagccagagcgaggccatggccctgcagtcgatccaaaacatgcgtgggaacgcccactgtgtggactgtgagacccagaatcctaagtgggccagtttgaacttgggagtcctcatgtgtattgaatgctcaggtatccaccgcagtcttggcacccgcctttcccgtgtgcgatctctggagctggatgactggccagttgagctcaggaaggttatgtcatctattggcaatgacctagccaacagcatctgggaagggagcagccaggggcagacaaaaccctcagaaaagtccacgagggaagagaaagaacggtggatccgttccaaatatgaggagaagctctttctggccccactaccctgcactgagctgtccctgggccagcagctgctgcgggccaccgctgatgaggacctgcagacagccatcctgctgctggcacatggctcccgtgaggaggtgaacgagacctgtggggagggagacggctgcacggcgctccatctggcctgccgcaaggggaatgtggtcctggcgcagctcctgatctggtacggggtggacgtcatggcccgagatgcccacgggaacacagcgctgacctacgcccggcaggcctccagccaggagtgcatcaacgtgcttctgcagtacggctgccccgacgagtgcgtgtagtatctgttttatttgactgcagtctccttggtgcaaaaacaaaatgggaaaaataaggataactcagaatttcaaaaggaaatcacaaattcagctagtaatagcattttcagtacttttcgtaaactaagtaaatacacaaaatgttgatttttctgaccataagacatattttatgtccttttgccgaggtggatgtgttagtctcaggccctcctggccacattgcccaagtcacacaggcttctgtattatgtatttagataaaatgtgtgaaaatatatttgaaaaaaagttcataaatatgcattgatttttgtacaca

SEQ ID NO: 6749 - protein, 127 aa, Homo sapiens; identical to SEQ ID NO: 6747

SEQ ID NO: 6750 - DNA, 3423 bp, Homo sapiens
aggttagagttacttgttattggtaaatagccactatggagactaaggaccagaagaaacacagaaagaaaaacagtggacccaaagctgcaaagaaaaagaagtggcatctgcaggatctccagctaggagacgaagaaaatgcccagaagagaaatgccaatgcttttgcagttcagtctgctgtgtggatgtctcgatcctttcacaggactctggatttgaagacacaaaagcatcatattccagtggttgatggaactccactagagccgccaccaatagcggtagtggtgacggggcctccaaagttggaaagagcactttgatataatgcctcattcggaacttcacctggcagaagttcaccgagatcagaggccctgtgacgatcgtgtcaggtaaaaagcgcagactcaccattattgaatgtgggtgtgacattaacatgatgattgatctggctaaagtagcagatctggtactgatgcttatagatgccagctttgggtttgaaatggaaatgtttgagtttctaaacatctgtcaagcacatggctttcctaaaattctgggagttctcacccacctcgactccttcaagcataacaagcaactgaagaagacaaagaagtgattaaaacacaggttctggacagaagtttaccaggttgccaaactgttctacctttctggaatggtgcatggagaatatcaaaaccaagaaatccacaatctgggccattttattacagttatgaagtttaggcctctcatggcaaacttttcacccttatatcctggcagacagttaaaaggatggaagatttgacaaacccggaggatatccaaacaaacatcaaatgtgacctgcaggtgtcactttatggttatttaagaggagcacacttgaaaaataaaagccaaattcacatgccaggacaaggtggggctcacccatgagctggtccagagtctcatctccacctactccaccattgatgccaagatggcttcaagtcgagtgatgctgctttccaattccaaaccacttgggtcagaggctatagataatcaagggtgagtggtgtcattgagcaaacacaaagtcgggctcatccaaggatgagattttgccagagaaaggacgagcagcaagtcagggagcttaagcgtcagcctcgagtttgaccagcagcaggggtcggtgtgtccctctgaatctgagatctatgaggcaggagctgaggacaggatggcaggagcgcccatggctgctgctgtacagcctgctgaggtgactgttgaagttggtgaggacctccacatgcaccaggttcgtgaccgggagatgcctgaagctttggagtttaacctttctgccaatccagaggcaagcacaatattccagaggaactctcaaacagatgctttggagtttaacccttctgccaatccagaggcaagcacaatattccagaggaactctcaaacagatgttgtagaaataagaagaagcaactgtacaaaccattgtgaccttggagatacctcatcatatcacacaaagagatgcagatagatctttgagcatacctgatgaacagttacactcatttgcggtttccaccgtgcacattatgaagaaaagaaatggaggtgggagtttaaataactattcctcctccattccaccgactcccagcaccagccaggaggaccctcagttcagtgttcctcccactgccaacacacccacgcccgtttgcaagcggtccatgcgctggtccaacctgtttacatctgagaaagggagtgacccagacaaagagaggaaagccccggagaatcatgctgacaccatcgggagcggcagagccatccccattaaacagggcatgctcttaaagcgaagtgggaaatggctgaagacatggaaaaagaaatacgtcaccctgtgttccaatggcgtgctcacctattattcaagcttaggtgattatatgaagaatattcataaaaaagagattgaccttcagacatctaccatcaaagtcccaggaaagtggccatccctagccacatcggcctgcgcacccatctccagctctaaaagcaatggcctatccaaggacatggacatcgggctgggtgactccatatgcttcagccccagtatctccagcaccaccagccccaagctcaacccacccccctcccctcatgccaataaaaagaaacacctaaagaagaaaagcaccaacaactttatgattgtgtctgccactggccaaacgtggcactttgaagccacgacgtatgaggagcgggatgcatgggtccaagccatccagagccagatcctggccagcctgcagtcatgcgagagcagtaaaagcaagtcccagctgaccagccagagcgaggccatggccctgcagtcgatccaaaacatgcgtgggaacgcccactgtgtggactgtgagacccagaatcctaagtgggccagtttgaacttgggagtcctcatgtgtattgaatgctcaggtatccaccgcagtcttggcacccgcctttcccgtgtgcgatctctggagctggatgactggccagttgagctcaggaaggttatgtcatctattggcaatgacctagccaacagcatctgggaagggagcagccaggggcagacaaaaccctcagaaaagtccacgagggaagagaaagaacggtggatccgttccaaatatgaggagaagctctttctggccccactaccctgcactgagctgtccctgggccagcagctgctgcgggccaccgctgatgaggacctgcagacagccatcctgctgctggcacatggctcccgtgaggaggtgaacgagacctgtggggagggagacggctgcacggcgctccatctggcctgccgcaaggggaatgtggtcctggcgcagctcctgatctggtacggggtggacgtcatggcccgagatgcccacgggaacacagcgctgacctacgcccggcaggcctccagccaggagtgcatcaacgtgcttctgcagtacggctgccccgacgagtgcgtgtagtatctgttttatttgactgcagtctccttggtgcaaaaacaaaatgggaaaaataaggataactcagaatttcaaaaggaaatcacaaattcagctagtaatagcattttcagtacttttcgtaaactaagtaaatacacaaaatgttgatttttctgaccataagacatattttatgtccttttgccgaggtggatgtgttagtctcaggccctcctggccacattgcccaagtcacacaggcttctgtattatgtatttagataaaatgtgtgaaaatatatttgaaaaaaagttcataaatatgcattgatttttgtacaca

SEQ ID NO: 6751 - protein, 108 aa, Homo sapiens
MAGAPMAAAVQPAEVTVEVGEDLHMHQVRDREMPEALEFNLSANPEASTIFQRNSQTDALEFNPSANPEASTIFQRNSQTDVVEIRRSNCTNHCDLGDTSSYHTKRCR

SEQ ID NO: 6752 - DNA, 3625 bp, Homo sapiens
agatcgcgagtcgtgcgcgtgggaaggtactcccccggtcctccgggtcatctttgctccccaggagcggcatatttcgcatctgcctgaggttagagttacttgttattggtaaatagccactatggagactaaggaccagaagaaacacagaaagaaaaacagtggacccaaagctgcaaagaaaaagaagtggcatctgcaggatctccagctaggagacgaagaaaatgcccagaagagaaatgccaatgcttttgcagttcagtctgctgtgtggatgtctcgatcctttcacaggactctggatttgaagacacaaaagcatcatattccagtggttgatggaactccactagagccgccaccaatagcggtagtggtgacggggcctccaaagttggaaagagcactttgatataatgcctcattcggaacttcacctggcagaagttcaccgagatcagaggccctgtgacgatcgtgtcaggtaaaaagcgcagactcaccattattgaatgtgggtgtgacattaacatgatgattgatctggctaaagtagcagatctggtactgatgcttatagatgccagctttgggtttgaaatggaaatgtttgagtttctaaacatctgtcaagcacatggctttcctaaaattctgggagttctcacccacctcgactccttcaagcataacaagcaactgaagaagacaaagaagtgattaaaacacaggttctggacagaagtttaccaggttgccaaactgttctacctttctggaatggtgcatggagaatatcaaaaccaagaaatccacaatctgggccattttattacagttatgaagtttaggcctctcatggcaaacttttcacccttatatcctggcagacagttaaaaggatggaagatttgacaaacccggaggatatccaaacaaacatcaaatgtgacctgcaggtgtcactttatggttatttaagaggagcacacttgaaaaataaaagccaaattcacatgccaggacaaggtggggctcacccatgagctggtccagagtctcatctccacctactccaccattgatgccaagatggcttcaagtcgagtgatgctgctttccaattccaaaccacttgggtcagaggctatagataatcaaggcgtcagcctcgagtttgaccagcagcaggggtcggtgtgtccctctgaatctgagatctatgaggcaggagctgaggacaggatggcaggagcgcccatggctgctgctgtacagcctgctgaggtgactgttgaagttggtgaggacctccacatgcaccaggttcgtgaccgggagatgcctgaagctttggagtttaacctttctgccaatccagaggcaagcacaatattccagaggaactctcaaacagatgctttggagtttaacccttctgccaatccagaggcaagcacaatattccagaggaactctcaaacagatgttgtagaaataagaagaagcaactgtacaaaccatgtatctactgtgcgtttcagtcaacaatacagcttgtgttcgacaatattccttgatgacagcacagccatccagcattatcttacaatgacaataatatcatgatgtgaccttggagatacctcatcatatcacacaaagagatgcagatagatctttgagcatacctgatgaacagttacactcatttgcggcagaaaatgtatctttttaaaaggtaattgtgagctgtctataggaccctgcaagccactacccaatttttgaagccattcctccttctgttccacacaggtttccaccgtgcacattatgaagaaaagaaatggaggtgggagtttaaataactattcctcctccattccaccgactcccagcaccagccaggaggaccctcagttcagtgttcctcccactgccaacacacccacgcccgtttgcaagcggtccatgcgctggtccaacctgtttacatctgagaaagggagtgacccagacaaagagaggaaagccccggagaatcatgctgacaccatcgggagcggcagagccatccccattaaacagggcatgctcttaaagcgaagtgggaaatggctgaagacatggaaaaagaaatacgtcaccctgtgttccaatggcgtgctcacctattattcaagcttaggtgattatatgaagaatattcataaaaaagagattgaccttcagacatctaccatcaaagtcccaggaaagtggccatccctagccacatcggcctgcgcacccatctccagctctaaaagcaatggcctatccaaggacatggacatcgggctgggtgactccatatgcttcagccccagtatctccagcaccaccagccccaagctcaacccacccccctcccctcatgccaataaaaagaaacacctaaagaagaaaagcaccaacaactttatgattgtgtctgccactggccaaacgtggcactttgaagccacgacgtatgaggagcgggatgcatgggtccaagccatccagagccagatcctggccagcctgcagtcatgcgagagcagtaaaagcaagtcccagctgaccagccagagcgaggccatggccctgcagtcgatccaaaacatgcgtgggaacgcccactgtgtggactgtgagacccagaatcctaagtgggccagtttgaacttgggagtcctcatgtgtattgaatgctcaggtatccaccgcagtcttggcacccgcctttcccgtgtgcgatctctggagctggatgactggccagttgagctcaggaaggttatgtcatctattggcaatgacctagccaacagcatctgggaagggagcagccaggggcagacaaaaccctcagaaaagtccacgagggaagagaaagaacggtggatccgttccaaatatgaggagaagctctttctggccccactaccctgcactgagctgtccctgggccagcagctgctgcgggccaccgctgatgaggacctgcagacagccatcctgctgctggcacatggctcccgtgaggaggtgaacgagacctgtggggagggagacggctgcacggcgctccatctggcctgccgcaaggggaatgtggtcctggcgcagctcctgatctggtacggggtggacgtcatggcccgagatgcccacgggaacacagcgctgacctacgcccggcaggcctccagccaggagtgcatcaacgtgcttctgcagtacggctgccccgacgagtgcgtgtagtatctgttttatttgactgcagtctccttggtgcaaaaacaaaatgggaaaaataaggataactcagaatttcaaaaggaaatcacaaattcagctagtaatagcattttcagtacttttcgtaaactaagtaaatacacaaaatgttgatttttctgaccataagacatattttatgtccttttgccgaggtggatgtgttagtctcaggccctcctggccacattgcccaagtcacacaggcttctgtattatgtatttagataaaatgtgtgaaaatatatttgaaaaaaagttcataaatatgcattgatttttgtacaca

SEQ ID NO: 6753 - protein, 178 aa, Homo sapiens
MASSRVMLLSNSKPLGSEAIDNQGVSLEFDQQQGSVCPSESEIYEAGAEDRMAGAPMAAAVQPAEVTVEVGEDLHMHQVRDREMPEALEFNLSANPEASTIFQRNSQTDALEFNPSANPEASTIFQRNSQTDVVEIRRSNCTNHVSTVRFSQQYSLCSTIFLDDSTAIQHYLTMTIIS

SEQ ID NO: 6754 - DNA, 3643 bp, Homo sapiens
gaatcgggagggacgcggacccggtggaacgcactgcgcagacggcgccggcgccagcactcggccgttgacgagtctttcttccagctgtcccctgcaagtcgtccaggcggcggtccctttttttctgcctttttgtttacctccggcgagtcggcgcgagggtgaatttccgtttccggcggtgtccaagcggacctaaggagtcgcagttgtgaacaggttagagttacttgttattggtaaatagccactatggagactaaggaccagaagaaacacagaaagaaaaacagtggacccaaagctgcaaagaaaaagaagtggcatctgcaggatctccagctaggagacgaagaaaatgcccagaagagaaatgccaatgcttttgcagttcagtctgctgtgtggatgtctcgatcctttcacaggactctggatttgaagacacaaaagcatcatattccagtggttgatggaactccactagagccgccaccaatagcggtagtggtgacggggcctccaaagttggaaagagcactttgatataatgcctcattcggaacttcacctggcagaagttcaccgagatcagaggccctgtgacgatcgtgtcaggtaaaaagcgcagactcaccattattgaatgtgggtgtgacattaacatgatgattgatctggctaaagtagcagatctggtactgatgcttatagatgccagctttgggtttgaaatggaaatgtttgagtttctaaacatctgtcaagcacatggctttcctaaaattctgggagttctcacccacctcgactccttcaagcataacaagcaactgaagaagacaaagaagtgattaaaacacaggttctggacagaagtttaccaggttgccaaactgttctacctttctggaatggtgcatggagaatatcaaaaccaagaaatccacaatctgggccattttattacagttatgaagtttaggcctctcatggcaaacttttcacccttatatcctggcagacagttaaaaggatggaagatttgacaaacccggaggatatccaaacaaacatcaaatgtgacctgcaggtgtcactttatggttatttaagaggagcacacttgaaaaataaaagccaaattcacatgccaggacaaggtggggctcacccatgagctggtccagagtctcatctccacctactccaccattgatgccaagatggcttcaagtcgagtgatgctgctttccaattccaaaccacttgggtcagaggctatagataatcaagggtgagtggtgtcattgagcaaacacaaagtcgggctcatccaaggatgagattttgccagagaaaggacgagcagcaagtcagggagcttaagcgtcagcctcgagtttgaccagcagcaggggtcggtgtgtccctctgaatctgagatctatgaggcaggagctgaggacaggatggcaggagcgcccatggctgctgctgtacagcctgctgaggtgactgttgaagttggtgaggacctccacatgcaccaggttcgtgaccgggagatgcctgaagctttggagtttaacctttctgccaatccagaggcaagcacaatattccagaggaactctcaaacagatgctttggagtttaacccttctgccaatccagaggcaagcacaatattccagaggaactctcaaacagatgttgtagaaataagaagaagcaactgtacaaaccattgtgaccttggagatacctcatcatatcacacaaagagatgcagatagatctttgagcatacctgatgaacagttacactcatttgcggtttccaccgtgcacattatgaagaaaagaaatggaggtgggagtttaaataactattcctcctccattccaccgactcccagcaccagccaggaggaccctcagttcagtgttcctcccactgccaacacacccacgcccgtttgcaagcggtccatgcgctggtccaacctgtttacatctgagaaagggagtgacccagacaaagagaggaaagccccggagaatcatgctgacaccatcgggagcggcagagccatccccattaaacagggcatgctcttaaagcgaagtgggaaatggctgaagacatggaaaaagaaatacgtcaccctgtgttccaatggcgtgctcacctattattcaagcttaggtgattatatgaagaatattcataaaaaagagattgaccttcagacatctaccatcaaagtcccaggaaagtggccatccctagccacatcggcctgcgcacccatctccagctctaaaagcaatggcctatccaaggacatggacatcgggctgggtgactccatatgcttcagccccagtatctccagcaccaccagccccaagctcaacccacccccctcccctcatgccaataaaaagaaacacctaaagaagaaaagcaccaacaactttatgattgtgtctgccactggccaaacgtggcactttgaagccacgacgtatgaggagcgggatgcatgggtccaagccatccagagccagatcctggccagcctgcagtcatgcgagagcagtaaaagcaagtcccagctgaccagccagagcgaggccatggccctgcagtcgatccaaaacatgcgtgggaacgcccactgtgtggactgtgagacccagaatcctaagtgggccagtttgaacttgggagtcctcatgtgtattgaatgctcaggtatccaccgcagtcttggcacccgcctttcccgtgtgcgatctctggagctggatgactggccagttgagctcaggaaggttatgtcatctattggcaatgacctagccaacagcatctgggaagggagcagccaggggcagacaaaaccctcagaaaagtccacgagggaagagaaagaacggtggatccgttccaaatatgaggagaagctctttctggccccactaccctgcactgagctgtccctgggccagcagctgctgcgggccaccgctgatgaggacctgcagacagccatcctgctgctggcacatggctcccgtgaggaggtgaacgagacctgtggggagggagacggctgcacggcgctccatctggcctgccgcaaggggaatgtggtcctggcgcagctcctgatctggtacggggtggacgtcatggcccgagatgcccacgggaacacagcgctgacctacgcccggcaggcctccagccaggagtgcatcaacgtgcttctgcagtacggctgccccgacgagtgcgtgtagtatctgttttatttgactgcagtctccttggtgcaaaaacaaaatgggaaaaataaggataactcagaatttcaaaaggaaatcacaaattcagctagtaatagcattttcagtacttttcgtaaactaagtaaatacacaaaatgttgatttttctgaccataagacatattttatgtccttttgccgaggtggatgtgttagtctcaggccctcctggccacattgcccaagtcacacaggcttctgtattatgtatttagataaaatgtgtgaaaatatatttgaaaaaaagttcataaatatgcattgatttttgtacaca

SEQ ID NO: 6755 - protein, 108 aa, Homo sapiens; identical to SEQ ID NO: 6751

SEQ ID NO: 6756 - DNA, 340 bp, Homo sapiens
atcaaagtagagatagtgaaatagcctaaatgcagcagtcgaataaatgagttgataaatttttatcaatgattacatctttttttcttttcttcctctatgcatatagctttggagtttaacccttctgccaatccagaggcaagcacaatattccagaggaactctcaaacagatgttgtagaaataagaagaagcaactgtacaaaccatgtaagtaaacactcaaatagttaagaaattgatagtttgacataaaaggatgtctctcttgatttctttaaattacaatgtggacctggtggtggtagcatggacctctttttgtggattttctaaa

SEQ ID NO: 6757 - protein, 45 aa, Homo sapiens
MHIALEFNPSANPEASTIFQRNSQTDVVEIRRSNCTNHVSKHSNS

SEQ ID NO: 6758 - DNA, 2548 bp, Homo sapiens
ataataataataataataataataatctacaatgtcatttcccatccaagcttgacttctacctttactttctgatatggttttgccatgtccccacccaaatctcatcatgaattataatccccataatcctgatgtgtcgagggaggggcctagggggaggtgattggatcatgggggcagttatcctcatgctgttcttgtgatattcagtaagtcctcatgagatcttatagggttttgttttgttttttgggatggagtcttgctctgttgtccaggcaggagtgccatggcatgatcttggctcactgcagtctctgcctcttgagttccattgattctcctgcctcagcctcctgagtagctgggattacaggcatgcaccaccacacccagctaatttttgtatttttagtagagacaggatttcactacattagctaggctggtctcaaactcctgacctcagttgatccacctgccttggcctcccaaagtactagggttacaagtgtgagccaccgtgcccagctgagatctgatggttttatacatgtttgacagttgctccttcacatgttcccactctctgtgcggccaccatgtaagtcggacctgcccttctgccatgattgtaagtttcctgaaggacttccccctctgccatgattgttaagtttcctgaggcctccccagccatgtgaaactgagtcaattaaacctctttcctttaaaaattacccaacctcaggtgtttctttatatcagtgtgaaaacagactgctatactttctgatactcatgcttaagcaattggggaattcagactacctgggatcaaactatggccccacccttagcagtcatgtgaccttggggaggttacttaccttctccatctcaacaacttctgtaaaatctgtaacatgagattgtttctgagggttaaatgagcatagcacagtggggacactgtcaggcacacactacttgccagatgtcgagtattcatctttattgaaataggactgtggtaagccactttatggctctcgattttgtatgagaaaatcatgcttagtgccttgttagtaaaagaaagaaaacctgaaagtccctgccatggaaggaagaaatagcggggagaaaagggagttggtaagtttcagcatttcagagcttggaggtgccagttaggtttctattttatggagaaggaggtggaggcaggatgggtcctaaggtgtcattcaaaacacacagccataactctttattgagagtagagctagggccccagggattgctgtggtcaagttgcggacaaaaatgaccactcgttggaagacaggagaggagtgtttagttacaaaagcagtcaacaattcaggtgtatctatattcagacagcaaataaaagttgttcaacttggttgctaatgggacccactctactgaggctttgtatagaactcatagaggaagctggcttcaaggaatgaactaccctgtgcttttcttaggactaaaatctcaggaagctggtgatgaatgaaaaccttagtcccactggcactgcacgaggggccaggagagcagcagcatcataagccacagggtggggcagccaaggcaggggcattctgagctgttggggaggggtggcaggcagggtggggcactgtgaggtgtcggggagggcattgtgaagtggggggtggggcattgtgtgccacatgcctgggctcccacctggggccagtgggcttcagtctgtaggtgactacagaaggagaaggagctccgtctgttctctcttcaggcagttgttgtgtctctcagcgcttgttgggttcacaacctattaaataagccggctggtcttcaccctcccagacaagtcaactcaggggaggcagcagggtgcgggccttggcccgcaaccctagccggggccggggccggggccggggccagggctggtgcccggggccgcgctgtgaggtgggcaggcgaggagcgggaagaccatctctgcaagtgcagcatagcctcggcctaggacagcgggagtgcgtggccaaagctgtgagcagaggcacaggtggtggcagacagtagaggcgccccatggggaacatactgacctgtcgtgtgcaccctagcgtcagcctcgagtttgaccagcagcaggggtcggtgtgtccctctgaatctgagatctatgaggcaggagctgaggacaggatggcaggagcgcccatggctgctgctgtacagcctgctgaggtgactgttgaagttggtgaggacctccacatgcaccaggttcgtgaccgggagatgcctgaagctttggagtttaacctttctgccaatccagaggcaagcacaatattccagaggaactctcaaacagatgctttggagtttaacccttctgccaatccagaggcaagcacaatattccagaggaactctcaaacagatggtgagacgacattgttttttccgccaagagaaagaataaaatctcttgtttgat

SEQ ID NO: 6759 - protein, 137 aa, Homo sapiens
MGNILTCRVHPSVSLEFDQQQGSVCPSESEIYEAGAEDRMAGAPMAAAVQPAEVTVEVGEDLHMHQVRDREMPEALEFNLSANPEASTIFQRNSQTDALEFNPSANPEASTIFQRNSQTDGETTLFFPPRERIKSLV

SEQ ID NO: 6760 - DNA, 4318 bp, Homo sapiens
ataataataataataataataataatctacaatgtcatttcccatccaagcttgacttctacctttactttctgatatggttttgccatgtccccacccaaatctcatcatgaattataatccccataatcctgatgtgtcgagggaggggcctagggggaggtgattggatcatgggggcagttatcctcatgctgttcttgtgatattcagtaagtcctcatgagatcttatagggttttgttttgttttttgggatggagtcttgctctgttgtccaggcaggagtgccatggcatgatcttggctcactgcagtctctgcctcttgagttccattgattctcctgcctcagcctcctgagtagctgggattacaggcatgcaccaccacacccagctaatttttgtatttttagtagagacaggatttcactacattagctaggctggtctcaaactcctgacctcagttgatccacctgccttggcctcccaaagtactagggttacaagtgtgagccaccgtgcccagctgagatctgatggttttatacatgtttgacagttgctccttcacatgttcccactctctgtgcggccaccatgtaagtcggacctgcccttctgccatgattgtaagtttcctgaaggacttccccctctgccatgattgttaagtttcctgaggcctccccagccatgtgaaactgagtcaattaaacctctttcctttaaaaattacccaacctcaggtgtttctttatatcagtgtgaaaacagactgctatactttctgatactcatgcttaagcaattggggaattcagactacctgggatcaaactatggccccacccttagcagtcatgtgaccttggggaggttacttaccttctccatctcaacaacttctgtaaaatctgtaacatgagattgtttctgagggttaaatgagcatagcacagtggggacactgtcaggcacacactacttgccagatgtcgagtattcatctttattgaaataggactgtggtaagccactttatggctctcgattttgtatgagaaaatcatgcttagtgccttgttagtaaaagaaagaaaacctgaaagtccctgccatggaaggaagaaatagcggggagaaaagggagttggtaagtttcagcatttcagagcttggaggtgccagttaggtttctattttatggagaaggaggtggaggcaggatgggtcctaaggtgtcattcaaaacacacagccataactctttattgagagtagagctagggccccagggattgctgtggtcaagttgcggacaaaaatgaccactcgttggaagacaggagaggagtgtttagttacaaaagcagtcaacaattcaggtgtatctatattcagacagcaaataaaagttgttcaacttggttgctaatgggacccactctactgaggctttgtatagaactcatagaggaagctggcttcaaggaatgaactaccctgtgcttttcttaggactaaaatctcaggaagctggtgatgaatgaaaaccttagtcccactggcactgcacgaggggccaggagagcagcagcatcataagccacagggtggggcagccaaggcaggggcattctgagctgttggggaggggtggcaggcagggtggggcactgtgaggtgtcggggagggcattgtgaagtggggggtggggcattgtgtgccacatgcctgggctcccacctggggccagtgggcttcagtctgtaggtgactacagaaggagaaggagctccgtctgttctctcttcaggcagttgttgtgtctctcagcgcttgttgggttcacaacctattaaataagccggctggtcttcaccctcccagacaagtcaactcaggggaggcagcagggtgcgggccttggcccgcaaccctagccggggccggggccggggccggggccagggctggtgcccggggccgcgctgtgaggtgggcaggcgaggagcgggaagaccatctctgcaagtgcagcatagcctcggcctaggacagcgggagtgcgtggccaaagctgtgagcagaggcacaggtggtggcagacagtagaggcgccccatggggaacatactgacctgtcgtgtgcaccctagcgtcagcctcgagtttgaccagcagcaggggtcggtgtgtccctctgaatctgagatctatgaggcaggagctgaggacaggatggcaggagcgcccatggctgctgctgtacagcctgctgaggtgactgttgaagttggtgaggacctccacatgcaccaggttcgtgaccgggagatgcctgaaggtgaggaggtgataggtgccatctaccctcggtttgcctttggctgctgctgtccccaaggttccctttgaggcatcccccacttcgagctcctttctgcttgtagccagctttcccgggggctggccaggaacaaaactggctctgccttgaattcccaccccttagtctttccccaccgagtccagtcagtttcttttcgcctcccctcccaatcgcccagttcttgctctctcatctcattctcccaggctggcatggggccatttatttatggctcttgtcgaataagcagcagttgaataaatgagttgatacatttttataaatgattacatcttttttcttttctccctctatacatatagctttggagtttaacctttctgccaatccagaggcaagcacaatattccagaggaactctcaaacagatggtgagacaacagtgtctgtagctctgtttattatcctgtgggactttgtttaggcttctttgagctattctcttccttttctcaataaaaactcaaatatcccaacttttcagtacccatcttattttttctttgtacctatccagatggtacctaagtgaaggaaccaggtaagtgcctaattgtttcctttgttaaagtagccaaatctcaggacagttcctattcaaatatttggggatttcttatttaaaatcagaatggaggttgccacgggagaggctatatggtattcttaatgggctgctttaagtcaccttgatagaagctgcttagtttcttctaactgtaatttgaacacagaaggaaaaagaaaaaaggagaatgcttaaaataattgtgaaaggtgtgaaatgtcacagccggggctgcagaaaaatggttgtgtgtgtgtgtttggggtttctcaaaggagtttacctatgaggctctgattactttaaaattcttactttaacagaaaatgtgtctccagatttattctggtgacttaacagactttatttacctccttgttctaaaagagaggtggggattggttcatggtcaaaactttcaaaagacatgaaacgtcaacgtagacttttaatgtgtaatataaagattgcaggttaaaatgtcagaccttccctgttagagtgtttgttgccatggctccccctttgtcccttcccctcctgacaatagcatcttgttcaaagataagaaagttacagttttggctgggcttggtggctcacgcctgtaatcccagcactttgggaggccgtggcaggcggatcacctgaggtcaggagttcgagaccagcctggccaacatagtgaaacactgtctctactaaaaaagaaaatacaaaaattagctgggcgtagtggcgcatgactgtagttccagctactcacaaggccgaggcaggagaattgcttggacctaggaggtggaggttgcagtgagcagagatcacgccaatgcactccagcctgggtgacagagcgagactccgtctcacaaaaaaaaaaaggaaagaaagttggagttttttagtctctacactgctggcagaggcaggggatgggagccggtagaaaagagaaaacaattagttggtttgcctctaaaattttgcaaagagatgaatctaagtaaaagtaattctgggtaataatatggttcttgaataaaaactgaaattttcaaaatagaaaacattgcatcataaacatattaaatccagttggcttattggtttcatttaaatgccagagatttcatcactgtagaggaaatgtcttatagctcttctatttaaactttggtcgggctcttaatttttaaagaggtaggataattaagactcattatgagtgtgactttgtaacttggaagtactatcttcacatttcaagatatttaaggattgctttagaataaacaaatgcattatgtgaattaattgattgtacc

SEQ ID NO: 6761 - protein, 97 aa, Homo sapiens [sequence omitted]

SEQ ID NO: 6762 - DNA, 2765 bp, Homo sapiens
ataataataataataataataataatctacaatgtcatttcccatccaagcttgacttctacctttactttctgatatggttttgccatgtccccacccaaatctcatcatgaattataatccccataatcctgatgtgtcgagggaggggcctagggggaggtgattggatcatgggggcagttatcctcatgctgttcttgtgatattcagtaagtcctcatgagatcttatagggttttgttttgttttttgggatggagtcttgctctgttgtccaggcaggagtgccatggcatgatcttggctcactgcagtctctgcctcttgagttccattgattctcctgcctcagcctcctgagtagctgggattacaggcatgcaccaccacacccagctaatttttgtatttttagtagagacaggatttcactacattagctaggctggtctcaaactcctgacctcagttgatccacctgccttggcctcccaaagtactagggttacaagtgtgagccaccgtgcccagctgagatctgatggttttatacatgtttgacagttgctccttcacatgttcccactctctgtgcggccaccatgtaagtcggacctgcccttctgccatgattgtaatttcctgaggcctccccagccatgtgaaactgagtcaattaaacctctttcctttaaaaattacccaacctcaggtgtttctttatatcagtgtgaaaacagactgctatactttctgatactcatgcttaagcaattggggaattcagactacctgggatcaaactatggccccacccttagcagtcatgtgaccttggggaggttacttaccttctccatctcaacaacttctgtaaaatctgtaacatgagattgtttctgagggttaaatgagcatagcacagtggggacactgtcaggcacacactacttgccagatgtcgagtattcatctttattgaaataggactgtggtaagccactttatggctctcgattttgtatgagaaaatcatgcttagtgccttgttagtaaaagaaagaaaacctgaaagtccctgccatggaaggaagaaatagcggggagaaaagggagttggtaagtttcagcatttcagagcttggaggtgccagttaggtttctattttatggagaaggaggtggaggcaggatgggtcctaaggtgtcattcaaaacacacagccataactctttattgagagtagagctagggccccagggattgctgtggtcaagttgcggacaaaaatgaccactcgttggaagacaggagaggagtgtttagttacaaaagcagtcaacaattcaggtgtatctatattcagacagcaaataaaagttgttcaacttggttgctaatgggacccactctactgaggctttgtatagaactcatagaggaagctggcttcaaggaatgaactaccctgtgcttttcttaggactaaaatctcaggaagctggtgatgaatgaaaaccttagtcccactggcactgcacgaggggccaggagagcagcagcatcataagccacagggtggggcagccaaggcaggggcattctgagctgttggggaggggtggcaggcagggtggggcactgtgaggtgtcggggagggcattgtgaagtggggggtggggcattgtgtgccacatgcctgggctcccacctggggccagtgggcttcagtctgtaggtgactacagaaggagaaggagctccgtctgttctctcttcaggcagttgttgtgtctctcagcgcttgttgggttcacaacctattaaataagccggctggtcttcaccctcccagacaagtcaactcaggggaggcagcagggtgcgggccttggcccgcaaccctagccggggccggggccggggccggggccagggctggtgcccggggccgcgctgtgaggtgggcaggcgaggagcgggaagaccatctctgcaagtgcagcatagcctcggcctaggacagcgggagtgcgtggccaaagctgtgagcagaggcacaggtggtggcagacagtagaggcgccccatggggaacatactgacctgtcgtgtgcaccctagcgtcagcctcgagtttgaccagcagcaggggtcggtgtgtccctctgaatctgagatctatgaggcaggagctgaggacaggatggcaggagcgcccatggctgctgctgtacagcctgctgaggtgactgttgaagttggtgaggacctccacatgcaccaggttcgtgaccgggagatgcctgaaggtgaggaggtgataggtgccatctaccctcggtttgcctttggctgctgctgtccccaaggttccctttgaggcatcccccacttcgagctcctttctgcttgtagccagctttcccgggggctggccaggaacaaaactggctctgccttgaattcccaccccttagtctttccccaccgagtccagtcagtttcttttcgcctcccctcccaatcgcccagttcttgctctctcatctcattctcccaggctggcatggggccatttatttatggctcttgtcgaataagcagcagttgaataaatgagttgatacatttttataaatgattacatcttttttcttttctccctctatacatatagctttggagtttaacctttctgccaatccagaggcaagcacaatattccagaggaactctcaaacagatggtgagacaaca

SEQ ID NO: 6763 - protein, 104 aa, Homo sapiens
MFPLSVRPPCKSDLPFCHDCNFLRPPQPCETESIKPLSFKNYPTSGVSLYQCENRLLYFLILMLKQLGNSDYLGSNYGPTLSSHVTLGRLLTFSISTTSVKSVT

SEQ ID NO: 6764 - DNA, 4071 bp, Homo sapiens
aggttagagttacttgttattggtaaatagccactatggagactaaggaccagaagaaacacagaaagaaaaacagtggacccaaagctgcaaagaaaaagaagtggcatctgcaggatctccagctaggagacgaagaaaatgcccagaagagaaatgccaatgcttttgcagttcagtctgctgtgtggatgtctcgatcctttcacaggactctggatttgaagacacaaaagcatcatattccagtggttgatggaactccactagagccgccaccaatagcggtagtggtgacggggcctccaaagttggaaagagcactttgatataatgcctcattcggaacttcacctggcagaagttcaccgagatcagaggccctgtgacgatcgtgtcaggtaaaaagcgcagactcaccattattgaatgtgggtgtgacattaacatgatgattgatctggctaaagtagcagatctggtactgatgcttatagatgccagctttgggtttgaaatggaaatgtttgagtttctaaacatctgtcaagcacatggctttcctaaaattctgggagttctcacccacctcgactccttcaagcataacaagcaactgaagaagacaaagaagtgattaaaacacaggttctggacagaagtttaccaggttgccaaactgttctacctttctggaatggtgcatggagaatatcaaaaccaagaaatccacaatctgggccattttattacagttatgaagtttaggcctctcatggcaaacttttcacccttatatcctggcagacagttaaaaggatggaagatttgacaaacccggaggatatccaaacaaacatcaaatgtgacctgcaggtgtcactttatggttatttaagaggagcacacttgaaaaataaaagccaaattcacatgccaggacaaggtggggctcacccatgagctggtccagagtctcatctccacctactccaccattgatgccaagatggcttcaagtcgagtgatgctgctttccaattccaaaccacttgggtcagaggctatagataatcaagggtgagtggtgtcattgagcaaacacaaagtcgggctcatccaaggatgagattttgccagagaaaggacgagcagcaagtcagggagcttaaggtaattatgagaaagtgactatctaaaattgcttaggtagaaggagacagattggatttttgtgtgtttggtatttgggataagagggatgtgggtgtgtacttgacatgggttgtttattctcgctctctctcttttttttttttttgagagggagtctcactctgtcacccaggctggagtgctgtggcacagtcttggctcactgcaacctctgcctcccgagttcaagggattctcctgcctcagcctcccgagtagctgggattacaggtgcctgccaccatgcccggctaatttttgtgattattttttttagtggagacgaggtttcactatgtaagtgaagctggtctcgaactcctgacctcagatgatccacccgcctcagcctcccaaagtgctgggattacaggtgtgagccaccgcgcctggcctgtttattctcttaagagagaaaatgaggggattaatggactgtagttctggacaaggtggaaaactcttaaagtggaagtattggggcgaatgctctgacaggctaggatggtgcagtcagtcccttcacccagaaatcagtagaatgttagcagttcagactcaaaccttgtgaaaaacaggtggtggaaaggaaatccctcacagcaactggcaccataatcaagacaatgtttgcagaataaatggagttacctgctttcagccccaggtcatagctattgtctgccctgctgatatgtgataataatttgtgatcatgttgtcttaaaatggggtcactcatctccagtagaattaagtccacagtgaagttgtccccccatccccaaagagataaacatatatgaatgaactcacgtgataacaactactgctgcctgggatcatgagagacctgaactgaactgataggaagtgaaaggtggctgagataatgagaatagacccatctgcagaggatcataaaaccagcaaagacaatatcttgtctaagatgccttcacaaactttgtccatgagaactcttaaggatttcaccagacctgttggctgctgctgtgatctctgcccaagaggagcctctgaccaacatccaaagggcttctggacccactggactcctctggaggtaccttagtctcccgatccatggctgtgtttttttactccctttatcgctgcctgtgtgtagaatgataattgcacaattgatagtgtgaagacctcttgataaatggtaaatctgagcatatgtatttggctgacatgtcattgtgaaacctcacagcttcagtcagtgtcaacgcagctagggagcatgtacctaatgcacatatcactgggcatagtctacaggcacctaataactcaggtaccttaacagtcactaatgagtgtctctccaaggactaaacaatggaagactgtagaagatgctattcattaagatatctcaagaatatggaagactattattcacttctcatgggacaggactttatagggcacctgaaaaaactcccatgaaaaatcacttttacaaaatgtcaagttatgatatccaagatgaaaccaatgagtcacaacattcacataatacactgtacaaccctgatctcttgactgtcatcaaatgtttcttacctctaaaccaaagtttcattttataatttaatttttctcattttttccattctcttagcttaagaaaagatcattacaaactttttgtaagtttttcatatatgcttgcaaagggttgtaaaactttattgtgattattcttgctttaagctgaaacttccctaatctttctttagagattgtggcatagcatgttagtttcttttccatatccaattgttttctgttatgaatacagaaatacaggcactgtcttgtaactttaaatagacatcatctcaagtctacaagaattatccaaaatggtatttaatgacatttctaggtcttcagacactattaatgcagattgtagcctctaggtcctgaagattttactagatactggttactgaaactgagctttcttgaattctttttccttccactgtggtttcccgcatttcaacatatcacctatttttgtcctcaaaggttacttaaatgttttccacagaattaaattaaatatgaatcatccctcctctgatttttgaaatgaccctttgcttcctatgataatgattcttctggtccgttttgtagttatatgttagagtttgtaaatagtcacacattttgcaactgcatataattttcttattattttttcctcttcctctaaaactgctgttatttcttttaactttttgtgggaaaaattaaacccatctttcactttgttgatatacttatttataattgaactccttgatttttgctcgaattgcttttcaagttacccacttttagggaagacattatttgggttttgtttagtgtatcaggctttttttagttagttgtatcaagaagtgtagacttttctatacataatatcctttttcccacagtatttttttttttttttaaagtctagccaggtgcagtggctcacgcctgtaatcccagactttgggaggccgaggccggcggatcacgaagtcaagagatggagaccatcctggctaacacgttgaaaccccgtctttactaataatacaaaaaattagctggacatggtaacgggtgcctgtagtcccagctaatcaggaggctgaggcaggagaatggcatgaacccaggaggcagaggttgcagtgagccgagatcgtgccactgcactccagcctgggtgacagagcaagactccatctcaaaaaaaaaaaaaaaaaaaattatgttaaaataaaggtcatcaaaagatattttcct

SEQ ID NO: 6765 - protein, 97 aa, Homo sapiens
METKDQKKHRKKNSGPKAAKKKKWHLQDLQLGDEENAQKRNANAFAVQSAVWMSRSFHRTLDLKTQKHHIPVVDGTPLEPPPIAVVVTGPPKLERAL

SEQ ID NO: 6766 - DNA, 3959 bp, Homo sapiens
gaatcgggagggacgcggacccggtggaacgcactgcgcagacggcgccggcgccagcactcggccgttgacgagtctttcttccagctgtcccctgcaagtcgtccaggcggcggtccctttttttctgcctttttgtttacctccggcgagtcggcgcgagggtgaatttccgtttccggcggtgtccaagcggacctaaggagtcgcagttgtgaacaggttagagttacttgttattggtaaatagccactatggagactaaggaccagaagaaacacagaaagaaaaacagtggacccaaagctgcaaagaaaaagaagtggcatctgcaggatctccagctaggagacgaagaaaatgcccagaagagaaatgccaatgcttttgcagttcagtctgctgtgtggatgtctcgatcctttcacaggactctggatttgaagacacaaaagcatcatattccagtggttgatggaactccactagagccgccaccaatagcggtagtggtgacggggcctccaaagttggaaagagcactttgatataatgcctcattcggaacttcacctggcagaagttcaccgagatcagaggccctgtgacgatcgtgtcaggtaaaaagcgcagactcaccattattgaatgtgggtgtgacattaacatgatgattgatctggctaaagtagcagatctggtactgatgcttatagatgccagctttgggtttgaaatggaaatgtttgagtttctaaacatctgtcaagcacatggctttcctaaaattctgggagttctcacccacctcgactccttcaagcataacaagcaactgaagaagacaaagaagtgattaaaacacaggttctggacagaagtttaccaggttgccaaactgttctacctttctggaatggtgcatggagaatatcaaaaccaagaaatccacaatctgggccattttattacagttatgaagtttaggcctctcatggcaaacttttcacccttatatcctggcagacagttaaaaggatggaagatttgacaaacccggaggatatccaaacaaacatcaaatgtgacctgcaggtgtcactttatggttatttaagaggagcacacttgaaaaataaaagccaaattcacatgccaggggtagaacattttgccatgagtgacatcagtttcctcccagacccttgtgttcttcctgaataacaaaagaagtgctgtttaaataagaaggagcagctggtttatgcgcctgtttctggagttgagggtgtgctgtatgacaaagacgctgtctgtgttgaccttggtggcagccacggttttcaggcatcagacaaggtggggctcacccatgagctggtccagagtctcatctccacctactccaccattgatgccaagatggcttcaagtcgagtgatgctgctttccaattccaaaccacttgggtcagaggctatagataatcaaggcaaccttgcatcccatgggcccttcttctatggccacatgtctctgtggctctttccttcccccttctcttccactgttaaggactcatgtgcttacttagtcctgaatggagacaccgtcatcatccacatgagcccactgtccgaatccgtgagtggtgtcattgagcaaacacaaagtcgggctcatccaaggatgagattttgccagagaaaggacgagcagcaagtcagggagcttaaggtggtggaaaggaaatccctcacagcaactggcaccataatcaagacaatgtttgcagaataaatggagttacctgctttcagccccaggtcatagctattgtctgccctgctgatatgtgataataatttgtgatcatgttgtcttaaaatggggtcactcatctccagtagaattaagtccacagtgaagttgtccccccatccccaaagagataaacatatatgaatgaactcacgtgataacaactactgctgcctgggatcatgagagacctgaactgaactgataggaagtgaaaggtggctgagataatgagaatagacccatctgcagaggatcataaaaccagcaaagacaatatcttgtctaagatgccttcacaaactttgtccatgagaactcttaaggatttcaccagacctgttggctgctgctgtgatctctgcccaagaggagcctctgaccaacatccaaagggcttctggacccactggactcctctggaggtaccttagtctcccgatccatggctgtgtttttttactccctttatcgctgcctgtgtgtagaatgataattgcacaattgatagtgtgaagacctcttgataaatggtaaatctgagcatatgtatttggctgacatgtcattgtgaaacctcacagcttcagtcagtgtcaacgcagctagggagcatgtacctaatgcacatatcactgggcatagtctacaggcacctaataactcaggtaccttaacagtcactaatgagtgtctctccaaggactaaacaatggaagactgtagaagatgctattcattaagatatctcaagaatatggaagactattattcacttctcatgggacaggactttatagggcacctgaaaaaactcccatgaaaaatcacttttacaaaatgtcaagttatgatatccaagatgaaaccaatgagtcacaacattcacataatacactgtacaaccctgatctcttgactgtcatcaaatgtttcttacctctaaaccaaagtttcattttataatttaatttttctcattttttccattctcttagcttaagaaaagatcattacaaactttttgtaagtttttcatatatgcttgcaaagggttgtaaaactttattgtgattattcttgctttaagctgaaacttccctaatctttctttagagattgtggcatagcatgttagtttcttttccatatccaattgttttctgttatgaatacagaaatacaggcactgtcttgtaactttaaatagacatcatctcaagtctacaagaattatccaaaatggtatttaatgacatttctaggtcttcagacactattaatgcagattgtagcctctaggtcctgaagattttactagatactggttactgaaactgagctttcttgaattctttttccttccactgtggtttcccgcatttcaacatatcacctatttttgtcctcaaaggttacttaaatgttttccacagaattaaattaaatatgaatcatccctcctctgatttttgaaatgaccctttgcttcctatgataatgattcttctggtccgttttgtagttatatgttagagtttgtaaatagtcacacattttgcaactgcatataattttcttattattttttcctcttcctctaaaactgctgttatttcttttaactttttgtgggaaaaattaaacccatctttcactttgttgatatacttatttataattgaactccttgatttttgctcgaattgcttttcaagttacccacttttagggaagacattatttgggttttgtttagtgtatcaggctttttttagttagttgtatcaagaagtgtagacttttctatacataatatcctttttcccacagtatttttttttttttttaaagtctagccaggtgcagtggctcacgcctgtaatcccagactttgggaggccgaggccggcggatcacgaagtcaagagatggagaccatcctggctaacacgttgaaaccccgtctttactaataatacaaaaaattagctggacatggtaacgggtgcctgtagtcccagctaatcaggaggctgaggcaggagaatggcatgaacccaggaggcagaggttgcagtgagccgagatcgtgccactgcactccagcctgggtgacagagcaagactccatctc

SEQ ID NO: 6767 - protein, 125 aa, Homo sapiens
MASSRVMLLSNSKPLGSEAIDNQGNLASHGPFFYGHMSLWLFPSPFSSTVKDSCAYLVLNGDTVIIHMSPLSESVSGVIEQTQSRAHPRMRFCQRKDEQQVRELKVVERKSLTATGTIIKTMFAE

SEQ ID NO: 6768 - DNA, 5862 bp, Homo sapiens
gaatcgggagggacgcggacccggtggaacgcactgcgcagacggcgccggcgccagcactcggccgttgacgagtctttcttccagctgtcccctgcaagtcgtccaggcggcggtccctttttttctgcctttttgtttacctccggcgagtcggcgcgagggtgaatttccgtttccggcggtgtccaagcggacctaaggagtcgcagttgtgaacaggttagagttacttgttattggtaaatagccactatggagactaaggaccagaagaaacacagaaagaaaaacagtggacccaaagctgcaaagaaaaagaagtggcatctgcaggatctccagctaggagacgaagaaaatgcccagaagagaaatgccaatgcttttgcagttcagtctgctgtgtggatgtctcgatcctttcacaggactctggatttgaagacacaaaagcatcatattccagtggttgatggaactccactagagccgccaccaatagcggtagtggtgacggggcctccaaagttggaaagagcactttgatataatgcctcattcggaacttcacctggcagaagttcaccgagatcagaggccctgtgacgatcgtgtcaggtaaaaagcgcagactcaccattattgaatgtgggtgtgacattaacatgatgattgatctggctaaagtagcagatctggtactgatgcttatagatgccagctttgggtttgaaatggaaatgtttgagtttctaaacatctgtcaagcacatggctttcctaaaattctgggagttctcacccacctcgactccttcaagcataacaagcaactgaagaagacaaagaagtgattaaaacacaggttctggacagaagtttaccaggttgccaaactgttctacctttctggaatggtgcatggagaatatcaaaaccaagaaatccacaatctgggccattttattacagttatgaagtttaggcctctcatggcaaacttttcacccttatatcctggcagacagttaaaaggatggaagatttgacaaacccggaggatatccaaacaaacatcaaatgtgacctgcaggtgtcactttatggttatttaagaggagcacacttgaaaaataaaagccaaattcacatgccaggacaaggtggggctcacccatgagctggtccagagtctcatctccacctactccaccattgatgccaagatggcttcaagtcgagtgatgctgctttccaattccaaaccacttgggtcagaggctatagataatcaagggtaagtctgctttttttctatttttaataaaaagatatattacagaagatcgtatcacccataattctgccatcataacacattttggtgggattcattctatgtcgttttgtttttctttgtgtgtgcatgtgtctctgagggctcttcacttacctgacattacaagggagtcttatcttgaaaaaaatacaggatgcatttttcaacagacttcaaatattcctcaaataccacgccatcttccataggttgcttttttggtttttcagagacctgaggccacttggctttcttttgatggccgaaacactagagcagagtcagggagtttgtggctgtccagaagccacatgccttgtctctgaaagttttatttagattatgttgtattatctcccatgggtaggtttccactaatgtgtggcttatgtgaattatttttcagtctgggttgggaatttgtatacctttatgcttagtggatgtttgcaaaacactgattttgttgtattgatttatgacttccagtaaaatttatctgaaaattttgagatagtgtagtatataatttgttacaatgtgcataaactacctaccacagtgcctgacataatgagtgttattagctgttttcatttttgcgtatccttctagacatccttgtctacaagaatactctcttctaatatagctacaggtaaaatacgtaattttatttctatattctgaggattttttttctatacagtctttatgtaatcatgattttattgttaccagtgtttttttgttattgtggtgttattcctgtattctaacttatccatcccttatggtatgatttttagttttttctaatttatgttttcatacttttatctattgtgctacgttaaaaagcttcatatagtttttttagcttagaaattaatcagctttccagaagatctataaaaccctaacttcccttttgagcaatttttttctaaaattagatttttttttttaagggttattcctttattctctctataagttcttttgaagtgtggtgttagggaaccatgcctcagtttccttattaactcttccggtgtttatcagatcattttttccctacgctatgtcatcttaaacatcttaagcaattcattgacattttctgtttctttgtattttcattgactatatttccagttctagattagctgattaatgtacaaattgaattattttgcatatccttggtgatataggctgttgatgccaaaggaggaaaaacaaatagacttgaaaactggtcgaatgcgtcagaaagccatttttggagatgattctgtgcgaacgtcttctctcctttcttgatctcttaatttttttttcttatccaaatatataccagctgattttgtttctagaagatccaagatctttggtttagagatatattctcttaatgttaactggtattagaatactgtattttctgtattttatttcaatgcattttaaaatagaaatgattgtattttcttttaacttgtgaagtagagcatggcatacaaattttggaatctcattatttcaacaaatttccttcttagtgtgcaagttgtattcagcacataaagtccatccagctttgttgtagatgcagtgtgattattacatgttgataaggtgtgaattggagatgggatccaaaagtactgtacttattgtaatttttaagctaattgtagatttggtggtgaatattttactactgcaaaatgaaaacagcatttcatcagaagttgttttatggtctttcaggcattttattttatatctttggtgctttttgcccatgaagtatctcttttgtgtgtttgtgtgtatgtgtactgatttgctgtaaatttcacagtgctcattgtcagggatcatcagaatcaggcctaggcagagagctgagcagtactctcagtatgtctctgtgtcctggttgccacatatctctgttgtttatttataaattggagaactctctgatgtgtaacaaaggttggatagatcagagacaattggaagacgaatcctctactctattgtcacctcttctttttctattcacacatgtcagatagagacatgcgtgttgtaaattattttgtcagaatgaaagcctggcagattaagtgatttcttctctttttgctgtacttgatatcgatctcttgttcatttcttgataatatgtttggttatttttgttttcattgcttttggtgtcagagatggctttggattccctgttctgtgtgctcctgtctggctcctgaacccagctggagaggtgtgtcaatcccaactggtgaagtactgagaggaagctacacaaaaggcagcaaggtgttaataagtgtacctctgacattttaaccacctctgacttttccatggaatggacaagtagtagtctctgtcagagcaatgttttaaaggaaaaaaagaaacttgaggtcgtaaactgttcattaatttatgctgttattttgtgtttactcaactcatttatattgacttgtaaattagtaatttatgaactactattcatcaattcattgcctacatgtcagcaaacaagttttcttcttaataaagaatccggttctcagcatgtgaagttcacgtttataaagatctctctacatcttagatttgattcttcctttaaatatttttctcattgacatttgaaagcacctgaccttatataaaatgaagaactttcataactccataaaaggagaattatgacatcatctactatttctttctcttgtctcataaatctaaaccatcaacctgcttatttttgtatactgtcacactgtgtattccctgcattgaatgcatttctattgacattgtctgtaaaaattgtgggaagttgtctgcaccctaaattttctgttatggggattaaatatccagtatccatgtttttccaagtcttacatcagaaagggtaaatacagccctcacagcagcctgttgtttgtcctgcaattgtgtttccatcacattacacaaagcctctttgtcttcgtggttgtaccctgctaataagtttttttttaaattatgtaatgtgtgtatatacaaatacctatatgtatgtgtgtacacatacagctgatatctactgagattatgtatgcatgaactatagaattaacttgcaattttaagaaaataaattattttgtaaagataaatctcatgtttaagaaggggaattacaattgaatcatttagggatgcctcagcctaaacataatatggaaaaagccataaccaaaagtcattttagagtactgctaggttgctcaacctatcatcacatttaattaaaatgtcagtttgaaccatggccagtcgattttcgttaatatgttatttaaatcaacttgtgaagtcttcattttagatatagaatttgtgttaatgaactggaaaataacattctattgcttggaagatgtgttaaagcctaaatatttatgactttgtaaaagaagaaaaccagctggtgatcagttggcattagtatataaggatgtactcatatttgataatagccatttttttctaacaagagtaagggagttgggaatgggaggcagagacagggacacagatatataaaaaattgtagacaaaactgtattgcgttctgagtatggttctgtgatccatggttcagtttgagaggttcctgtgtcccttatgagaagggacaggaaagccaggaggacaggagtatgtttgggcctgtgtctgtgcttccaccacagaagtcagcagctctacctttctcttttctcctctttatctaataattgtttcctcttcaaatttgggaaatgagcttaatcaaagatttgttgtgtttaagttaatgctaatgtgtagtttatctgattcagttttgaagggcaggatatatatagatagttatgttgtgtgtggtgggggggtagtgtttgtgtgtgtgtgtgtgtgtgtgtgtgtgtatatatatatatatttatattacatatattttaatattctagactagtatgaaaacaatgctacttccattgctttatatacgtatatatatacacattgtctaatgctataattaaaaaaaagttgtagacacaaatatacccatttaaaaaaaaaatttttttgctattttacttcatactgccaactcctttttcctgaaactgcttcaactctggaattcttttttgctattagttttattttattgaaatattcatgaatgagcatacacttgtatatggatgtaaaattcacagtaatgttctcatgaattcatctgtgaataacattttatagacaaaatgtctgcactaggacaagagaaagatctataattcctttgttctaaggtagcgccattcattgttattattttaaaatacgagtgtcgactgatgttaaaacacaaaatggtcttcccccaaccccccaaaaaaacactaaaagggataatt

SEQ ID NO: 6769 - protein, 97 aa, Homo sapiens
MEWTSSSLCQSNVLKEKKKLEVVNCSLIYAVILCLLNSFILTCKLVIYELLFINSLPTCQQTSFLLNKESGSQHVKFTFIKISLHLRFDSSFKYFSH

SEQ ID NO: 6770 - DNA, 1384 bp, Homo sapiens
gaatcgggagggacgcggacccggtggaacgcactgcgcagacggcgccggcgccagcactcggccgttgacgagtctttcttccagctgtcccctgcaagtcgtccaggcggcggtccctttttttctgcctttttgtttacctccggcgagtcggcgcgagggtgaatttccgtttccggcggtgtccaagcggacctaaggagtcgcagttgtgaacaggttagagttacttgttattggtaaatagccactatggagactaaggaccagaagaaacacagaaagaaaaacagtggacccaaagctgcaaagaaaaagaagtggcatctgcaggatctccagctaggagacgaagaaaatgcccagaagagaaatgccaatgcttttgcagttcagtctgctgtgtggatgtctcgatcctttcacaggactctggatttgaagacacaaaagcatcatattccagtggttgatggaactccactagagccgccaccaatagcggtagtggtgacggggcctccaaagttggaaagagcactttgatataatgcctcattcggaacttcacctggcagaagttcaccgagatcagaggccctgtgacgatcgtgtcaggtaaaaagcgcagactcaccattattgaatgtgggtgtgacattaacatgatgattgatctggctaaagtagcagatctggtaagtgagcaggggcagcctggggtgctgatggagacttacagcattgtgataggttatttaccccgtgatgaagggaagagagttttgtgattattaaaaggatcatggtcattatcagggatatagtagatgtgattgaattgatgatgataataataatagtaataaatgttgtcatattaataatacaaatggaatgtgcacaatgaaatgtgttccaaaatctaaaagcagatcacaggatggagaaaacctttaatgaacacagctaataagagctcatttacatgcatacatatatatgtacaaatatatcatagtaagtaccatttcttcttggacccttcctggcactgtgctaactgctttctacaaatttagcttacatacacccttgaggtgagtaggtattatctatagtttacataagatgaaatagagcctcccagcagttaagtaacttgtgtgaagatgggacccttgttcctgatggttctagaaccttcatccttaatgataatgctaaagtaagtacatgaattgcctgaagaagtggtcagagtttatcaatagaaaattcaggcagtactcagcgtgtggaaaatgtacatgctcttgcatttatggaaatgataatgttcactatttctgatattctatgaactatcttttacattggc

SEQ ID NO: 6771 - protein, 97 aa, Homo sapiens; identical to SEQ ID NO: 6765

SEQ ID NO: 6772 - DNA, 1485 bp, Homo sapiens
aacaaaaaggcagaaaaaaagggaccgccgcctggacgacttgcaggggacagctggaagaaagactcgtcaacggccgagtgctggcgccggcgccgtctgcgcagtgcgttccaccgggtccgcgtccctcccgattcagccccaccccgccctcggaatccgctgcctcagctcctgctgtggcactccccagcagcttgcacctcgctcgcggagtccttgctgaaggccagggcagctgtgcggcctggcgcgggttacttgatgccgtgcaaaagccaggagacacatttggttctggccgccccggagtcaccgtgcccggggcgaatggactatggctggattgggagtccacttcctcctctgtaaagatgacagacgagggagatctcacgttctgggggtgccctatagccctcttttggccagaagcggtggatcacgcctgtaatcccagccctttgggaggccgaggcaggaggattgcttgagcccaggagttcaagaccaatctgggcaacatagggaggctacgtctctcaaaaaataaataaatacataaataaataaaaataaagccagcgtcgtggcggggcgcctgtggtccctgtggtcccagctactctggaggctgaggcgggacgatcgcttgagcctgggaggcagaagttgtagtgagctgagatcgagccactgcactccagcctgggcgacagagcaagacactgtctcaaagaaaaataaataaataaaataaggccctctttttccgggaccaacagactctgagggcagggacaaactgacccagcctaaactgcctcgccttccctgctcccgggaaaggggttttccctgagggaaggtagcatcttgccattttcttcctgcacagctttgccttcccagggatccacccattgccacctgaggaaatgccttggagcccatctaatccccagcccagctacttgggacgcctacagagactacattgtcagaggatgcatcttcctctagtcttggagggtttcttttcaatatgatcccaccggtgcatgcaaggctcaattctacatcaaaaaactaggcccactcctgtcgccgagacccccaggcttcaggtcctgtcacagtgaccttgttatcacccccagcagcccccagatgtgccgtttgggggtgctaaagctggtgttaagatctatcccaagaactataccgataacaaactggaaaagatcacaaggaggttcaccatggagctagcaaagaagggctttattgtctttgtatccagacaattctagcctcatggaatgagttgaggagtgttccttcctcttctgtttttggaaaagcttttgaaagtccacagatgtggggatctcaagaagcaggcgttcctggaactgtttccccttcctgtgcttctggtattgaaaaccattcatcacctgcctgaattcttcagtggtc

SEQ ID NO: 6773 - protein, 33 aa, Homo sapiens
MCRLGVLKLVLRSIPRTIPITNWKRSQGGSPWS

SEQ ID NO: 6774 - DNA, 999 bp, Homo sapiens
atggccatcatcacggggggcttcgccaccttctcctcctgcttccccgacctctgcgagggcgagcctgctgccctgctacccatgagcctctcccagtcctgcctgctcgtgcccagcgtgggcctgaccctcatcctgcctcacctctacctgggctcgcaggaagacgtcctgaacaaggatctgatgacgcagaatggaataagctacgtcctctatgccagcaactcctgccccaagcctgacttcatctaccagagccacttcttgcaggtccccatcaacgacaactactgtgaaaagctgctgccctggctggacaagtccatcgagttcatcgataaagccaagctgtccagctgccaagtcatcgtccaccatctggccggcatctcctgctgtgccactatcgccatcgcctacatcatgaagaccatgggcatgtcctccgaagacgcctacaggtttgtgaaggaccagcgcccgtccatctcgcccaacttcaacttcctgggccagctgctggagtaccagagcagcccgaagctgctggccgccgtgcagggcgacgcgggcaccccctcaggaatgcaggagcctccccccagccctgcggccggggccccactgccatggctgccaccacctacctcagagaccgctgccaccaggagtgcggctgccagggagggcggcccgagcgcgggcaggaagcccccggcgccccccacggccaccagcacgctgcagcagggcctgcgcagcctgcgcctctcctcggaccacctgcaggacaccagccgcctcaagccctccttctctctggacatcaactggtcagacgagctggccccggattcgcacttcaagtgctgcagctgccagatggagttcgaggagggcatggtggaggggcgcgcgcgcagcgaggagctggccgccctgggcaagcaggggagcttctcgggcagcgtggaggtcatcgagatgtcctga

SEQ ID NO: 6775 - protein, 332 aa, Homo sapiens
MAIITGGFATFSSCFPDLCEGEPAALLPMSLSQSCLLVPSVGLTLILPHLYLGSQEDVLNKDLMTQNGISYVLYASNSCPKPDFIYQSHFLQVPINDNYCEKLLPWLDKSIEFIDKAKLSSCQVIVHHLAGISCCATIAIAYIMKTMGMSSEDAYRFVKDQRPSISPNFNFLGQLLEYQSSPKLLAAVQGDAGTPSGMQEPPPSPAAGAPLPWLPPPTSETAATRSAAAREGGPSAGRKPPAPPTATSTLQQGLRSLRLSSDHLQDTSRLKPSFSLDINWSDELAPDSHFKCCSCQMEFEEGMVEGRARSEELAALGKQGSFSGSVEVIEMS

SEQ ID NO: 6776 - DNA, 359 bp, Homo sapiens
caggaaggggaaacagttccaggaacgcctgcttcttgagatccccacatctgtggactggagagagaaaggctacgtgactcctgtgaaggatcagaaatttacaagctgatgctaaacacacatgtgataggatcagggctcaggctcaggtctgagcctcaatctgacactctctgtggagtgtcaggaaataacagataaataacatcgaatttgaaggtttgccgagaagtgagagaaaaaactccctttgcctgcctcctaggcttcaaagctgtctgggccaagacgtcaatttagctgcatcatgggtcaatgaggcctttgcgaattaggcaaataaatcaagttactag

SEQ ID NO: 6777 - protein, 30 aa, Homo sapiens
MLNTHVIGSGLRLRSEPQSDTLCGVSGNNR

SEQ ID NO: 6778 - DNA, 3518 bp, Homo sapiens
ctacaatgtcatttcccatccaagcttgacttctacctttactttcgctatactttctgataatcatgcttaagcaattgggcatctttattgaaataggactgtggtaagccactttatggctctcgattttgtatgagaaaatcatgtttagtgccttgttagtaaaagaaagaaaatctgaaagtccctgccatggaaggaagaaatagcggggagaaaagggagttggtaagtttcagcatttcagagcttggagggacaagttaggtttctattttatggagaaggaggtggaggcaggatgggtcctaaggtgtcattcaaaacacacagccataactctttattgagagtagagctagggccccagggattgctgtgatcaagttgcggacaaaaatgaccactcgttggaagacaggagaggagtgtttagttacaaaagcagtcaacaattcaggtgtatctatattcagacagcaaataaaagttgttcaacttggttgctaatgggacccactctactgaggctttatgtagaactcatagaggaagctggctttgaggaatgaactaccctgtgcttttcttaggactaaaatctcaggaagctggtgatgaatgaaaaccttagtcccattggcactgcacgaggggccaggagagcagcagcatcataagccacagggtggggcagccaaggcaggggcattctgagctgttggggaggggtggcaggcagggtggggcactgtgaggtgtcggggagggcattgtgaagtgtggggtggggcattgtgtgccacatgcctgggctcccacctggggccagtgggcttcagtctgtaggtgactacagaaggaggaggagctccatctgttctctcttcaggcagttgttgtgtctctcagcgcttgttgggttcacaacctattaaataagccggctggtcttcaccctcccagacaagtcaactcaggggaggcagcagggtgcgggccttggcccacagccctagccggggccggggccggggccggggccagggctggtgcccggggccgcactgtgaggtgggcaggcgaggagcgggaagaccatctctgcaagtgcagcatagcctcggcctaggacagcgggagtgcgtggccaaagctgtgagcagaggcacaggtggtggcaggcagtagaggcgccccatggggaacatactgacctgtcgtgtgcaccctagcgtcagcctcgagtttgacccagcagcaggggtcggtgtgtccctctgaatctgagatctatgaggcaggagctgaggacaggatggcaggagcgcccatggctgctgctgtacagcctgctgaggtgactgttgaagttggtgaggacctccacatgcaccaggttcgtgaccgggagatgcctgaagctttggagtttaacccttctgccaatccagaggcaagcacaatattccagaggaactctcaaacagatgttgtagaaataagaagaagcaactgtacaaaccgtgtatctactgagcgtttcagtcaacaatacagctcgtgttcgacaatattccttgatgacagcacagccatccagcattatcttacaatgacaataatatctgtgaccttggagatacctcatcatatcacacaaagagatgcagatagatctttgagcatacctgatgaacagttacactcatttgcggtttccaccgtgcacattatgaagaaaagaaatggaggtgggagtttaaataactattcctcctccattccaccgactcccagcaccagccaggaggaccctcagttcagtgttcctcccactgccaacacacccacccccatttgcaagcggtccatgcgctggtccaacctgtttacatctgagaaagggagtgacccagacaaagagaggaaagccccggagaatcatgctgacaccatcgggagcggcagagccatccccattaaacagggcatgctcttaaagcgaagtgggaaatggctgaagacatggaaaaagaaatacgtcaccctgtgttccaatggcgtgctcacctattattcaagcttaggtgattatatgaagaatattcataaaaaagagattgaccttcggacatctaccatcaaagtcccaggaaagtggccatccctagccacatcagcctgtgcacccatctccagctctaaaagcaatggcctatccaaggacatggacaccgggctgggtgactccatatgcttcagccccagtatctccagcaccaccagccccaagctcaacccacccccctctcctcatgccaataaaaagaaacacctaaagaagaaaagcaccaacaactttatgattgtgtctgccactggccaaacgtggcactttgaagccacgacgtatgaggagcgggatgcctgggtccaagccatccagagccagatcctggccagcctgcagtcatgcgagagcagtaaaagcaagtcccagctgaccagccagagtgaggccatggccctgcagtcgatccaaaacatgcgtgggaacgcccactgtgtggactgtgagacccagaatcctaagtgggccagtttgaacttgggagtcctcatgtgtattgaatgctcaggtatccaccgcagtcttggcacccgcctttcccgtgtgcgatctctggagctggatgactggccagttgagctcaggaaggttatgtcatctattggcaatgagctagccaacagcatctgggaagggagcagccaggggcagacaaaaccctcaataaagtccacgagggaagagaaggaacgctggatccattccaaatatgaggagaagctctttctggccccactaccctgcactgagctgtctctgggccagcagctgctgcgggccaccgctgatgaggacctgcagacagccatcctgctgctggcacatggctcccgtgaggaggtgaacgagacctgtggggagggagacggctgcacggcactccatctggcctgccgcaaggggaatgtggtcctggagcagctcctgatctggtacggggtggacgtcatggcccgagatgcccacgggaacacagcgctgacctacgcccggcaggcctccagccaggagtgcatcaacgtgcttctgcagtacggctgccccgacgagtgcgtgtagtatctgttttatttgactgcagtctccttggtgcaaaaacaaaatgggaaaaataaggataactcagaatttcaaaaggaaatcacaaattcagctagtaatagcattttcagtacttttcgtaaactaagtaaatacacaaaatgttgatttttctgaccataagacatattttatgtccttttgccaaggtggatgtgttagtctcaggccctcctggccacattgcccaagtcacacaggcttctgtattatgtatttagataaaatgtgtgaaaatatatttgaaaaaaaatttcataaatgtgcattgatttttgta

SEQ ID NO: 6779 - protein, 624 aa, Homo sapiens
MAGAPMAAAVQPAEVTVEVGEDLHMHQVRDREMPEALEFNPSANPEASTIFQRNSQTDVVEIRRSNCTNRVSTERFSQQYSSCSTIFLDDSTAIQHYLTMTIISVTLEIPHHITQRDADRSLSIPDEQLHSFAVSTVHIMKKRNGGGSLNNYSSSIPPTPSTSQEDPQFSVPPTANTPTPICKRSMRWSNLFTSEKGSDPDKERKAPENHADTIGSGRAIPIKQGMLLKRSGKWLKTWKKKYVTLCSNGVLTYYSSLGDYMKNIHKKEIDLRTSTIKVPGKWPSLATSACAPISSSKSNGLSKDMDTGLGDSICFSPSISSTTSPKLNPPPSPHANKKKHLKKKSTNNFMIVSATGQTWHFEATTYEERDAWVQAIQSQILASLQSCESSKSKSQLTSQSEAMALQSIQNMRGNAHCVDCETQNPKWASLNLGVLMCIECSGIHRSLGTRLSRVRSLELDDWPVELRKVMSSIGNELANSIWEGSSQGQTKPSIKSTREEKERWIHSKYEEKLFLAPLPCTELSLGQQLLRATADEDLQTAILLLAHGSREEVNETCGEGDGCTALHLACRKGNVVLEQLLIWYGVDVMARDAHGNTALTYARQASSQECINVLLQYGCPDECV

SEQ ID NO: 6780 - DNA, 3587 bp, Homo sapiens
ctacaatgtcatttcccatccaagcttgacttctacctttactttcgctatactttctgataatcatgcttaagcaattgggcatctttattgaaataggactgtggtaagccactttatggctctcgattttgtatgagaaaatcatgtttagtgccttgttagtaaaagaaagaaaatctgaaagtccctgccatggaaggaagaaatagcggggagaaaagggagttggtaagtttcagcatttcagagcttggagggacaagttaggtttctattttatggagaaggaggtggaggcaggatgggtcctaaggtgtcattcaaaacacacagccataactctttattgagagtagagctagggccccagggattgctgtgatcaagttgcggacaaaaatgaccactcgttggaagacaggagaggagtgtttagttacaaaagcagtcaacaattcaggtgtatctatattcagacagcaaataaaagttgttcaacttggttgctaatgggacccactctactgaggctttatgtagaactcatagaggaagctggctttgaggaatgaactaccctgtgcttttcttaggactaaaatctcaggaagctggtgatgaatgaaaaccttagtcccattggcactgcacgaggggccaggagagcagcagcatcataagccacagggtggggcagccaaggcaggggcattctgagctgttggggaggggtggcaggcagggtggggcactgtgaggtgtcggggagggcattgtgaagtgtggggtggggcattgtgtgccacatgcctgggctcccacctggggccagtgggcttcagtctgtaggtgactacagaaggaggaggagctccatctgttctctcttcaggcagttgttgtgtctctcagcgcttgttgggttcacaacctattaaataagccggctggtcttcaccctcccagacaagtcaactcaggggaggcagcagggtgcgggccttggcccacagccctagccggggccggggccggggccggggccagggctggtgcccggggccgcactgtgaggtgggcaggcgaggagcgggaagaccatctctgcaagtgcagcatagcctcggcctaggacagcgggagtgcgtggccaaagctgtgagcagaggcacaggtggtggcaggcagtagaggcgccccatggggaacatactgacctgtcgtgtgcaccctagcgtcagcctcgagtttgacccagcagcaggggtcggtgtgtccctctgaatctgagatctatgaggcaggagctgaggacaggatggcaggagcgcccatggctgctgctgtacagcctgctgaggtgactgttgaagttggtgaggacctccacatgcaccaggttcgtgaccgggagatgcctgaagctttggagtttaacctttctgccaatccagaggcaagcacaatattccagaggaactctcaaacagatgctttggagtttaacccttctgccaatccagaggcaagcacaatattccagaggaactctcaaacagatgttgtagaaataagaagaagcaactgtacaaaccgtgtatctactgagcgtttcagtcaacaatacagctcgtgttcgacaatattccttgatgacagcacagccatccagcattatcttacaatgacaataatatctgtgaccttggagatacctcatcatatcacacaaagagatgcagatagatctttgagcatacctgatgaacagttacactcatttgcggtttccaccgtgcacattatgaagaaaagaaatggaggtgggagtttaaataactattcctcctccattccaccgactcccagcaccagccaggaggaccctcagttcagtgttcctcccactgccaacacacccacccccatttgcaagcggtccatgcgctggtccaacctgtttacatctgagaaagggagtgacccagacaaagagaggaaagccccggagaatcatgctgacaccatcgggagcggcagagccatccccattaaacagggcatgctcttaaagcgaagtgggaaatggctgaagacatggaaaaagaaatacgtcaccctgtgttccaatggcgtgctcacctattattcaagcttaggtgattatatgaagaatattcataaaaaagagattgaccttcggacatctaccatcaaagtcccaggaaagtggccatccctagccacatcagcctgtgcacccatctccagctctaaaagcaatggcctatccaaggacatggacaccgggctgggtgactccatatgcttcagccccagtatctccagcaccaccagccccaagctcaacccacccccctctcctcatgccaataaaaagaaacacctaaagaagaaaagcaccaacaactttatgattgtgtctgccactggccaaacgtggcactttgaagccacgacgtatgaggagcgggatgcctgggtccaagccatccagagccagatcctggccagcctgcagtcatgcgagagcagtaaaagcaagtcccagctgaccagccagagtgaggccatggccctgcagtcgatccaaaacatgcgtgggaacgcccactgtgtggactgtgagacccagaatcctaagtgggccagtttgaacttgggagtcctcatgtgtattgaatgctcaggtatccaccgcagtcttggcacccgcctttcccgtgtgcgatctctggagctggatgactggccagttgagctcaggaaggttatgtcatctattggcaatgagctagccaacagcatctgggaagggagcagccaggggcagacaaaaccctcaataaagtccacgagggaagagaaggaacgctggatccattccaaatatgaggagaagctctttctggccccactaccctgcactgagctgtctctgggccagcagctgctgcgggccaccgctgatgaggacctgcagacagccatcctgctgctggcacatggctcccgtgaggaggtgaacgagacctgtggggagggagacggctgcacggcactccatctggcctgccgcaaggggaatgtggtcctggagcagctcctgatctggtacggggtggacgtcatggcccgagatgcccacgggaacacagcgctgacctacgcccggcaggcctccagccaggagtgcatcaacgtgcttctgcagtacggctgccccgacgagtgcgtgtagtatctgttttatttgactgcagtctccttggtgcaaaaacaaaatgggaaaaataaggataactcagaatttcaaaaggaaatcacaaattcagctagtaatagcattttcagtacttttcgtaaactaagtaaatacacaaaatgttgatttttctgaccataagacatattttatgtccttttgccaaggtggatgtgttagtctcaggccctcctggccacattgcccaagtcacacaggcttctgtattatgtatttagataaaatgtgtgaaaatatatttgaaaaaaaatttcataaatgtgcattgatttttgta

SEQ ID NO: 6781 - protein, 647 aa, Homo sapiens
MAGAPMAAAVQPAEVTVEVGEDLHMHQVRDREMPEALEFNLSANPEASTIFQRNSQTDALEFNPSANPEASTIFQRNSQTDVVEIRRSNCTNRVSTERFSQQYSSCSTIFLDDSTAIQHYLTMTIISVTLEIPHHITQRDADRSLSIPDEQLHSFAVSTVHIMKKRNGGGSLNNYSSSIPPTPSTSQEDPQFSVPPTANTPTPICKRSMRWSNLFTSEKGSDPDKERKAPENHADTIGSGRAIPIKQGMLLKRSGKWLKTWKKKYVTLCSNGVLTYYSSLGDYMKNIHKKEIDLRTSTIKVPGKWPSLATSACAPISSSKSNGLSKDMDTGLGDSICFSPSISSTTSPKLNPPPSPHANKKKHLKKKSTNNFMIVSATGQTWHFEATTYEERDAWVQAIQSQILASLQSCESSKSKSQLTSQSEAMALQSIQNMRGNAHCVDCETQNPKWASLNLGVLMCIECSGIHRSLGTRLSRVRSLELDDWPVELRKVMSSIGNELANSIWEGSSQGQTKPSIKSTREEKERWIHSKYEEKLFLAPLPCTELSLGQQLLRATADEDLQTAILLLAHGSREEVNETCGEGDGCTALHLACRKGNVVLEQLLIWYGVDVMARDAHGNTALTYARQASSQECINVLLQYGCPDECV

SEQ ID NO: 6782 - DNA, 4421 bp, Homo sapiens
ataataataataataataataataatctacaatgtcatttcccatccaagcttgacttctacctttactttctgatatggttttgccatgtccccacccaaatatcatcatgaattataatccccataatcccgatgtgtcgagggaggggcctagggggaggtgattggatcacaggggcagttatcctcatgctgttcttgtgatattcagtaagtcctcatgagatcttatagggttttgttttgttttgtttcctgggatggaggcttgctctgttgtccaggcaagagtgccatggcacgatcttggctcactgcagtctctgcctcttgagttccagtgattctcctgcctcagcctcctgagtagctgggattacaggcatgcaccaccacacccagctaatttttgtatttttagtagagacaggatttcactacattagctaggctggtctcaaactcctgacctcagttgatccacctgccttggcctcccaaagtactagggttacaagtgtgagccaccgtgcccagctgagatctgatggttttatacatgtttgacagttgctccttcacatgttcccactctctgtgcggccaccatgtaagtcggacctgcccttctgccatgattgtaagtttcctgaaggacttccccctctgccatgattgtaagtttcctgaggcctccccagccatgtgaaactgagtcaattaagcctctttcctttaaaaattacccaacctcaggtgtttctttatatcagtgtgaaaacagactgctatactttctgataatcatgcttaagcaattggggaattcagactacctgggatcaaactatggccccacccttagcagtcatgtgaccttgggggggtttacttaccttctctgtcccaacaacttctgtaaaatctgtaacatgagattgtttctgagggttaaatgagcatagcacagtggggacactgtcaggcacacactacttgccagatgtcgagtattcatctttattgaaataggactgtggtaagccactttatggctctcgattttgtatgagaaaatcatgtttagtgccttgttagtaaaagaaagaaaatctgaaagtccctgccatggaaggaagaaatagcggggagaaaagggagttggtaagtttcagcatttcagagcttggagggacaagttaggtttctattttatggagaaggaggtggaggcaggatgggtcctaaggtgtcattcaaaacacacagccataactctttattgagagtagagctagggccccagggattgctgtgatcaagttgcggacaaaaatgaccactcgttggaagacaggagaggagtgtttagttacaaaagcagtcaacaattcaggtgtatctatattcagacagcaaataaaagttgttcaacttggttgctaatgggacccactctactgaggctttatgtagaactcatagaggaagctggctttgaggaatgaactaccctgtgcttttcttaggactaaaatctcaggaagctggtgatgaatgaaaaccttagtcccattggcactgcacgaggggccaggagagcagcagcatcataagccacagggtggggcagccaaggcaggggcattctgagctgttggggaggggtggcaggcagggtggggcactgtgaggtgtcggggagggcattgtgaagtgtggggtggggcattgtgtgccacatgcctgggctcccacctggggccagtgggcttcagtctgtaggtgactacagaaggaggaggagctccatctgttctctcttcaggcagttgttgtgtctctcagcgcttgttgggttcacaacctattaaataagccggctggtcttcaccctcccagacaagtcaactcaggggaggcagcagggtgcgggccttggcccacagccctagccggggccggggccggggccggggccagggctggtgcccggggccgcactgtgaggtgggcaggcgaggagcgggaagaccatctctgcaagtgcagcatagcctcggcctaggacagcgggagtgcgtggccaaagctgtgagcagaggcacaggtggtggcaggcagtagaggcgccccatggggaacatactgacctgtcgtgtgcaccctagcgtcagcctcgagtttgacccagcagcaggggtcggtgtgtccctctgaatctgagatctatgaggcaggagctgaggacaggatggcaggagcgcccatggctgctgctgtacagcctgctgaggtgactgttgaagttggtgaggacctccacatgcaccaggttcgtgaccgggagatgcctgaagctttggagtttaacctttctgccaatccagaggcaagcacaatattccagaggaactctcaaacagatgctttggagtttaacccttctgccaatccagaggcaagcacaatattccagaggaactctcaaacagatgttgtagaaataagaagaagcaactgtacaaaccgttgtgaccttggagatacctcatcatatcacacaaagagatgcagatagatctttgagcatacctgatgaacagttacactcatttgcggtttccaccgtgcacattatgaagaaaagaaatggaggtgggagtttaaataactattcctcctccattccaccgactcccagcaccagccaggaggaccctcagttcagtgttcctcccactgccaacacacccacccccatttgcaagcggtccatgcgctggtccaacctgtttacatctgagaaagggagtgacccagacaaagagaggaaagccccggagaatcatgctgacaccatcgggagcggcagagccatccccattaaacagggcatgctcttaaagcgaagtgggaaatggctgaagacatggaaaaagaaatacgtcaccctgtgttccaatggcgtgctcacctattattcaagcttaggtgattatatgaagaatattcataaaaaagagattgaccttcggacatctaccatcaaagtcccaggaaagtggccatccctagccacatcagcctgtgcacccatctccagctctaaaagcaatggcctatccaaggacatggacaccgggctgggtgactccatatgcttcagccccagtatctccagcaccaccagccccaagctcaacccacccccctctcctcatgccaataaaaagaaacacctaaagaagaaaagcaccaacaactttatgattgtgtctgccactggccaaacgtggcactttgaagccacgacgtatgaggagcgggatgcctgggtccaagccatccagagccagatcctggccagcctgcagtcatgcgagagcagtaaaagcaagtcccagctgaccagccagagtgaggccatggccctgcagtcgatccaaaacatgcgtgggaacgcccactgtgtggactgtgagacccagaatcctaagtgggccagtttgaacttgggagtcctcatgtgtattgaatgctcaggtatccaccgcagtcttggcacccgcctttcccgtgtgcgatctctggagctggatgactggccagttgagctcaggaaggttatgtcatctattggcaatgagctagccaacagcatctgggaagggagcagccaggggcagacaaaaccctcaataaagtccacgagggaagagaaggaacgctggatccattccaaatatgaggagaagctctttctggccccactaccctgcactgagctgtctctgggccagcagctgctgcgggccaccgctgatgaggacctgcagacagccatcctgctgctggcacatggctcccgtgaggaggtgaacgagacctgtggggagggagacggctgcacggcactccatctggcctgccgcaaggggaatgtggtcctggagcagctcctgatctggtacggggtggacgtcatggcccgagatgcccacgggaacacagcgctgacctacgcccggcaggcctccagccaggagtgcatcaacgtgcttctgcagtacggctgccccgacgagtgcgtgtagtatctgttttatttgactgcagtctccttggtgcaaaaacaaaatgggaaaaataaggataactcagaatttcaaaaggaaatcacaaattcagctagtaatagcattttcagtacttttcgtaaactaagtaaatacacaaaatgttgatttttctgaccataagacatattttatgtccttttgccaaggtggatgtgttagtctcaggccctcctggccacattgcccaagtcacacaggcttctgtattatgtatttagataaaatgtgtgaaaatatatttgaaaaaaaatttcataaatgtgcattgatttttgta

SEQ ID NO: 6783 - protein, 108 aa, Homo sapiens
MAGAPMAAAVQPAEVTVEVGEDLHMHQVRDREMPEALEFNLSANPEASTIFQRNSQTDALEFNPSANPEASTIFQRNSQTDVVEIRRSNCTNRCDLGDTSSYHTKRCR

SEQ ID NO: 6784 - DNA, 3285 bp, Homo sapiens
gacgagatttcactatgtaggcgaagctggtctcgaactcctgacctcagatgatccacccgcctcagcctcccaaagtgctgggattacaggcgtgagccactgcgcctggcctgtttattctcttaagagagaaaatgaggggattaatggactgtagttctggacaaggtggaaaactcttaaagtggaagtactggggcaagtgctctgacagggtaggatggtgcagtcagtcccttcacccagaaatcagtagaatgttagcagttcagactcaaaccttgtgaaaaacaggtggtggaaaggaaatccctcacagcaactggcaccataatcaagacaatgtttacagaataaatggagttacctgctttcagccccaggtcgtagctattgtctgccctgctgatatgtgataataatttgtgatcctgttgtcttaaaatggggtcactcatctccagtagaattaagtccacagtgaagttgtccccccatccccaaagagataaacatatatgaatgaactcacgtgataacaactactgctgcctgggatcatgagagacctgaactgaactgataggatgtgaaaggtggctgagataatgagaatagacccatctgcagaggatcataaaaccagcaaagacaagatcttgtctaagatgccttcacaagctttgtccatgagaactcttaaggatttcaccagacctgttggctgctgctgtgatctctgcccaagaggagcctctgaccaacatccaaagggcttctggacccactggactcctctggagttgctccttcacatgttcccactctctgtgcggccaccatgtaagtcggacctgcccttctgccatgattgactaaaatctcaggaagctggtgatgaatgaaaaccttagtcccattggcactgcacgaggggccaggagagcagcagcatcataagccacaggcgtcagcctcgagtttgacccagcagcaggggtcggtgtgtccctctgaatctgagatctatgaggcaggagctgaggacaggatggcaggagcgcccatggctgctgctgtacagcctgctgaggtgactgttgaagttggtgaggacctccacatgcaccaggttcgtgaccgggagatgcctgaagctttggagtttaacctttctgccaatccagaggcaagcacaatattccagaggaactctcaaacagatgctttggagtttaacccttctgccaatccagaggcaagcacaatattccagaggaactctcaaacagatggtatctactgagcgtttcagtcaacaatacagctcgtgttcgacaatattccttgatgacagcacagccatccagcattatcttacaatgacaataatatctgtgaccttggagatacctcatcatatcacacaaagagatgcagatagatctttgagcatacctgatgaacagttacactcatttgcggtttccaccgtgcacattatgaagaaaagaaatggaggtgggagtttaaataactattcctcctccattccaccgactcccagcaccagccaggaggaccctcagttcagtgttcctcccactgccaacacacccacccccatttgcaagcggtccatgcgctggtccaacctgtttacatctgagaaagggagtgacccagacaaagagaggaaagccccggagaatcatgctgacaccatcgggagcggcagagccatccccattaaacagggcatgctcttaaagcgaagtgggaaatggctgaagacatggaaaaagaaatacgtcaccctgtgttccaatggcgtgctcacctattattcaagcttaggtgattatatgaagaatattcataaaaaagagattgaccttcggacatctaccatcaaagtcccaggaaagtggccatccctagccacatcagcctgtgcacccatctccagctctaaaagcaatggcctatccaaggacatggacaccgggctgggtgactccatatgcttcagccccagtatctccagcaccaccagccccaagctcaacccacccccctctcctcatgccaataaaaagaaacacctaaagaagaaaagcaccaacaactttatgattgtgtctgccactggccaaacgtggcactttgaagccacgacgtatgaggagcgggatgcctgggtccaagccatccagagccagatcctggccagcctgcagtcatgcgagagcagtaaaagcaagtcccagctgaccagccagagtgaggccatggccctgcagtcgatccaaaacatgcgtgggaacgcccactgtgtggactgtgagacccagaatcctaagtgggccagtttgaacttgggagtcctcatgtgtattgaatgctcaggtatccaccgcagtcttggcacccgcctttcccgtgtgcgatctctggagctggatgactggccagttgagctcaggaaggttatgtcatctattggcaatgagctagccaacagcatctgggaagggagcagccaggggcagacaaaaccctcaataaagtccacgagggaagagaaggaacgctggatccattccaaatatgaggagaagctctttctggccccactaccctgcactgagctgtctctgggccagcagctgctgcgggccaccgctgatgaggacctgcagacagccatcctgctgctggcacatggctcccgtgaggaggtgaacgagacctgtggggagggagacggctgcacggcactccatctggcctgccgcaaggggaatgtggtcctggagcagctcctgatctggtacggggtggacgtcatggcccgagatgcccacgggaacacagcgctgacctacgcccggcaggcctccagccaggagtgcatcaacgtgcttctgcagtacggctgccccgacgagtgcgtgtagtatctgttttatttgactgcagtctccttggtgcaaaaacaaaatgggaaaaataaggataactcagaatttcaaaaggaaatcacaaattcagctagtaatagcattttcagtacttttcgtaaactaagtaaatacacaaaatgttgatttttctgaccataagacatattttatgtccttttgccaaggtggatgtgttagtctcaggccctcctggccacattgcccaagtcacacaggcttctgtattatgtatttagataaaatgtgtgaaaatatatttgaaaaaaaatttcataaatgtgcattgatttttgta

SEQ ID NO: 6785 - protein, 578 aa, Homo sapiens
MLWSLTLLPIQRQAQYSRGTLKQMVSTERFSQQYSSCSTIFLDDSTAIQHYLTMTIISVTLEIPHHITQRDADRSLSIPDEQLHSFAVSTVHIMKKRNGGGSLNNYSSSIPPTPSTSQEDPQFSVPPTANTPTPICKRSMRWSNLFTSEKGSDPDKERKAPENHADTIGSGRAIPIKQGMLLKRSGKWLKTWKKKYVTLCSNGVLTYYSSLGDYMKNIHKKEIDLRTSTIKVPGKWPSLATSACAPISSSKSNGLSKDMDTGLGDSICFSPSISSTTSPKLNPPPSPHANKKKHLKKKSTNNFMIVSATGQTWHFEATTYEERDAWVQAIQSQILASLQSCESSKSKSQLTSQSEAMALQSIQNMRGNAHCVDCETQNPKWASLNLGVLMCIECSGIHRSLGTRLSRVRSLELDDWPVELRKVMSSIGNELANSIWEGSSQGQTKPSIKSTREEKERWIHSKYEEKLFLAPLPCTELSLGQQLLRATADEDLQTAILLLAHGSREEVNETCGEGDGCTALHLACRKGNVVLEQLLIWYGVDVMARDAHGNTALTYARQASSQECINVLLQYGCPDECV

SEQ ID NO: 6786 - DNA, 4711 bp, Homo sapiens
cccacatggctttctagctcacagcagatctagccttctctgagcagtgaagatgggatgttttatggtcattttccctggtgtggagagcccaagtggagttcttcagcacatcctacaccatcccctcactaacacccccacctgtccagtcttacctgccttcatatcaaaagcactcagttaacccagagggcttcagccctgccctgcctgactttctaggaaacccctctctccacccaccctaatcagacactgtctgaaggttccccctcatcattttaaaaggaagagaaatttttctgacacagaggttctggtgaagtggctagctcccacatcacagggtgatggtggtttggactggaccaggatcagacagtgctgtcctggggctggccatctgataaggggctccagaaagggcagtgatggacccctgggaggctttctgctctcctgatcacaggtttttggtgagaggacctattggccactagggtgtctgcgggtgtgtgtgtgtgtgtgtgtgtgtgtgtgtgtgtgtgtgtgtgtgatgtgtgtttacttggaatgacttctttcagcatgaagcccactgttttgctgaacgtatctcactgtttcctgaaactcagtacattcagctggcttaagggtcctggggcctcgctgtgtcatatttgcacaagcctagtgtctgtgcagactgtacactggagttcagttgtaagacccttttgatcccttattctgttcctgtaatagaaaagccatttcactcaatggaatagaaacccagatctaatggagagatgttctaatctgccatacactggggcagtggccagtgatttggactttgtggcacagatggaaatttccaggttctctaggtggtaggcagaggcctcactttttaagaaactcccccactccacccctgccaatgaggacattgcttagaggtatttctatcagtgttgagtagaagagatcatttcttggtgttgaatttcaggtaaggatgccagcttctgcatatcagggtggtgatgtttgggctgcgacaggtctagacagcagtctgaaagggggctcaaggaagtagctgtgaaaggcccctgggatgttttctgctcccctttctgcaaatcccctggagggagatcctgttagtcactacgggatgtgtgtgtgtgtgtgtgtgtgtgtgtgtgtgtgtgtgtgtgttcatcacttgttgcttggggtgggaagagacaacaactgttggcagattcagattggtgccccaggcatctgtgctgtaactgcagtttcagcgggctcaggaccaggctaaagggcctccaagcttcctccagtttcctggtgcatgcatgtgcaatatgctcccctggcctgggtctttcctgccgcttcttgccagttgggtcagaactagcttattaaccagtttttcttctgagctttaatcgaactggctccaaccagttggaggcttgaaaagggctacgtgatagttatagagagaagatccttttaaaaatacatctaaatcttttatctcagatttgccttgtggcaaaaggtggggtactttttctgacatgatgaggcagagaaagatgaggtgggtgcatcctgtgcatatgattttctcactaaaattgcttaggtagaaggagacagattggatttttgtgtgtttggtatttgggataagagggatgtgggtgtgtacttgagatgtgttgtttattttctctctctgtttattctcttatcccttcacccagaaatcagtagaatgttagcagttcagactcaaaccttgtgaaaaacaggtggtggaaaggaaatccctcacagcaactggcaccataatcaagacaatgtttacagaataaatggagttacctgctttcagccccaggtcgtagctattgtctgccctgctgatatgtgataataatttgtgatcctgttgtcttaaaatggggtcactcatctccagtagaattaagtccacagtgaagttgtccccccatccccaaagagataaacatatatgaatgaactcacgtgataacaactactgctgcctgggatcatgagagacctgaactgaactgataggatgtgaaaggtggctgagataatgagaatagacccatctgcagaggatcataaaaccagcaaagacaagatcttgtctaagatgccttcacaagctttgtccatgagaactcttaaggatttcaccagacctgttggctgctgctgtgatctctgcccaagaggagcctctgaccaacatccaaagggcttctggacccactggactcctctggagcgtcagcctcgagtttgacccagcagcaggggtcggtgtgtccctctgaatctgagatctatgaggcaggagctgaggacaggatggcaggagcgcccatggctgctgctgtacagcctgctgaggtgactgttgaagttggtgaggacctccacatgcaccaggttcgtgaccgggagatgcctgaagctttggagtttaacctttctgccaatccagaggcaagcacaatattccagaggaactctcaaacagatgctttggagtttaacccttctgccaatccagaggcaagcacaatattccagaggaactctcaaacagatgttgtagaaataagaagaagcaactgtacaaaccgtgtatctactgagcgtttcagtcaacaatacagctcgtgttcgacaatattccttgatgacagcacagccatccagcattatcttacaatgacaataatatctgtgaccttggagatacctcatcatatcacacaaagagatgcagatagatctttgagcatacctgatgaacagttacactcatttgcggtttccaccgtgcacattatgaagaaaagaaatggaggtgggagtttaaataactattcctcctccattccaccgactcccagcaccagccaggaggaccctcagttcagtgttcctcccactgccaacacacccacccccatttgcaagcggtccatgcgctggtccaacctgtttacatctgagaaagggagtgacccagacaaagagaggaaagccccggagaatcatgctgacaccatcgggagcggcagagccatccccattaaacagggcatgctcttaaagcgaagtgggaaatggctgaagacatggaaaaagaaatacgtcaccctgtgttccaatggcgtgctcacctattattcaagcttaggtgattatatgaagaatattcataaaaaagagattgaccttcggacatctaccatcaaagtcccaggaaagtggccatccctagccacatcagcctgtgcacccatctccagctctaaaagcaatggcctatccaaggacatggacaccgggctgggtgactccatatgcttcagccccagtatctccagcaccaccagccccaagctcaacccacccccctctcctcatgccaataaaaagaaacacctaaagaagaaaagcaccaacaactttatgattgtgtctgccactggccaaacgtggcactttgaagccacgacgtatgaggagcgggatgcctgggtccaagccatccagagccagatcctggccagcctgcagtcatgcgagagcagtaaaagcaagtcccagctgaccagccagagtgaggccatggccctgcagtcgatccaaaacatgcgtgggaacgcccactgtgtggactgtgagacccagaatcctaagtgggccagtttgaacttgggagtcctcatgtgtattgaatgctcaggtatccaccgcagtcttggcacccgcctttcccgtgtgcgatctctggagctggatgactggccagttgagctcaggaaggttatgtcatctattggcaatgagctagccaacagcatctgggaagggagcagccaggggcagacaaaaccctcaataaagtccacgagggaagagaaggaacgctggatccattccaaatatgaggagaagctctttctggccccactaccctgcactgagctgtctctgggccagcagctgctgcgggccaccgctgatgaggacctgcagacagccatcctgctgctggcacatggctcccgtgaggaggtgaacgagacctgtggggagggagacggctgcacggcactccatctggcctgccgcaaggggaatgtggtcctggagcagctcctgatctggtacggggtggacgtcatggcccgagatgcccacgggaacacagcgctgacctacgcccggcaggcctccagccaggagtgcatcaacgtgcttctgcagtacggctgccccgacgagtgcgtgtagtatctgttttatttgactgcagtctccttggtgcaaaaacaaaatgggaaaaataaggataactcagaatttcaaaaggaaatcacaaattcagctagtaatagcattttcagtacttttcgtaaactaagtaaatacacaaaatgttgatttttctgaccataagacatattttatgtccttttgccaaggtggatgtgttagtctcaggccctcctggccacattgcccaagtcacacaggcttctgtattatgtatttagataaaatgtgtgaaaatatatttgaaaaaaaatttcataaatgtgcattgatttttgta

SEQ ID NO: 6787 - protein, 647 aa, Homo sapiens; identical to SEQ ID NO: 6781

SEQ ID NO: 6788 - DNA, 1901 bp, Homo sapiens
tggcccagaaaatgtatctttttaaaaggtaattgtgagctgtctataggatcctgcaagccactacccaatttttgaagccattcctcctcctgttccacacaggtttccaccgtgcacattatgaagaaaagaaatggaggtgggagtttaaataactattcctcctccattccaccgactcccagcaccagccaggaggaccctcagttcagtgttcctcccactgccaacacacccacccccatttgcaagcggtccatgcgctggtccaacctgtttacatctgagaaagggagtgacccagacaaagagaggaaagccccggagaatcatgctgacaccatcgggagcggcagagccatccccattaaacagggcatgctcttaaagcgaagtgggaaatggctgaagacatggaaaaagaaatacgtcaccctgtgttccaatggcgtgctcacctattattcaagcttaggtgattatatgaagaatattcataaaaaagagattgaccttcggacatctaccatcaaagtcccaggaaagtggccatccctagccacatcagcctgtgcacccatctccagctctaaaagcaatggcctatccaaggacatggacaccgggctgggtgactccatatgcttcagccccagtatctccagcaccaccagccccaagctcaacccacccccctctcctcatgccaataaaaagaaacacctaaagaagaaaagcaccaacaactttatgattgtgtctgccactggccaaacgtggcactttgaagccacgacgtatgaggagcgggatgcctgggtccaagccatccagagccagatcctggccagcctgcagtcatgcgagagcagtaaaagcaagtcccagctgaccagccagagtgaggccatggccctgcagtcgatccaaaacatgcgtgggaacgcccactgtgtggactgtgagacccagaatcctaagtgggccagtttgaacttgggagtcctcatgtgtattgaatgctcaggtatccaccgcagtcttggcacccgcctttcccgtgtgcgatctctggagctggatgactggccagttgagctcaggaaggttatgtcatctattggcaatgagctagccaacagcatctgggaagggagcagccaggggcagacaaaaccctcaataaagtccacgagggaagagaaggaacgctggatccattccaaatatgaggagaagctctttctggccccactaccctgcactgagctgtctctgggccagcagctgctgcgggccaccgctgatgaggacctgcagacagccatcctgctgctggcacatggctcccgtgaggaggtgaacgagacctgtggggagggagacggctgcacggcactccatctggcctgccgcaaggggaatgtggtcctggagcagctcctgatctggtacggggtggacgtcatggcccgagatgcccacgggaacacagcgctgacctacgcccggcaggcctccagccaggagtgcatcaacgtgcttctgcagtacggctgccccgacgagtgcgtgtagtatctgttttatttgactgcagtctccttggtgcaaaaacaaaatgggaaaaataaggataactcagaatttcaaaaggaaatcacaaattcagctagtaatagcattttcagtacttttcgtaaactaagtaaatacacaaaatgttgatttttctgaccataagacatattttatgtccttttgccaaggtggatgtgttagtctcaggccctcctggccacattgcccaagtcacacaggcttctgtattatgtatttagataaaatgtgtgaaaatatatttgaaaaaaaatttcataaatgtgcattgatttttg

SEQ ID NO: 6789 - protein, 485 aa, Homo sapiens
MKKRNGGGSLNNYSSSIPPTPSTSQEDPQFSVPPTANTPTPICKRSMRWSNLFTSEKGSDPDKERKAPENHADTIGSGRAIPIKQGMLLKRSGKWLKTWKKKYVTLCSNGVLTYYSSLGDYMKNIHKKEIDLRTSTIKVPGKWPSLATSACAPISSSKSNGLSKDMDTGLGDSICFSPSISSTTSPKLNPPPSPHANKKKHLKKKSTNNFMIVSATGQTWHFEATTYEERDAWVQAIQSQILASLQSCESSKSKSQLTSQSEAMALQSIQNMRGNAHCVDCETQNPKWASLNLGVLMCIECSGIHRSLGTRLSRVRSLELDDWPVELRKVMSSIGNELANSIWEGSSQGQTKPSIKSTREEKERWIHSKYEEKLFLAPLPCTELSLGQQLLRATADEDLQTAILLLAHGSREEVNETCGEGDGCTALHLACRKGNVVLEQLLIWYGVDVMARDAHGNTALTYARQASSQECINVLLQYGCPDECV

SEQ ID NO: 6790 - DNA, 3147 bp, Homo sapiens
ctacaatgtcatttcccatccaagcttgacttctacctttactttcgctatactttctgataatcatgcttaagcaattgggcatctttattgaaataggactgtggtaagccactttatggctctcgattttgtatgagaaaatcatgtttagtgccttgttagtaaaagaaagaaaatctgaaagtccctgccatggaaggaagaaatagcggggagaaaagggagttggtaagtttcagcatttcagagcttggagggacaagttaggtttctattttatggagaaggaggtggaggcaggatgggtcctaaggtgtcattcaaaacacacagccataactctttattgagagtagagctagggccccagggattgctgtgatcaagttgcggacaaaaatgaccactcgttggaagacaggagaggagtgtttagttacaaaagcagtcaacaattcaggtgtatctatattcagacagcaaataaaagttgttcaacttggttgctaatgggacccactctactgaggctttatgtagaactcatagaggaagctggctttgaggaatgaactaccctgtgcttttcttaggactaaaatctcaggaagctggtgatgaatgaaaaccttagtcccattggcactgcacgaggggccaggagagcagcagcatcataagccacagggtggggcagccaaggcaggggcattctgagctgttggggaggggtggcaggcagggtggggcactgtgaggtgtcggggagggcattgtgaagtgtggggtggggcattgtgtgccacatgcctgggctcccacctggggccagtgggcttcagtctgtaggtgactacagaaggaggaggagctccatctgttctctcttcaggcagttgttgtgtctctcagcgcttgttgggttcacaacctattaaataagccggctggtcttcaccctcccagacaagtcaactcaggggaggcagcagggtgcgggccttggcccacagccctagccggggccggggccggggccggggccagggctggtgcccggggccgcactgtgaggtgggcaggcgaggagcgggaagaccatctctgcaagtgcagcatagcctcggcctaggacagcgggagtgcgtggccaaagctgtgagcagaggcacaggtggtggcaggcagtagaggcgccccatggggaacatactgacctgtcgtgtgcaccctagcgtcagcctcgagtttgacccagcagcaggggtcggtgtgtccctctgaatctgagatctatgaggcaggagctgaggacaggatggcaggagcgcccatggctgctgctgtacagcctgctgaggtgactgttgaagttggtgaggacctccacatgcaccaggttcgtgaccgggagatgcctgaagctttggagtttaacctttctgccaatccagaggcaagcacaatattccagaggaactctcaaacagatgctttggagtttaacccttctgccaatccagaggcaagcacaatattccagaggaactctcaaacagatgttgtagaaataagaagaagcaactgtacaaaccgtgtatctactgagcgtttcagtcaacaatacagctcgtgttcgacaatattccttgatgacagcacagccatccagcattatcttacaatgacaataatatctgtgaccttggagatacctcatcatatcacacaaagagatgcagatagatctttgagcatacctgatgaacagttacactcatttgcgcagaaaatgtatctttttaaaaggtaattgtgagctgtctataggatcctgcaagccactacccaatttttgaagccattcctcctcctgttccacacaggtttccaccgtgcacattatgaagaaaagaaatggaggtgggagtttaaataactattcctcctccattccaccgactcccagcaccagccaggaggaccctcagttcagtgttcctcccactgccaacacacccacccccatttgcaagcggtccatgcgctggtccaacctgtttacatctgagaaagggagtgacccagacaaagagaggaaagccccggagaatcatgctgacaccatcgggagcggcagagccatccccattaaacagggcatgctcttaaagcgaagtgggaaatggctgaagacatggaaaaagaaatacgtcaccctgtgttccaatggcgtgctcacctattattcaagcttaggtgattatatgaagaatattcataaaaaagagattgaccttcggacatctaccatcaaagtcccaggaaagtggccatccctagccacatcagcctgtgcacccatctccagctctaaaagcaatggcctatccaaggacatggacaccgggctgggtgactccatatgcttcagccccagtatctccagcaccaccagccccaagctcaacccacccccctctcctcatgccaataaaaagaaacacctaaagaagaaaagcaccaacaactttatgattgtgtctgccactggccaaacgtggcactttgaagccacgacgtatgaggagcgggatgcctgggtccaagccatccagagccagatcctggccagcctgcagtcatgcgagagcagtaaaagcaagtcccagctgaccagccagagtgaggccatggccctgcagtcgatccaaaacatgcgtgggaacgcccactgtgtggactgtgagacccagaatcctaagtgggccagtttgaacttgggagtcctcatgtgtattgaatgctcaggtatccaccgcagtcttggcacccgcctttcccgtgtgcgatctctggagctggatgactggccagttgagctcaggaaggttatgtcatctattggcaatgagctagccaacagcatctgggaagggagcagccaggggcagacaaaaccctcaataaagtccacgagggaagagaaggaacgctggatccattccaaatatgaggagaagctctttctggccccactaccctgcactgagctgtctctgggccagcagctgctgcgggccaccgctgatgaggacctgcagacagccatcctgctgctggcacatggctcccgtgaggagg

SEQ ID NO: 6791 - protein, 164 aa, Homo sapiens
MAGAPMAAAVQPAEVTVEVGEDLHMHQVRDREMPEALEFNLSANPEASTIFQRNSQTDALEFNPSANPEASTIFQRNSQTDVVEIRRSNCTNRVSTERFSQQYSSCSTIFLDDSTAIQHYLTMTIISVTLEIPHHITQRDADRSLSIPDEQLHSFAQKMYLFKR

SEQ ID NO: 6792 - DNA, 1054 bp, Homo sapiens
aaactgttctacctttctggaatggtgcatggagaatatcaaaaccaagaaatccacaatctgggccattttattacagttatgaagtttaggcctctcatggcaaacttttcacccttatatcctggcagacaggatggaagatttgacaaacccggaggatatccaaacaaacatcaaatgtgaccggcaggtgtcactttatggttatttaagaggagcacacttcaaagataaaagccaaattcacatgccaggacaaggtggggctcacccatgagctggtccagagtctcatctccacctactccaccattgatgccaagatggcttcaagtcgagtgacgctgctttccaattccaaaccacttgggtcagaggctatagataatcaagggtgagtggtgtcattgagcaaacacaaagtcgggctcatccaaggatgagattttgccagagaaaggatgagcagcaagtcagggagcttaagcgtcagcctcgagtttgacccagcagcaggggtcggtgtgtccctctgaatctgagatctatgaggcaggagctgaggacaggatggcaggagcgcccatggctgctgctgtacagcctgctgaggtgactgttgaagttggtgaggacctccacatgcaccaggttcgtgaccgggagatgcctgaagctttggagtttaacctttctgccaatccagaggcaagcacaatattccagaggaactctcaaacagatgctttggagtttaacccttctgccaatccagaggcaagcacaatattccagaggaactctcaaacagatgttgtagaaataagaagaagcaactgtacaaaccgttgtgaccttggagatacctcatcatatcacacaaagagatgcagatagatctttgagcatacctgatgaacagttacactcatttgcgacagggtttcaccatgttggccaggatggtcttgaactcctgacctcgtgatccacccaccttggcctcccaaagtgctgtgattacaggtgtgagccaccatgcctggcccag

SEQ ID NO: 6793 - protein, 108 aa, Homo sapiens; identical to SEQ ID NO: 6783

SEQ ID NO: 6794 - DNA, 2554 bp, Homo sapiens
ataataataataataataataataatctacaatgtcatttcccatccaagcttgacttctacctttactttctgatatggttttgccatgtccccacccaaatatcatcatgaattataatccccataatcccgatgtgtcgagggaggggcctagggggaggtgattggatcacaggggcagttatcctcatgctgttcttgtgatattcagtaagtcctcatgagatcttatagggttttgttttgttttgtttcctgggatggaggcttgctctgttgtccaggcaagagtgccatggcacgatcttggctcactgcagtctctgcctcttgagttccagtgattctcctgcctcagcctcctgagtagctgggattacaggcatgcaccaccacacccagctaatttttgtatttttagtagagacaggatttcactacattagctaggctggtctcaaactcctgacctcagttgatccacctgccttggcctcccaaagtactagggttacaagtgtgagccaccgtgcccagctgagatctgatggttttatacatgtttgacagttgctccttcacatgttcccactctctgtgcggccaccatgtaagtcggacctgcccttctgccatgattgtaagtttcctgaaggacttccccctctgccatgattgtaagtttcctgaggcctccccagccatgtgaaactgagtcaattaagcctctttcctttaaaaattacccaacctcaggtgtttctttatatcagtgtgaaaacagactgctatactttctgataatcatgcttaagcaattggggaattcagactacctgggatcaaactatggccccacccttagcagtcatgtgaccttgggggggtttacttaccttctctgtcccaacaacttctgtaaaatctgtaacatgagattgtttctgagggttaaatgagcatagcacagtggggacactgtcaggcacacactacttgccagatgtcgagtattcatctttattgaaataggactgtggtaagccactttatggctctcgattttgtatgagaaaatcatgtttagtgccttgttagtaaaagaaagaaaatctgaaagtccctgccatggaaggaagaaatagcggggagaaaagggagttggtaagtttcagcatttcagagcttggagggacaagttaggtttctattttatggagaaggaggtggaggcaggatgggtcctaaggtgtcattcaaaacacacagccataactctttattgagagtagagctagggccccagggattgctgtgatcaagttgcggacaaaaatgaccactcgttggaagacaggagaggagtgtttagttacaaaagcagtcaacaattcaggtgtatctatattcagacagcaaataaaagttgttcaacttggttgctaatgggacccactctactgaggctttatgtagaactcatagaggaagctggctttgaggaatgaactaccctgtgcttttcttaggactaaaatctcaggaagctggtgatgaatgaaaaccttagtcccattggcactgcacgaggggccaggagagcagcagcatcataagccacagggtggggcagccaaggcaggggcattctgagctgttggggaggggtggcaggcagggtggggcactgtgaggtgtcggggagggcattgtgaagtgtggggtggggcattgtgtgccacatgcctgggctcccacctggggccagtgggcttcagtctgtaggtgactacagaaggaggaggagctccatctgttctctcttcaggcagttgttgtgtctctcagcgcttgttgggttcacaacctattaaataagccggctggtcttcaccctcccagacaagtcaactcaggggaggcagcagggtgcgggccttggcccacagccctagccggggccggggccggggccggggccagggctggtgcccggggccgcactgtgaggtgggcaggcgaggagcgggaagaccatctctgcaagtgcagcatagcctcggcctaggacagcgggagtgcgtggccaaagctgtgagcagaggcacaggtggtggcaggcagtagaggcgccccatggggaacatactgacctgtcgtgtgcaccctagcgtcagcctcgagtttgacccagcagcaggggtcggtgtgtccctctgaatctgagatctatgaggcaggagctgaggacaggatggcaggagcgcccatggctgctgctgtacagcctgctgaggtgactgttgaagttggtgaggacctccacatgcaccaggttcgtgaccgggagatgcctgaagctttggagtttaacctttctgccaatccagaggcaagcacaatattccagaggaactctcaaacagatgctttggagtttaacccttctgccaatccagaggcaagcacaatattccagaggaactctcaaacagatggtgagacaacattgttttttccgccaagagaaagaataaaagctcttgtttgat

SEQ ID NO: 6795 - protein, 98 aa, Homo sapiens
MAGAPMAAAVQPAEVTVEVGEDLHMHQVRDREMPEALEFNLSANPEASTIFQRNSQTDALEFNPSANPEASTIFQRNSQTDGETTLFFPPRERIKALV

SEQ ID NO: 6796 - DNA, 756 bp, Homo sapiens
aggatggaagatttgacaaacccggaggatatccaaacaaacatcaaatgtgaccggcaggtgtcactttatggttatttaagaggagcacacttcaaagataaaagccaaattcacatgccaggacaaggtggggctcacccatgagctggtccagagtctcatctccacctactccaccattgatgccaagatggcttcaagtcgagtgacgctgctttccaattccaaaccacttgggtcagaggctatagataatcaaggagatggctttggattccctgttctgtgtgctcctgtctggctcctgaacccagctggagaggtgtgtcaatcccaactggtgaagtactgagaggaagctacacaaaaggcagcaaggtgttaataagtgtacctctgacattttaaccacctctgacttttccatggaatggacaagtagtagtctctgtcagagcaatgttttaaaggaaaaaaagaaacttgaggtcgtaaactgtttattaatttatgctgttattttgtgtttactcaactcatttatattgacttgtaaattagtaatttatgaactactattcatcaattcattgcctacatgtcagcaaacaagttttcttcttaataaagaatccggtggctgggcacaatggttcacacctgtaatctcagcatgttgggagggcaaggcaggaggattccttgaggccaagagttcaagacccgcctgggcaacatagcaagatttcatct

SEQ ID NO: 6797 - protein, 53 aa, Homo sapiens
MASSRVTLLSNSKPLGSEAIDNQGDGFGFPVLCAPVWLLNPAGEVCQSQLVKY

SEQ ID NO: 6798 - DNA, 942 bp, Homo sapiens
tgtctgggtgatgcctgtgtagtcatttgatttagtctggagtgggacttttctgtcgagggccagatagtgaatattttcagctttgtggatcatatcttctgcagctacttagctctgcagttgtagtgcacaggcggccatagacaatatgtaaaggaattaatgtggctatgttccaataaaactttagttacaaacacaggtgatgggctggatttggcccgtgggccagttgccaacccctagtgtaggtggtctgttttggtagtttcttcgagaaataatgtgttgtgcttgtaggtactgatgcttatagatgccagctttgggtttgaaatggaaatgtttgagtttctaaacatctgtcaagcacatggctttcctaaaattctgggagttctcacccacctcgactccttcaagcataacaagcaactgaagaagacaaagaagcgattaaaacacaggttctggacagaagtttaccaggttgccaaactgttctacctttctggaatggtgcatggagaatatcaaaaccaagaaatccacaatctgggccattttattacagttatgaagtttaggcctctcatggcaaacttttcacccttatatcctggcagacaggatggaagatttgacaaacccggaggatatccaaacaaacatcaaatgtgaccggcaggtgtcactttatggttatttaagaggagcacacttcaaagataaaagccaaattcacatgccaggacaaggtggggctcacccatgagctggtccagagtctcatctccacctactccaccattgatgccaagatggcttcaagtcgagtgacgctgctttccaattccaaaccacttgggtcagaggctatagataatcaagggtaagtctgctttttttctatttttaataaaaagatatattacagaa

SEQ ID NO: 6799 - protein, 124 aa, Homo sapiens [sequence omitted]

SEQ ID NO: 6800 - DNA, 1864 bp, Homo sapiens
gcactgtgacgcgtgttggggcgcctatgcgagacgggaccgggacaggaaccctgtggctctgtggtaggggaatgccaccaactccctgaggagcagccgtgtggtatgattgtaaacgattatgagggaaatgactctgaagcagaagacctgaatttcagggaggctttgccttcatcaagtcaggaaaacacacctagatcaaaggtttttgaaaataaagttaattcagagaaggtaaaactttctcttcggaatttcccacataatgattatgaggatgtttttgaagagccttcagaaagtggcagtgatcccagcatgtggacagccagaggccccttcggaagagacaggtggagcagtgaggatgaggaggctgcagggccatcacaggctctctcccctctactttctgatacgcgcaaaattgtttctgaaggagaactagatcagttggctcagattcggccattaatattcaattttcatgagcagacagccatcaaggattgtttgaaaatccttgaggaaaaaacagcagcgtatgatatcatgcaggaatttatggctttagaacttaagaatctgcctggtgagttcaactctgggaatcaaccaagcaacagagaaaaaaacagataccgagatattcttccatatgattcaacacgcgttcctcttggaaaaagcaaggactacatcaatgctagttatattagaatagtcaattgtggagaagagtatttttatatcgctactcaaggaccactgctgagcaccatagatgacttttggcaaatggtgttggaaaataattcgaatgttattgccatgataaccagagagatagaaggtggaattatcaaatgctaccattactggcccatttctctgaagaagccattggaattgaaacacttccgtgtattcctggagaactaccagatacttcaatatttcatcattcgaatgtttcaagttgtggagaagtccacgggaactagtcactctgtaaaacagttgcagttcaccaagtggccagaccatggcactcctgcctcagcagatagcttcataaaatatattcgttatgcaaggaagagccaccttacaggacccatggttgttcactgcagtgccggcataggccggacaggggtgttcctatgtgtggatgtcgtgttctgtgccatcgtaaagaactgttcactgcggtaaatagccactatggagactaaggaccagaagaaacacagaaagaaaaacagtggacccaaagctgcaaagaaaaagaagtggcatctgcaggatctccagctaggagacgaagaaaatgcccagaagagaaatgccaatgcttttgcagttcagtctgctgtgtggatgtctcgatcctttcacaggactctggatttgaagacacaaaagcatcatattccagtggttgatggaactccactagagccgccaccaataccggtagtggtgacggggcctccaaagttggaaagagcactttgatataatgcctcattcggaacttcacctggcagaagttcaccgagatcagaggccctgtgacgatcgtgtcaggtaaaaagcgcagactcaccattattgaatgtgggtgtgacattaacatgatgattgatctggctgaagtagcagatctggtactgatgcttatagatgccagctttgggtttgaaatggaaatgtttgagtttctaaacatctgtcaagcacatggctttcctaaaattctgggagttctcacccacctcgactccttcaagcataacaagcaactgaagaagacaaagaagcgattaaaacacaggttctggacagaagttta

SEQ ID NO: 6801 - protein, 371 aa, Homo sapiens
MIVNDYEGNDSEAEDLNFREALPSSSQENTPRSKVFENKVNSEKVKLSLRNFPHNDYEDVFEEPSESGSDPSMWTARGPFGRDRWSSEDEEAAGPSQALSPLLSDTRKIVSEGELDQLAQIRPLIFNFHEQTAIKDCLKILEEKTAAYDIMQEFMALELKNLPGEFNSGNQPSNREKNRYRDILPYDSTRVPLGKSKDYINASYIRIVNCGEEYFYIATQGPLLSTIDDFWQMVLENNSNVIAMITREIEGGIIKCYHYWPISLKKPLELKHFRVFLENYQILQYFIIRMFQVVEKSTGTSHSVKQLQFTKWPDHGTPASADSFIKYIRYARKSHLTGPMVVHCSAGIGRTGVFLCVDVVFCAIVKNCSLR

SEQ ID NO: 6802 - DNA, 1968 bp, Homo sapiens
gacccaactggcgaggctgctggggttgcagcgggacagttggggcggccccgcaggcccaggtgaacaaaaattgtttgctggcccccaggatactaactagacctttggcctgactcacaggacactaaggctccttttctgaagaagccttttaccagtctcatttaggggatgggaacaacatgtcttcacctagggactttagagcagagtctgtaaacgattatgagggaaatgactctgaagcagaagacctgaatttcagggaggctttgccttcatcaagtcaggaaaacacacctagatcaaaggtttttgaaaataaagttaattcagagaaggtaaaactttctcttcggaatttcccacataatgattatgaggatgtttttgaagagccttcagaaagtggcagtgatcccagcatgtggacagccagaggccccttcggaagagacaggtggagcagtgaggatgaggaggctgcagggccatcacaggctctctcccctctactttctgatacgcgcaaaattgtttctgaaggagaactagatcagttggctcagattcggccattaatattcaattttcatgagcagacagccatcaaggattgtttgaaaatccttgaggaaaaaacagcagcgtatgatatcatgcaggaatttatggctttagaacttaagaatctgcctggtgagttcaactctgggaatcaaccaagcaacagagaaaaaaacagataccgagatattcttccatatgattcaacacgcgttcctcttggaaaaagcaaggactacatcaatgctagttatattagaatagtcaattgtggagaagagtatttttatatcgctactcaaggaccactgctgagcaccatagatgacttttggcaaatggtgttggaaaataattcgaatgttattgccatgataaccagagagatagaaggtggaattatcaaatgctaccattactggcccatttctctgaagaagccattggaattgaaacacttccgtgtattcctggagaactaccagatacttcaatatttcatcattcgaatgtttcaagttgtggagaagtccacgggaactagtcactctgtaaaacagttgcagttcaccaagtggccagaccatggcactcctgcctcagcagatagcttcataaaatatattcgttatgcaaggaagagccaccttacaggacccatggttgttcactgcagtgccggcataggccggacaggggtgttcctatgtgtggatgtcgtgttctgtgccatcgtaaagaactgttcactgcggtaaatagccactatggagactaaggaccagaagaaacacagaaagaaaaacagtggacccaaagctgcaaagaaaaagaagtggcatctgcaggatctccagctaggagacgaagaaaatgcccagaagagaaatgccaatgcttttgcagttcagtctgctgtgtggatgtctcgatcctttcacaggactctggatttgaagacacaaaagcatcatattccagtggttgatggaactccactagagccgccaccaataccggtagtggtgacggggcctccaaagttggaaagagcactttgatataatgcctcattcggaacttcacctggcagaagttcaccgagatcagaggccctgtgacgatcgtgtcaggtaaaaagcgcagactcaccattattgaatgtgggtgtgacattaacatgatgattgatctggctgaagtagcagatctggtactgatgcttatagatgccagctttgggtttgaaatggaaatgtttgagtttctaaacatctgtcaagcacatggctttcctaaaattctgggagttctcacccacctcgactccttcaagcataacaagcaactgaagaagacaaagaagcgattaaaacacaggttctggacagaagttta

SEQ ID NO: 6803 - protein, 380 aa, Homo sapiens
MSSPRDFRAESVNDYEGNDSEAEDLNFREALPSSSQENTPRSKVFENKVNSEKVKLSLRNFPHNDYEDVFEEPSESGSDPSMWTARGPFGRDRWSSEDEEAAGPSQALSPLLSDTRKIVSEGELDQLAQIRPLIFNFHEQTAIKDCLKILEEKTAAYDIMQEFMALELKNLPGEFNSGNQPSNREKNRYRDILPYDSTRVPLGKSKDYINASYIRIVNCGEEYFYIATQGPLLSTIDDFWQMVLENNSNVIAMITREIEGGIIKCYHYWPISLKKPLELKHFRVFLENYQILQYFIIRMFQVVEKSTGTSHSVKQLQFTKWPDHGTPASADSFIKYIRYARKSHLTGPMVVHCSAGIGRTGVFLCVDVVFCAIVKNCSLR

SEQ ID NO: 6804 - DNA, 1542 bp, Homo sapiens
gacccaactggcgaggctgctggggttgcagcgggacagttggggcggccccgcaggcccaggtgaacaaaaattgtttgctggcccccaggatactaactagacctttggcctgactcacaggacactaaggctccttttctgaagaagccttttaccagtctcatttaggggatgggaacaacatgtcttcacctagggactttagagcagagtctgtaaacgattatgagggaaatgactctgaagcagaagacctgaatttcagggaggctttgccttcatcaagtcaggaaaacacacctagatcaaaggtttttgaaaataaagttaattcagagaaggtaaaactttctcttcggaatttcccacataatgattatgaggatgtttttgaagagccttcagaaagtggcagtgatcccagcatgtggacagccagaggccccttcggaagagacaggtggagcagtgaggatgaggaggctgcagggccatcacaggctctctcccctctactttctgatacgcgcaaaattgtttctgaaggagaactagatcagttggctcagattcggccattaatattcaattttcatgagcagacagccatcaaggattgtttgaaaatccttgaggaaaaaacagcagcgtatgatatcatgcaggaatttatgacgggaactagtcactctgtaaaacagttgcagttcaccaagtggccagaccatggcactcctgcctcagcagatagcttcataaaatatattcgttatgcaaggaagagccaccttacaggacccatggttgttcactgcagtgccggcataggccggacaggggtgttcctatgtgtggatgtcgtgttctgtgccatcgtaaagaactgttcactgcggtaaatagccactatggagactaaggaccagaagaaacacagaaagaaaaacagtggacccaaagctgcaaagaaaaagaagtggcatctgcaggatctccagctaggagacgaagaaaatgcccagaagagaaatgccaatgcttttgcagttcagtctgctgtgtggatgtctcgatcctttcacaggactctggatttgaagacacaaaagcatcatattccagtggttgatggaactccactagagccgccaccaataccggtagtggtgacggggcctccaaagttggaaagagcactttgatataatgcctcattcggaacttcacctggcagaagttcaccgagatcagaggccctgtgacgatcgtgtcaggtaaaaagcgcagactcaccattattgaatgtgggtgtgacattaacatgatgattgatctggctgaagtagcagatctggtactgatgcttatagatgccagctttgggtttgaaatggaaatgtttgagtttctaaacatctgtcaagcacatggctttcctaaaattctgggagttctcacccacctcgactccttcaagcataacaagcaactgaagaagacaaagaagcgattaaaacacaggttctggacagaagttta

SEQ ID NO: 6805 - protein, 238 aa, Homo sapiens
MSSPRDFRAESVNDYEGNDSEAEDLNFREALPSSSQENTPRSKVFENKVNSEKVKLSLRNFPHNDYEDVFEEPSESGSDPSMWTARGPFGRDRWSSEDEEAAGPSQALSPLLSDTRKIVSEGELDQLAQIRPLIFNFHEQTAIKDCLKILEEKTAAYDIMQEFMTGTSHSVKQLQFTKWPDHGTPASADSFIKYIRYARKSHLTGPMVVHCSAGIGRTGVFLCVDVVFCAIVKNCSLR

SEQ ID NO: 6806 - DNA, 768 bp, Homo sapiens
atggttttctctttgaagcagagacgatttgaaagggagcaccttcacagaatggcccaagtttttgaaaataaagttaattcagagaaggtaaaactttctcttcggaatttcccacataatgattatgaggatgtttttgaagagccttcagaaagtggcagtgatcccagcatgtggacagccagaggccccttcggaagagacaggtggagcagtgaggatgaggaggctgcagggccatcacaggctctctcccctctactttctgatacgcgcaaaattgtttctgaaggagaactagatcagttggctcagattcggccattaatattcaattttcatgagcagacagccatcaaggattgtttgaaaatccttgaggaaaaaacagcagcgtatgatatcatgcaggaatttatggctttagaacttaagaatctgcctggtgagttcaactctgggaatcaaccaagcaacagagaaaaaaacagataccgagatattcttccatatgattcaacacgcgttcctcttggaaaaagcaaggactacatcaatgctagttatattagaatagtcaattgtggagaagagtatttttatatcgctactcaaggaccactgctgagcaccatagatgacttttggcaaatggtgttggaaaataattcgaatgttattgccatgataaccagagagatagaaggtggaattatcaaatgctaccattactggcccatttctctgaagaagccattggaattg

SEQ ID NO: 6807 - protein, 255 aa, Homo sapiens
MVFSLKQRRFEREHLHRMAQVFENKVNSEKVKLSLRNFPHNDYEDVFEEPSESGSDPSMWTARGPFGRDRWSSEDEEAAGPSQALSPLLSDTRKIVSEGELDQLAQIRPLIFNFHEQTAIKDCLKILEEKTAAYDIMQEFMALELKNLPGEFNSGNQPSNREKNRYRDILPYDSTRVPLGKSKDYINASYIRIVNCGEEYFYIATQGPLLSTIDDFWQMVLENNSNVIAMITREIEGGIIKCYHYWPISLKKPLE

SEQ ID NO: 6808 - DNA, 507 bp, Homo sapiens
atggccccaaagagtagtgatgctggcaatttgaatatgccaaagggaagctatacgcgcaaaattgtttctgaaggagaactagatcagttggctcagattcggccattaatattcaattttcatgagcagacagccatcaaggattgtttgaaaatccttgaggaaaaaacagcagcgtatgatatcatgcaggaatttatggctttagaacttaagaatctgcctggtgagttcaactctgggaatcaaccaagcaacagagaaaaaaacagataccgagatattcttccatttatagaagaactagctgaccagggacatgctgatactgctactgctcaaaagaccctagagctgcagcctaaggcacctgtggaaggggaacttaccgacatgaatgaccaaagtgcttgtgaggaaaaggataaaggcaacctaggggaagcaatgatggtagaaaacttgacattaaagaaactttggagctatttcacaacaatataa

SEQ ID NO: 6809 - protein, 168 aa, Homo sapiens
MAPKSSDAGNLNMPKGSYTRKIVSEGELDQLAQIRPLIFNFHEQTAIKDCLKILEEKTAAYDIMQEFMALELKNLPGEFNSGNQPSNREKNRYRDILPFIEELADQGHADTATAQKTLELQPKAPVEGELTDMNDQSACEEKDKGNLGEAMMVENLTLKKLWSYFTTI

SEQ ID NO: 6810 - DNA, 568 bp, Homo sapiens
gttggtggcagttcttgtactcctgtacttgcttgtatctgcagcagctcctgctccttcctcggactccactccagaaaatgtgtgcccagtcgaaaccactaccaatttcatctgggagctttcttcaccccacaacacttccgcagttctgctggttgtcttccacaagggccccagtgagatatagtcagggatggcgtccctgtgctcgagctggagactgggagtgcatacaaggcacttcctgctgctacttctactttcatattttgtgtgactctctaaatcccttccatctctaggtttttgaaaataaagttaattcagagaaggtaaaactttctcttcggaatttcccacataatgattatgaggatgtttttgaagagccttcagaaagtggcagtgatcccagcatgtggacagccagaggccccttcggaagagacaggtggagcagtgaggatgaggaggctgcagggccatcacaggctctctcccctctactttctgtattccattcaccagttgaaggacactgtgttgtttccagattttggcaatt

SEQ ID NO: 6811 - protein, 66 aa, Homo sapiens
MIMRMFLKSLQKVAVIPACGQPEAPSEETGGAVRMRRLQGHHRLSPLYFLYSIHQLKDTVLFPDFG

SEQ ID NO: 6812 - DNA, 434 bp, Homo sapiens
ccagtctcatttaggggatgggaacaacatgtcttcacctagggactttagagcagagtctggtttttgaaaataaagttaattcagagaaggtaaaactttctcttcggaatttcccacataatgattatgaggatgtttttgaagagccttcagaaagtggcagtgatcccagcatgtggacagccagaggccccttcggaagagacaggtggagcagtgaggatgaggaggctgcagggccatcacaggctctctcccctctactttctggtatgacatcatcctatttgtagtagcaagttgaggctctattttagagatatgcacaaagatatttctaatacaaatgaaagaaagagctagggaaaacttcaaaaatgggaaaatatggttttctaggattttcttttaaaaataaaaaaatgcaatta

SEQ ID NO: 6813 - protein, 92 aa, Homo sapiens
MGTTCLHLGTLEQSLVFENKVNSEKVKLSLRNFPHNDYEDVFEEPSESGSDPSMWTARGPFGRDRWSSEDEEAAGPSQALSPLLSGMTSSYL

SEQ ID NO: 6814 - DNA, 574 bp, Homo sapiens
gcactggagctttgccctgcgccgcggccctctgcttgcgaggccgggagagacagaacctgcctctaccggtcttccaaggcactgagagcccatcgccgcggacgccgctgtaaattccctgcgggccctgtgcaccaccctgtgcgcgtccccctctcccaggccaggctgataatgttaacagctctctgagctatgctcatatcctgaaccactgaggactgtgttctccaggaatgctcgcctgacccacgcctgccctctaagcccctaatgaggccccagagggctggggtgggggggtctctttgtagtatcagagcagggcagataggcaaaaggagtcagagcctgtgccagaatatgagtgcctaacatcaagattctgcactggtcatcatttcacaaacatgagcagcatggctgctccaagacacacagagggaataacccccattcacatcaccaggaaatccttgcatggaggctaaatgaacagttgtccttggccttgatccggatacccagacgccctctgagatggaccttgagggccgtgccaatgtctgct

SEQ ID NO: 6815 - protein, 33 aa, Homo sapiens [sequence omitted]

SEQ ID NO: 6816 - DNA, 421 bp, Homo sapiens
agacctggaggagcctgtggccctggaatacggtgccctcaggtctctctcttttgggggtctgaatgtctagtgctgattcctgttttgcctgctcctacctgcccctctgctggatgtactgcagagaagagtcttggtgtcctgtcatagggcccatcttgttggactgctgtggctgagtatagaccagcatcaggaaagtctcactgttaatgcaaggagccaccagaagctgacctggtcaccaggcagggtcagaacatattgatgaggacacagaaaaagtaagggcaacagaaactgtcacactgggaggaagggaggttaaattctgggcaggtctgtaaccacccaacattctgttaaagtacttacagtgtatatttaaaaatgctgaatgttccaaaaactttcacat

SEQ ID NO: 6817 - protein, 38 aa, Homo sapiens
MSSADSCFACSYLPLCWMYCREESWCPVIGPILLDCCG

SEQ ID NO: 6818 - DNA, 4413 bp, Homo sapiens
gagtacgggcccggacatgttcctggacattgcagaggccctgtcacatgcatgtctttattgtaggcatgagcctgtcctctgtgacgctggccagcgccctacaggtcaggggtgaagctctgtctgaggaggaaatctggtccctcctgttcctggccgctgagcagctcctggaagacctccgcaacgattcctcggactatgtggtttgcccctggtcagccctgctttctgcagctggaagcctttctttccaaggccgtgtttctcatatagaggctgctcctttcaaggcccctgaactgctacagggacagagtgaggatgagcagcctgatgcatctcagcccctgcagctctgcgagcccctgcactccatcctgctgaccatgtgtgaagaccagcctcacaggcggtgcacgttgcagtcggttctggaagcttgtcgggttcatgagaaagaagtgtctgtctacccagcccctgctggtctccacatcagaaggctggttggcttggttctgggtaccatttctgaggtggagaaaagagttgtggaggaaagctcctctgtgcagcagaacagaagctacctgctcaggaagaggctgcgtgggacaagcagcgagagcccagcggcacaggccccggagtgtctgcatccttgcagagtttcagaaagaagcacggagacccagagctcaccagagccccattggagcaccttgacacacagtcactgcagcctccttgttaaccgcgctcttccaggagcagatccccaggaccagcaggcgggccggaggctcagctctggatctgtgcactcggcagcagacagctcatggccaacaactccttctcagaggggttttctgcaaagaaggagcaagttttccaggccagagttcatcctgttggctggagaggccccgatgacactacatctgccgggatcggttgtgaccaaaaaagggaaatcctatttggctctcagggacctctgtgtggtcctgctgaacgggcagcacctggaggtaaaatgtgatgttgaatcaacagtgggagctgtcttcaatgccgtgacatcctttgccaacctcgaggaactcacctactttggcttggcgtatatgaaaagcaaagagttctttttcctggacagtgaaaccagattgtgcaaaatagctcctgaaggctggagagagcagcctcagaagacctccatgaataccttcacactcttcctgaggataaagttctttgtcagccactatgggctgctccagcacagcctgacaaggcaccagttttacctgcagcttcggaaagatatcctggaggagaggctgtactgcaatgaagagatactgctgcagctgggggtccttgccttgcaggctgagtttggcaattaccctaaggagcaggtggagagtaagccatactttcacgttgaagattacatcccagcgagtctgatcgagaggatgaccgctctacgggtccaggttgaagtctcagagatgcaccggctcagctctgcactgtggggagaggatgctgagctgaagttcttgagggtcactcagcagctcccagaatacggtgtgctggttcaccaagtattctcagagaagaggaggccagaagaggagatggccctggggatctgtgccaagggtgtcatagtctatgaagtgaaaaacaacagcagaattgcaatgttacggtttcagtggagagaaaccgggaagatttctacttatcaaaaaaagttcaccatcacaagcagtgtcactgggaagaagcacacatttgtcacagattcagccaagaccagtaaatacttactggacctctgctcagcccagcatgggtttaatgcacagatgggctctgggcagccttcccatgttttatttgaccatgataagtttgtgcaaatggccaatttgagtcctgcacaccaggcccggtctaagcctctcatttggattcagagattgtcatgctcagaaaacgagttgtttgtatccaggcttcagggtgctgcaggaggcctgctgagtacatcaatggataacttcaacgtggacggcagcaaggaggctggagcagaaggcatcgggcgcagcccctgcactggccgggagcagctgaagagtgcctgtgtgatccagaagccaatgacctgggactctctctctggaccacctgttcagagcatgcatgcaggctcaaagaataataggaggaagagctttatagctgaaccgggccgagaaattgtacgtgtgacactgaaacgtgacccacatcgtggttttgggtttgtcattaatgagggagagtattcaggccaagctgaccctggcatttttatatcttctattatacctggaggaccagcagaaaaagcaaaaacgatcaaaccaggagggcagatactagccctgaatcacatcagtctggagggcttcacattcaacatggctgttaggatgatccagaattcccctgacaacatagaattaattatttctcagtcaaaaggtgttggtggaaataacccagatgaagaaaagaatagcacagccaattctggggtctcctctacagacatcctgagcttcgggtaccagggaagtttgttgtcacacacacaagaccaggacagaaatactgaagaactagacatggctggggtgcagagcttagtgcccaggctgagacatcagctttcctttctgccgttaaagggtgctggttcttcttgtcctccatcacctccagaaatcagtgctggtgaaatctactttgtggaactggttaaagaagatgggacacttggattcagtgtaactggtggcattaacaccagtgtgccatatggtggtatctatgtgaaatccattgttcctggaggaccagctgccaaggaagggcagatcctacagggtgaccgactcctgcaggtggatggagtgattctgtgcggcctcacccacaagcaggctgtgcagtgcctgacgggtcctgggcaggttgcaagactggtcttagagagaagagtccccaggagtacacagcagtgtccttctgctaatgacagcatgggagatgaacgcacggctgtttccttggtaacagccttgcctggcaggccttcgagctgtgtctcagtgacagatggtcctaagtttgaagtcaaactaaaaaagaatgccaatggtttgggattcagtttcgtgcagatggagaaagagagctgcagccatctcaaaagtgatcttgtgaggattaagaggctctttccggggcagccagctgaggagaatggggccattgcagctggtgacattatcctggccgtgaatggaaggtccacggaaggcctcatcttccaggaggtgctgcatttactgagaggggccccacaggaagtcacgctcctcctttgccgaccccctccaggtgcgctgcctgagctggagcaggaatggcagacacctgaactctcagctgacaaagaattcaccagggcaacatgtactgactcatgtaccagccccatcctggatcaagaggacagctggagggacagtgcctccccagatgcaggggaaggcctgggtctcaggccagagtcttcccaaaaggccatcagagaggcacaatggggccaaaacagagagagaccttgggccagttccttgacacattctcctgagtcccaccctcatttatgcaaacttcaccaagaaagggatgaatcaacattggcgacctctttggaaaaggatgtgaggcaaaactgctattcagtttgtgatatcatgagacttggaagatattccttctcatctcctctaaccagactttcgacagatattttctgagcaccttctctgcatgtctgcagtgctgtgtaaaatgccctacctttgcatggactattctttctaatcaagaggcgtgtgtggcgaacttggggcagcccctggaagtcttgttctttgaccattacgtctgcggctgcatcaccagataatgagcttcaccactcgtctgcctcctgtgtccttccgcggggagtaaatgtcacttcagcttgccgcatctctaaataggcaaattttcagtgctcagaaaaggacctgatctttgcacaaagtgctttgatggttgcctgcttgagtcactcccaatcccttcctgaagccctttctttataattcttctgttgaaatagccatcatattcacagtactaatcacagcatctcaccccccggtctcctgagctcggtaaggtgctccagctgcttctatcatagcacttcctacatggactgtaacatttctttactgctccaacttctcattaaattgggggctcctcaaagcc

SEQ ID NO: 6819 - protein, 1285 aa, Homo sapiens
MHVFIVGMSLSSVTLASALQVRGEALSEEEIWSLLFLAAEQLLEDLRNDSSDYVVCPWSALLSAAGSLSFQGRVSHIEAAPFKAPELLQGQSEDEQPDASQPLQLCEPLHSILLTMCEDQPHRRCTLQSVLEACRVHEKEVSVYPAPAGLHIRRLVGLVLGTISEVEKRVVEESSSVQQNRSYLLRKRLRGTSSESPAAQAPECLHPCRVSERSTETQSSPEPHWSTLTHSHCSLLVNRALPGADPQDQQAGRRLSSGSVHSAADSSWPTTPSQRGFLQRRSKFSRPEFILLAGEAPMTLHLPGSVVTKKGKSYLALRDLCVVLLNGQHLEVKCDVESTVGAVFNAVTSFANLEELTYFGLAYMKSKEFFFLDSETRLCKIAPEGWREQPQKTSMNTFTLFLRIKFFVSHYGLLQHSLTRHQFYLQLRKDILEERLYCNEEILLQLGVLALQAEFGNYPKEQVESKPYFHVEDYIPASLIERMTALRVQVEVSEMHRLSSALWGEDAELKFLRVTQQLPEYGVLVHQVFSEKRRPEEEMALGICAKGVIVYEVKNNSRIAMLRFQWRETGKISTYQKKFTITSSVTGKKHTFVTDSAKTSKYLLDLCSAQHGFNAQMGSGQPSHVLFDHDKFVQMANLSPAHQARSKPLIWIQRLSCSENELFVSRLQGAAGGLLSTSMDNFNVDGSKEAGAEGIGRSPCTGREQLKSACVIQKPMTWDSLSGPPVQSMHAGSKNNRRKSFIAEPGREIVRVTLKRDPHRGFGFVINEGEYSGQADPGIFISSIIPGGPAEKAKTIKPGGQILALNHISLEGFTFNMAVRMIQNSPDNIELIISQSKGVGGNNPDEEKNSTANSGVSSTDILSFGYQGSLLSHTQDQDRNTEELDMAGVQSLVPRLRHQLSFLPLKGAGSSCPPSPPEISAGEIYFVELVKEDGTLGFSVTGGINTSVPYGGIYVKSIVPGGPAAKEGQILQGDRLLQVDGVILCGLTHKQAVQCLTGPGQVARLVLERRVPRSTQQCPSANDSMGDERTAVSLVTALPGRPSSCVSVTDGPKFEVKLKKNANGLGFSFVQMEKESCSHLKSDLVRIKRLFPGQPAEENGAIAAGDIILAVNGRSTEGLIFQEVLHLLRGAPQEVTLLLCRPPPGALPELEQEWQTPELSADKEFTRATCTDSCTSPILDQEDSWRDSASPDAGEGLGLRPESSQKAIREAQWGQNRERPWASSLTHSPESHPHLCKLHQERDESTLATSLEKDVRQNCYSVCDIMRLGRYSFSSPLTRLSTDIF

SEQ ID NO: 6820 - DNA, 1886 bp, Homo sapiens
gagaagaagggagtgagactgctcagagaggcaggattcctgctgactccagggggacacctggcacctcagcttcctttcccacttctccaggctgcatggaggggtgccgggcaggggcctcctggaagggaacctcctgcagcctcaagcaccaggtcatgacatgacatctatccctttcccaggtgaccgactcctgcaggtggatggagtgattctgtgcggcctcacccacaagcaggctgtgcagtgcctgacgggtcctgggcaggttgcaagactggtcttagagagaagagtccccaggagtacacagcagtgtccttctgctaatgacagcatgggagatgaacgcacggctgtttccttggtaacagccttgcctggcaggccttcgagctgtgtctcagtgacagatggtcctaagtttgaagtcaaactaaaaaagaatgccaatggtttgggattcagtttcgtgcagatggagaaagagagctgcagccatctcaaaagtgatcttgtgaggattaagaggctctttccggggcagccagctgaggagaatggggccattgcagctggtgacattatcctggccgtgaatggaaggtccacggaaggcctcatcttccaggaggtgctgcatttactgagaggggccccacaggaagtcacgctcctcctttgccgaccccctccaggtgcgctgcctgagctggagcaggaatggcagacacctgaactctcagctgacaaagaattcaccagggcaacatgtactgactcatgtaccagccccatcctggatcaagaggacagctggagggacagtgcctccccagatgcaggggaaggcctgggtctcaggccagagtcttcccaaaaggccatcagagaggcacaatggggccaaaacagagagagaccttgggccagttccttgacacattctcctgagtcccaccctcatttatgcaaacttcaccaagaaagggatgaatcaacattggcgacctctttggaaaaggatgtgaggcaaaactgctattcagtttgtgatatcatgagacttggaagatattccttctcatctcctctaaccagactttcgacagatattttctgagcaccttctctgcatgtctgcagtgctgtgtaaaatgccctacctttgcatggactattctttctaatcaagaggcgtgtgtggcgaacttggggcagcccctggaagtcttgttctttgaccattacgtctgcggctgcatcaccagataatgagcttcaccactcgtctgcctcctgtgtccttccgcggggagtaaatgtcacttcagcttgccgcatctctaaataggcaaattttcagtgctcagaaaaggacctgatctttgcacaaagtgctttgatggttgcctgcttgagtcactcccaatcccttcctgaagccctttctttataattcttctgttgaaatagccatcatattcacagtactaatcacagcatctcacatttactaaaaacttaccccataccaggaacccagagttgggggggctgtgtcagaattatgtaatttacgtgtcccaataatcctagacgcttcttgaccatctagttttgtcaaatgagaaaactgaggttccaaagaagtcaataaacttgtccaaagtctgaccgactctgcttgccatgtgacgagtctgtcttagaactgggtcattgccctgcttgcaatgctgtgccctctggcaagcccccccatccccccggtctcctgagctcggtaaggtgctccagctgcttctatcatagcacttcctacatggactgtaacatttctttactgctccaacttctcattaaattgggggctcctc

SEQ ID NO: 6821 - protein, 320 aa, Homo sapiens
MTSIPFPGDRLLQVDGVILCGLTHKQAVQCLTGPGQVARLVLERRVPRSTQQCPSANDSMGDERTAVSLVTALPGRPSSCVSVTDGPKFEVKLKKNANGLGFSFVQMEKESCSHLKSDLVRIKRLFPGQPAEENGAIAAGDIILAVNGRSTEGLIFQEVLHLLRGAPQEVTLLLCRPPPGALPELEQEWQTPELSADKEFTRATCTDSCTSPILDQEDSWRDSASPDAGEGLGLRPESSQKAIREAQWGQNRERPWASSLTHSPESHPHLCKLHQERDESTLATSLEKDVRQNCYSVCDIMRLGRYSFSSPLTRLSTDIF

SEQ ID NO: 6822 - DNA, 1686 bp, Homo sapiens
gagaagaagggagtgagactgctcagagaggcaggattcctgctgactccagggggacacctggcacctcagcttcctttcccacttctccaggctgcatggaggggtgccgggcaggggcctcctggaagggaacctcctgcagcctcaagcaccaggtcatgacatgacatctatccctttcccaggtgaccgactcctgcaggtggatggagtgattctgtgcggcctcacccacaagcaggctgtgcagtgcctgacgggtcctgggcaggttgcaagactggtcttagagagaagagtccccaggagtacacagcagtgtccttctgctaatgacagcatgggagatgaacgcacggctgtttccttggtaacagccttgcctggcaggccttcgagctgtgtctcagtgacagatggtcctaagtttgaagtcaaactaaaaaagaatgccaatggtttgggattcagtttcgtgcagatggagaaagagagctgcagccatctcaaaagtgatcttgtgaggattaagaggctctttccggggcagccagctgaggagaatggggccattgcagctggtgacattatcctggccgtgaatggaaggtccacggaaggcctcatcttccaggaggtgctgcatttactgagaggggccccacaggaagtcacgctcctcctttgccgaccccctccaggtgcgctgcctgagctggagcaggaatggcagacacctgaactctcagctgacaaagaattcaccagggcaacatgtactgactcatgtaccagccccatcctggatcaagaggacagctggagggacagtgcctccccagatgcaggggaaggcctgggtctcaggccagagtcttcccaaaaggccatcagagaggcacaatggggccaaaacagagagagaccttgggccagttccttgacacattctcctgagtcccaccctcatttatgcaaacttcaccaagaaagggatgaatcaacattggcgacctctttggaaaaggatgtgaggcaaaactgctattcagtttgtgatatcatgagacttggaagatattccttctcatctcctctaaccagactttcgacagatattttctgagcaccttctctgcatgtctgcagtgctgtgtaaaatgccctacctttgcatggactattctttctaatcaagaggcgtgtgtggcgaacttggggcagcccctggaagtcttgttctttgaccattacgtctgcggctgcatcaccagataatgagcttcaccactcgtctgcctcctgtgtccttccgcggggagtaaatgtcacttcagcttgccgcatctctaaataggcaaattttcagtgctcagaaaaggacctgatctttgcacaaagtgctttgatggttgcctgcttgagtcactcccaatcccttcctgaagccctttctttataattcttctgttgaaatagccatcatattcacagtactaatcacagcatctcacatttactaaaaacttaccccataccaggaacccagagttgggggggctgtgtcagaattatgtaatttacgtgtcccaataatcctagacgcttcttgaccatctagttttgtcaaatgagaaaactgaggttccaaagaagtcaataaacttgtccaaagtctgaccg

SEQ ID NO: 6823 - protein, 320 aa, Homo sapiens; identical to SEQ ID NO: 6821

SEQ ID NO: 6824 - DNA, 1677 bp, Homo sapiens
tgttaagcttatgaacacctaatcttattgctcagtggagaatacaatctaaacgaacaggtgaatacagaagacagtgccagtcggagggtggcattaacaccagtgtgccatatggtggtatctatgtgaaatccattgttcctggaggaccagctgccaaggaagggcagatcctacagggtgaccgactcctgcaggtggatggagtgattctgtgcggcctcacccacaagcaggctgtgcagtgcctgacgggtcctgggcaggttgcaagactggtcttagagagaagagtccccaggagtacacagcagtgtccttctgctaatgacagcatgggagatgaacgcacggctgtttccttggtaacagccttgcctggcaggccttcgagctgtgtctcagtgacagatggtcctaagtttgaagtcaaactaaaaaagaatgccaatggtttgggattcagtttcgtgcagatggagaaagagagctgcagccatctcaaaagtgatcttgtgaggattaagaggctctttccggggcagccagctgaggagaatggggccattgcagctggtgacattatcctggccgtgaatggaaggtccacggaaggcctcatcttccaggaggtgctgcatttactgagaggggccccacaggaagtcacgctcctcctttgccgaccccctccaggtgcgctgcctgagctggagcaggaatggcagacacctgaactctcagctgacaaagaattcaccagggcaacatgtactgactcatgtaccagccccatcctggatcaagaggacagctggagggacagtgcctccccagatgcaggggaaggcctgggtctcaggccagagtcttcccaaaaggccatcagagaggcacaatggggccaaaacagagagagaccttgggccagttccttgacacattctcctgagtcccaccctcatttatgcaaacttcaccaagaaagggatgaatcaacattggcgacctctttggaaaaggatgtgaggcaaaactgctattcagtttgtgatatcatgagacttggaagatattccttctcatctcctctaaccagactttcgacagatattttctgagcaccttctctgcatgtctgcagtgctgtgtaaaatgccctacctttgcatggactattctttctaatcaagaggcgtgtgtggcgaacttggggcagcccctggaagtcttgttctttgaccattacgtctgcggctgcatcaccagataatgagcttcaccactcgtctgcctcctgtgtccttccgcggggagtaaatgtcacttcagcttgccgcatctctaaataggcaaattttcagtgctcagaaaaggacctgatctttgcacaaagtgctttgatggttgcctgcttgagtcactcccaatcccttcctgaagccctttctttataattcttctgttgaaatagccatcatattcacagtactaatcacagcatctcacatttactaaaaacttaccccataccaggaacccagagttgggggggctgtgtcagaattatgtaatttacgtgtcccaataatcctagacgcttcttgaccatctagttttgtcaaatgagaaaactgaggttccaaagaagtcaataaacttgtccaaagtctg

SEQ ID NO: 6825 - protein, 261 aa, Homo sapiens; identical to SEQ ID NO: 935

SEQ ID NO: 6826 - DNA, 4786 bp, Homo sapiens
gagctcttcctggctctctcacgggtcactggctttgaggacgcaggctgctggggtggcagtgcctgctaacaggccagagactgcgcaggacccagggaatgagagtggtggcaggaaagggaaggggccttgttgactcactcgctgggcagcaagtgcttagtgacaagcagtaaacaaagacagcggcaacagtgctggtggcagggagctccgcggacagacttgcaagagacccctgctccttgttggaaagttgtcccatgatgaaggcctagacctggtcacggagacttttggatgcagcctttaacgaaggacgcaggcatgagcctgtcctctgtgacgctggccagcgccctacaggtcaggggtgaagctctgtctgaggaggaaatctggtccctcctgttcctggccgctgagcagctcctggaagacctccgcaacgattcctcggactatgtggtttgcccctggtcagccctgctttctgcagctggaagcctttctttccaaggccgtgtttctcatatagaggctgctcctttcaaggcccctgaactgctacagggacagagtgaggatgagcagcctgatgcatctcagatgcatgtctattctttaggaatgaccctctactggtcagcagggtttcatgttccgccacatcagcccctgcagctctgcgagcccctgcactccatcctgctgaccatgtgtgaagaccagcctcacaggcggtgcacgttgcagtcggttctggaagcttgtcgggttcatgagaaagaagtgtctgtctacccagcccctgctggtctccacatcagaaggctggttggcttggttctgggtaccatttctgaggtggagaaaagagttgtggaggaaagctcctctgtgcagcagaacagaagctacctgctcaggaagaggctgcgtgggacaagcagcgagagcccagcggcacaggccccggagtgtctgcatccttgcagagtttcagaaagaagcacggagacccagagctcaccagagccccattggagcaccttgacacacagtcactgcagcctccttgttaaccgcgctcttccaggagcagatccccaggaccagcaggcgggccggaggctcagctctggatctgtgcactcggcagcagacagctcatggccaacaactccttctcagaggggttttctgcaaagaaggagcaagttttccaggccagagttcatcctgttggctggagaggccccgatgacactacatctgccgggatcggttgtgaccaaaaaagggaaatcctatttggctctcagggacctctgtgtggtcctgctgaacgggcagcacctggaggtaaaatgtgatgttgaatcaacagtgggagctgtcttcaatgccgtgacatcctttgccaacctcgaggaactcacctactttggcttggcgtatatgaaaagcaaagagttctttttcctggacagtgaaaccagattgtgcaaaatagctcctgaaggctggagagagcagcctcagaagacctccatgaataccttcacactcttcctgaggataaagttctttgtcagccactatgggctgctccagcacagcctgacaaggcaccagttttacctgcagcttcggaaagatatcctggaggagaggctgtactgcaatgaagagatactgctgcagctgggggtccttgccttgcaggctgagtttggcaattaccctaaggagcaggtggagagtaagccatactttcacgttgaagattacatcccagcgagtctgatcgagaggatgaccgctctacgggtccaggttgaagtctcagagatgcaccggctcagctctgcactgtggggagaggatgctgagctgaagttcttgagggtcactcagcagctcccagaatacggtgtgctggttcaccaagtattctcagagaagaggaggccagaagaggagatggccctggggatctgtgccaagggtgtcatagtctatgaagtgaaaaacaacagcagaattgcaatgttacggtttcagtggagagaaaccgggaagatttctacttatcaaaaaaagttcaccatcacaagcagtgtcactgggaagaagcacacatttgtcacagattcagccaagaccagtaaatacttactggacctctgctcagcccagcatgggtttaatgcacagatgggctctgggcagccttcccatgttttatttgaccatgataagtttgtgcaaatggccaatttgagtcctgcacaccaggcccggtctaagcctctcatttggattcagagattgtcatgctcagaaaacgagttgtttgtatccaggcttcagggtgctgcaggaggcctgctgagtacatcaatggataacttcaacgtggacggcagcaaggaggctggagcagaaggcatcgggcgcagcccctgcactggccgggagcagctgaagagtgcctgtgtgatccagaagccaatgacctgggactctctctctggaccacctgttcagagcatgcatgcaggctcaaagaataataggaggaagagctttatagctgaaccgggccgagaaattgtacgtgtgacactgaaacgtgacccacatcgtggttttgggtttgtcattaatgagggagagtattcaggccaagctgaccctggcatttttatatcttctattatacctggaggaccagcagaaaaagcaaaaacgatcaaaccaggagggcagatactagccctgaatcacatcagtctggagggcttcacattcaacatggctgttaggatgatccagaattcccctgacaacatagaattaattatttctcagtcaaaaggtgttggtggaaataacccagatgaagaaaagaatagcacagccaattctggggtctcctctacagacatcctgagcttcgggtaccagggaagtttgttgtcacacacacaagaccaggacagaaatactgaagaactagacatggctggggtgcagagcttagtgcccaggctgagacatcagctttcctttctgccgttaaagggtgctggttcttcttgtcctccatcacctccagaaatcagtgctggtgaaatctactttgtggaactggttaaagaagatgggacacttggattcagtgtaactggtggcattaacaccagtgtgccatatggtggtatctatgtgaaatccattgttcctggaggaccagctgccaaggaagggcagatcctacagggtgaccgactcctgcaggtggatggagtgattctgtgcggcctcacccacaagcaggctgtgcagtgcctgacgggtcctgggcaggttgcaagactggtcttagagagaagagtccccaggagtacacagcagtgtccttctgctaatgacagcatgggagatgaacgcacggctgtttccttggtaacagccttgcctggcaggccttcgagctgtgtctcagtgacagatggtcctaagtttgaagtcaaactaaaaaagaatgccaatggtttgggattcagtttcgtgcagatggagaaagagagctgcagccatctcaaaagtgatcttgtgaggattaagaggctctttccggggcagccagctgaggagaatggggccattgcagctggtgacattatcctggccgtgaatggaaggtccacggaaggcctcatcttccaggaggtgctgcatttactgagaggggccccacaggaagtcacgctcctcctttgccgaccccctccaggtgcgctgcctgagctggagcaggaatggcagacacctgaactctcagctgacaaagaattcaccagggcaacatgtactgactcatgtaccagccccatcctggatcaagaggacagctggagggacagtgcctccccagatgcaggggaaggcctgggtctcaggccagagtcttcccaaaaggccatcagagaggcacaatggggccaaaacagagagagaccttgggccagttccttgacacattctcctgagtcccaccctcatttatgcaaacttcaccaagaaagggatgaatcaacattggcgacctctttggaaaaggatgtgaggcaaaactgctattcagtttgtgatatcatgagacttggaagatattccttctcatctcctctaaccagactttcgacagatattttctgagcaccttctctgcatgtctgcagtgctgtgtaaaatgccctacctttgcatggactattctttctaatcaagaggcgtgtgtggcgaacttggggcagcccctggaagtcttgttctttgaccattacgtctgcggctgcatcaccagataatgagcttcaccactcgtctgcctcctgtgtccttccgcggggagtaaatgtcacttcagcttgccgcatctctaaataggcaaattttcagtgctcagaaaaggacctgatctttgcacaaagtgctttgatggttgcctgcttgagtcactcccaatcccttcctgaagccctttctttataattcttctgttgaaatagccatcatattcacagtactaatcacagcatctcacatttactaaaaacttaccccataccaggaacccagagttgggggggctgtgtcagaattatgtaatttacgtgtcccaataatcctagacgcttcttgaccatctagttttgtcaaatgagaaaactgaggttccaaagaagtcaataaacttgtccaaagtctg

SEQ ID NO: 6827 - protein, 1309 aa, Homo sapiens; identical to SEQ ID NO: 937

SEQ ID NO: 6828 - DNA, 4620 bp, Homo sapiens
gagctcttcctggctctctcacgggtcactggctttgaggacgcaggctgctggggtggcagtgcctgctaacaggccagagactgcgcaggacccagggaatgagagtggtggcaggaaagggaaggggccttgttgactcactcgctgggcagcaagtgcttagtgacaagcagtaaacaaagacagcggcaacagtgctggtggcagggagctccgcggacagacttgcaagagacccctgctccttgttggaaagttgtcccatgatgaaggcctagacctggtcacggagacttttggatgcagcctttaacgaaggacgcaggcatgagcctgtcctctgtgacgctggccagcgccctacaggtcaggggtgaagctctgtctgaggaggaaatctggtccctcctgttcctggccgctgagcagctcctggaagacctccgcaacgattcctcggactatgtggtttgcccctggtcagccctgctttctgcagctggaagcctttctttccaaggccgtgtttctcatatagaggctgctcctttcaaggcccctgaactgctacagggacagagtgaggatgagcagcctgatgcatctcagatgcatgtctattctttaggaatgaccctctactggtcagcagggtttcatgttccgccacatcagcccctgcagctctgcgagcccctgcactccatcctgctgaccatgtgtgaagaccagcctcacaggcggtgcacgttgcagtcggttctggaagcttgtcgggttcatgagaaagaagtgtctgtctacccagcccctgctggtctccacatcagaaggctggttggcttggttctgggtaccatttctgaggtggagaaaagagttgtggaggaaagctcctctgtgcagcagaacagaagctacctgctcaggaagaggctgcgtgggacaagcagcgagagcccagcggcacaggccccggagtgtctgcatccttgcagagtttcagaaagaagcacggagacccagagctcaccagagccccattggagcaccttgacacacagtcactgcagcctccttgttaaccgcgctcttccaggagcagatccccaggaccagcaggcgggccggaggctcagctctggatctgtgcactcggcagcagacagctcatggccaacaactccttctcagaggggttttctgcaaagaaggagcaagttttccaggccagagttcatcctgttggctggagaggccccgatgacactacatctgccgggatcggttgtgaccaaaaaagggaaatcctatttggctctcagggacctctgtgtggtcctgctgaacgggcagcacctggaggtaaaatgtgatgttgaatcaacagtgggagctgtcttcaatgccgtgacatcctttgccaacctcgaggaactcacctactttggcttggcgtatatgaaaagcaaagagttctttttcctggacagtgaaaccagattgtgcaaaatagctcctgaaggctggagagagcagcctcagaagacctccatgaataccttcacactcttcctgaggataaagttctttgtcagccactatgggctgctccagcacagcctgacaaggcaccagttttacctgcagcttcggaaagatatcctggaggagaggctgtactgcaatgaagagatactgctgcagctgggggtccttgccttgcaggctgagtttggcaattaccctaaggagcaggtggagagtaagccatactttcacgttgaagattacatcccagcgagtctgatcgagaggatgaccgctctacgggtccaggttgaagtctcagagatgcaccggctcagctctgcactgtggggagaggatgctgagctgaagttcttgagggtcactcagcagctcccagaatacggtgtgctggttcaccaagtattctcagagaagaggaggccagaagaggagatggccctggggatctgtgccaagggtgtcatagtctatgaagtgaaaaacaacagcagaattgcaatgttacggtttcagtggagagaaaccgggaagatttctacttatcaaaaaaagttcaccatcacaagcagtgtcactgggaagaagcacacatttgtcacagattcagccaagaccagtaaatacttactggacctctgctcagcccagcatgggtttaatgcacagatgggctctgggcagccttcccatgttttatttgaccatgataagtttgtgcaaatggccaatttgagtcctgcacaccaggcccggtctaagcctctcatttggattcagagattgtcatgctcagaaaacgagttgtttgtatccaggcttcagggtgctgcaggaggcctgctgagtacatcaatggataacttcaacgtggacggcagcaaggaggctggagcagaaggcatcgggcgcagcccctgcactggccgggagcagctgaagagtgcctgtgtgatccagaagccaatgacctgggactctctctctggaccacctgttcagagcatgcatgcaggctcaaagaataataggaggaagagctttatagctgaaccgggccgagaaattgtacgtgtgacactgaaacgtgacccacatcgtggttttgggtttgtcattaatgagggagagtattcaggccaagctgaccctggcatttttatatcttctattatacctggaggaccagcagaaaaagcaaaaacgatcaaaccaggagggcagatactagccctgaatcacatcagtctggagggcttcacattcaacatggctgttaggatgatccagaattcccctgacaacatagaattaattatttctcagtcaaaaggtgttggtggaaataacccagatgaagaaaagaatagcacagccaattctggggtctcctctacagacatcctgagcttcgggtaccagggaagtttgttgtcacacacacaagaccaggacagaaatactgaagaactagacatggctggggtgcagagcttagtgcccaggctgagacatcagctttcctttctgccgttaaagggtgctggttcttcttgtcctccatcacctccagaaatcagtgctggtgaaatctactttgtggaactggttaaagaagatgggacacttggattcagtgtaactggtggcattaacaccagtgtgccatatggtggtatctatgtgaaatccattgttcctggaggaccagctgccaaggaagggcagatcctacagggtgaccgactcctgcaggtggatggagtgattctgtgcggcctcacccacaagcaggctgtgcagtgcctgacgggtcctgggcaggttgcaagactggtcttagagagaagagtccccaggagtacacagcagtgtccttctgctaatgacagcatgggagatgaacgcacggctgtttccttggtaacagccttgcctggcaggccttcgagctgtgtctcagtgacagatggtcctaagtttgaagtcaaactaaaaaagaatgccaatggtttgggattcagtttcgtgcagatggagaaagagagctgcagccatctcaaaagtgatcttgtgaggattaagaggctctttccggggcagccagctgaggagaatggggccattgcagctggtgacattatcctggccgtgaatggaaggtccacggaaggcctcatcttccaggaggtgctgcatttactgagaggggccccacaggaagtcacgctcctcctttgccgaccccctccaggtgcgctgcctgagctggagcaggaatggcagacacctgaactctcagctgacaaagaattcaccagggcaacatgtactgactcatgtaccagccccatcctggatcaagaggacagctggagggacagtgcctccccagatgcaggggaaggcctgggtctcaggccagagtcttcccaaaaggccatcagagaggcacaatggggccaaaacagagagagaccttgggccagttccttgacacattctcctgagtcccaccctcatttatgcaaacttcaccaagaaagggatgaatcaacattggcgacctctttggaaaaggatgtgaggcaaaactgctattcagtttgtgatatcatgagacttggaagatattccttctcatctcctctaaccagactttcgacagatattttctgagcaccttctctgcatgtctgcagtgctgtgtaaaatgccctacctttgcatggactattctttctaatcaagaggcgtgtgtggcgaacttggggcagcccctggaagtcttgttctttgaccattacgtctgcggctgcatcaccagataatgagcttcaccactcgtctgcctcctgtgtccttccgcggggagtaaatgtcacttcagcttgccgcatctctaaataggcaaattttcagtgctcagaaaaggacctgatctttgcacaaagtgctttgatggttgcctgcttgagtcactcccaatcccttcctgaagccctttctttataattcttctgttgaaatagccatcatattcacagtactaatcacagcatctca

SEQ ID NO: 6829 - protein, 1309 aa, Homo sapiens; identical to SEQ ID NO: 937

SEQ ID NO: 6830 - DNA, 1692 bp, Homo sapiens
tcagggagcaggggacagagctgggattcggattggcctccagagcagaaaccttcaccccaggccttcctctgggtgctggttcttcttgtcctccatcacctccagaaatcagtgctggtgaaatctactttgtggaactggttaaagaagatgggacacttggattcagtgtaactgtaagagtttttaggagagcttgaaaagcagttaacaagatgtccgtctagaacctggtggccattccacccagatggcaacctctgacagtgtgcttagtttgcacaaatgtaaggggtaaataaaaaagccagtgggggcctgcactgggggatgagttcagagacaaacagaggtactggggaacctcaggatgagcagggcatgcactaggggactccaaactcatgaggaggcagtgtgggcagagttggctgatgtgtcctgactctgaggtcaagctggactgcagagagagagaagcacattggggcttcagggacacaagctaaagggtggcattaacaccagtgtgccatatggtggtatctatgtgaaatccattgttcctggaggaccagctgccaaggaagggcagatcctacagggtgaccgactcctgcaggtggatggagtgattctgtgcggcctcacccacaagcaggctgtgcagtgcctgacgggtcctgggcaggttgcaagactggtcttagagagaagagtccccaggagtacacagcagtgtccttctgctaatgacagcatgggagatgaacgcacggctgtttccttggtaacagccttgcctggcaggccttcgagctgtgtctcagtgacagatggtcctaagtttgaagtcaaactaaaaaagaatgccaatggtttgggattcagtttcgtgcagatggagaaagagagctgcagccatctcaaaagtgatcttgtgaggattaagaggctctttccggggcagccagctgaggagaatggggccattgcagctggtgacattatcctggccgtgaatggaaggtccacggaaggcctcatcttccaggaggtgctgcatttactgagaggggccccacaggaagtcacgctcctcctttgccgaccccctccaggtgcgctgcctgagctggagcaggaatggcagacacctgaactctcagctgacaaagaattcaccagggcaacatgtactgactcatgtaccagccccatcctggatcaagaggacagctggagggacagtgcctccccagatgcaggggaaggcctgggtctcaggccagagtcttcccaaaaggccatcagagaggcacaatggggccaaaacagagagagaccttgggccagttccttgacacattctcctgagtcccaccctcatttatgcaaacttcaccaagaaagggatgaatcaacattggcgacctctttggaaaaggatgtgaggcaaaactgctattcagtttgtgatatcatgagacttggaagagatactgtaaatccaacctgccaaaactaaatgcagttgtcaggagcagagacctggggctcccagctgtgtcatcagggctaatggagacctcaatatggggcctgatgttggagaactggagacatgaagggacacaaaccccaaactttgttgtgagtttaaccgtaagtaaataggacaattataat

SEQ ID NO: 6831 - protein, 255 aa, Homo sapiens
MGDERTAVSLVTALPGRPSSCVSVTDGPKFEVKLKKNANGLGFSFVQMEKESCSHLKSDLVRIKRLFPGQPAEENGAIAAGDIILAVNGRSTEGLIFQEVLHLLRGAPQEVTLLLCRPPPGALPELEQEWQTPELSADKEFTRATCTDSCTSPILDQEDSWRDSASPDAGEGLGLRPESSQKAIREAQWGQNRERPWASSLTHSPESHPHLCKLHQERDESTLATSLEKDVRQNCYSVCDIMRLGRDTVNPTCQN

SEQ ID NO: 6832 - DNA, 561 bp, Homo sapiens
aatgaaaaatgcacatatcctttggcccatcaaagcacacaagacgtgccaggcacaagccttcaggcccacagccatatccacctacgctggtcactacctatatagagatagtggtgcatcccacgtgagcagttgctgagcacccgccttgtaccagtgcttgggctggggacatgcccagatctctcacatagttgctattgttaagcttatgaacacctaatcttattgctcagtggagaatacaatctaaacgaacaggtgaatacagaagacagtgccagtcggaggtaaggtcatgggatagagtggtgggcaggtggggattcccttagctggggaggttggggaggcttcctggaggaggaaagatgggtggtgagttttttgttgtgtttttcagggtggcattaacaccagtgtgccatatggtggtatctatgtgaaatccattgttcctggaggaccagctgccaaggaagggcagatcctacagggtgaccgactcctgcaggtggatggagtgattctgtgcggcctcacccacaagcaggctgt

SEQ ID NO: 6833 - protein, 46 aa, Homo sapiens
MKNAHILWPIKAHKTCQAQAFRPTAISTYAGHYLYRDSGASHVSSC

SEQ ID NO: 6834 - DNA, 4124 bp, Homo sapiens
agtaaacaaagacagcggcaacagtgctggtggcagggagctccgcggacagacttgcaagagacccctgctccttgttggaaagttgtcccatgatgaaggcctagacctggtcacggagacttttggatgcagcctttaacgaaggacgcaggcatgagcctgtcctctgtgacgctggccagcgccctacaggtcaggggtgaagctctgtctgaggaggaaatctggtccctcctgttcctggccgctgagcagctcctggaagacctccgcaacgattcctcggactatgtggtttgcccctggtcagccctgctttctgcagctggaagcctttctttccaaggccgtgtttctcatatagaggctgctcctttcaaggcccctgaactgctacagggacagagtgaggatgagcagcctgatgcatctcagatgcatgtctattctttaggaatgaccctctactggtcagcagggtttcatgttccgccacatcagcccctgcagctctgcgagcccctgcactccatcctgctgaccatgtgtgaagaccagcctcacaggcggtgcacgttgcagtcggttctggaagcttgtcgggttcatgagaaagaagtgtctgtctacccagcccctgctggtctccacatcagaaggctggttggcttggttctgggtaccatttctgaggtggagaaaagagttgtggaggaaagctcctctgtgcagcagaacagaagctacctgctcaggaagaggctgcgtgggacaagcagcgagagcccagcggcacaggccccggagtgtctgcatccttgcagagtttcagaaagaagcacggagacccagagctcaccagagccccattggagcaccttgacacacagtcactgcagcctccttgttaaccgcgctcttccaggagcagatccccaggaccagcaggcgggccggaggctcagctctggatctgtgcactcggcagcagacagctcatggccaacaactccttctcagaggggttttctgcaaagaaggagcaagttttccaggccagagttcatcctgttggctggagaggccccgatgacactacatctgccgggatcggttgtgaccaaaaaagggaaatcctatttggctctcagggacctctgtgtggtcctgctgaacgggcagcacctggaggtaaaatgtgatgttgaatcaacagtgggagctgtcttcaatgccgtgacatcctttgccaacctcgaggaactcacctactttggcttggcgtatatgaaaagtggagagtaagccatactttcacgttgaagattacatcccagcgagtctgatcgagaggatgaccgctctacgggtccaggttgaagtctcagagatgcaccggctcagctctgcactgtggggagaggatgctgagctgaagttcttgagggtcactcagcagctcccagaatacggtgtgctggttcaccaagtattctcagagaagaggaggccagaagaggagatggccctggggatctgtgccaagggtgtcatagtctatgaagtgaaaaacaacagcagaattgcaatgttacggtttcagtggagagaaaccgggaagatttctacttatcaaaaaaagttcaccatcacaagcagtgtcactgggaagaagcacacatttgtcacagattcagccaagaccagtaaatacttactggacctctgctcagcccagcatgggtttaatgcacagatgggctctgggcagccttcccatgttttatttgaccatgataagtttgtgcaaatggccaatttgagtcctgcacaccaggcccggtctaagcctctcatttggattcagagattgtcatgctcagaaaacgagttgtttgtatccaggcttcagggtgctgcaggaggcctgctgagtacatcaatggataacttcaacgtggacggcagcaaggaggctggagcagaaggcatcgggcgcagcccctgcactggccgggagcagctgaagagtgcctgtgtgatccagaagccaatgacctgggactctctctctggaccacctgttcagagcatgcatgcaggctcaaagaataataggaggaagagctttatagctgaaccgggccgagaaattgtacgtgtgacactgaaacgtgacccacatcgtggttttgggtttgtcattaatgagggagagtattcaggccaagctgaccctggcatttttatatcttctattatacctggaggaccagcagaaaaagcaaaaacgatcaaaccaggagggcagatactagccctgaatcacatcagtctggagggcttcacattcaacatggctgttaggatgatccagaattcccctgacaacatagaattaattatttctcagtcaaaaggtgttggtggaaataacccagatgaagaaaagaatagcacagccaattctggggtctcctctacagacatcctgagcttcgggtaccagggaagtttgttgtcacacacacaagaccaggacagaaatactgaagaactagacatggctggggtgcagagcttagtgcccaggctgagacatcagctttcctttctgccgttaaagggtgctggttcttcttgtcctccatcacctccagaaatcagtgctggtgaaatctactttgtggaactggttaaagaagatgggacacttggattcagtgtaactgtaagagtttttaggagagcttgaaaagcagttaacaagatgtccgtctagaacctggtggccattccacccagatggcaacctctgacagtgtgcttagtttgcacaaatgtaaggggtaaataaaaaagccagtgggggcctgcactgggggatgagttcagagacaaacagaggtactggggaacctcaggatgagcagggcatgcactaggggactccaaactcatgaggaggcagtgtgggcagagttggctgatgtgtcctgactctgaggtcaagctggactgcagagagagagaagcacattggggcttcagggacacaagctaaaggtaagaagggcagtccactgtcatctggccaaggatgggtggggcagtccactgtcatccagcatagaatcagtgtggagcctcttgctcagacatcccagggccaggcctccatcaggactgacactttccatttggtttctgagctctgcctggtagacccttgtgaaaggagattacccatataactgtgtttacccaaggggttggggaatggcacacacaaagctggtgaaaatccagaggtcagaggttggaaggtgctgcttttattactgagtattgaaagtgatccattacaggctgggctcggtggctcatgactgtaatcccagaactttgggaggccgaggcgggtggatcgcaaggtcaggagattgagactatcctggctaacatggtgaaaccccatctctactaaaaaataaaaaaaaaaattagctggatgtgatagcgggcacctgtagtcccagctactcgggaggctgaggcaggagaatggcgtgaacctgggagggggagtttgcagtgagccgagatcacaacactgcactccagcctgggcgacagagtgagactctgtctcaaaaaaaaaaaaaaaaaagtgatccattaccttcagaccctggaatgggtctggatttcaggaatgtcattgttggatttaactgttgatgggaaatagaatgacatctcccaccaaagtaaggacactctatggctgatgaaaattttcagaggaaattcaagagatatgtgaatggagggcattctttgctttcccctgtgataatgctatgtacctagagcaagaatatgtgttttcttggaccctaagcctgcaatgaatttgtcatcagtagatgattttaagggaccaagtaagaaaccaagcaataaggctcatgaatccacatggagtgaacaggctgataccaaatatggtccatttattcttggcttggggtaacagccttatcagacaccaaacatagctatttttcatctgaaaaactgactaaattttgggttattcacaaatatatatttgctga

SEQ ID NO: 6835 - protein, 466 aa, Homo sapiens
MTALRVQVEVSEMHRLSSALWGEDAELKFLRVTQQLPEYGVLVHQVFSEKRRPEEEMALGICAKGVIVYEVKNNSRIAMLRFQWRETGKISTYQKKFTITSSVTGKKHTFVTDSAKTSKYLLDLCSAQHGFNAQMGSGQPSHVLFDHDKFVQMANLSPAHQARSKPLIWIQRLSCSENELFVSRLQGAAGGLLSTSMDNFNVDGSKEAGAEGIGRSPCTGREQLKSACVIQKPMTWDSLSGPPVQSMHAGSKNNRRKSFIAEPGREIVRVTLKRDPHRGFGFVINEGEYSGQADPGIFISSIIPGGPAEKAKTIKPGGQILALNHISLEGFTFNMAVRMIQNSPDNIELIISQSKGVGGNNPDEEKNSTANSGVSSTDILSFGYQGSLLSHTQDQDRNTEELDMAGVQSLVPRLRHQLSFLPLKGAGSSCPPSPPEISAGEIYFVELVKEDGTLGFSVTVRVFRRA

SEQ ID NO: 6836 - DNA, 531 bp, Homo sapiens
agttgtgcgtcagtggagggttgtggatgatcagtgtattaaagtctgtgtttgcttccttcagcaaaaaaagttcaccatcacaagcagtgtcactgggaagaagcacacatttgtcacagattcagccaagaccagtaaatacttactggacctctgctcagcccagcatgggtttaatgcacagatgggctctgggcagccttcccatgttttatttgaccatgataagtttgtgcaaatggccaatttgagtcctgcacaccaggcccggtctaagcctctcatttggattcagagattgtcatgctcagaaaacgagttgtttgtatccaggcttcagggtgctgcaggaggcctgctgagtacatcaatggataacttcaacgtggacggcagcaaggaggctggagcagaaggcatcgggcgcagcccctgcactggccgggagcagctgaagagtgcctgtgtgatccagaagccaatgacctgggactctctctctggaccacctgttcagagcatgcatgc

SEQ ID NO: 6837 - protein, 113 aa, Homo sapiens
MGSGQPSHVLFDHDKFVQMANLSPAHQARSKPLIWIQRLSCSENELFVSRLQGAAGGLLSTSMDNFNVDGSKEAGAEGIGRSPCTGREQLKSACVIQKPMTWDSLSGPPVQSM

SEQ ID NO: 6838 - DNA, 6395 bp, Homo sapiens
gtcacagcgccgggcggcggcggggagatgcggctgctggcactggcggcggccgcgctgctggcgcgggctccggctccggaggtctgtgcggccctcaatgtcactgtgtccccggggcccgtggttgactacctggagggggagaatgccactctcctctgccacgtctcccagaaaaggcggaaggacagcttgctggccgtgcgctggttctttgcacactccttcgactcccaggaggccttgatggtgaagatgaccaagctccgggtggtgcagtactatgggaatttcagccgcagcgccaaacggcggaggctgcgcctgctggaggagcagcggggggcgctctacaggctctccgtcttgacactgcagccctccgatcaagggcattacgtctgcagagtccaggaaatcagcaggcacaggaacaagtggacggcctggtccaatggctcctcagccacggaaatgagagtcatttccctcaaagcttctgaagagtcatcctttgagaaaacaaaagagacttgggcattttttgaagatctctatgtgtatgctgtcctcgtgtgctgcgtggggatcctcagcattctgctcttcatgctggtcatcgtctggcagtctgtgtttaacaagcggaaatccagagtgagacattatttggtgaaatgccctcagaacagctcaggggagactgtcactagcgtgaccagcttggccccactacagcccaagaagggcaagaggcagaaggagaagcctgacattcctcccgcagtccctgccaaagctccgatagcccccacgttccataaaccgaagctgctgaaaccacagagaaaagtcacgctgccaaagattgctgaggaaaacttaacctatgccgaactggagctgatcaaaccccaccgggctgccaaaggcgcccccaccagcactgtctacgcccagatcctcttcgaggagaacaagctgtagtacagcgtccacctccaaggttctatttaatacctgccacccagtgatttatgaagccttggagacaaagcccttatgtctgtattttcactcatgccttctgagtggtggggagccccttttcagcagcattctgggtgcctttgaagaggtacaagcctgctctccccaaaagaatcggggccacagctcttgacagatctcccgggacaagatgcgcctgggtttgagccctgagcgtaaggattctgatcctgagagcagccaaggagattttctgctgagccaaaccccttcacatttttctcctctttccccaggttttctttaaaatcgtttttaaatcttaattttactctctactcttcctgtatccacgatacaagctcacagtatatagctagaggaaatgccattatggacccaactgtaagatggcacatatgttggttttccaaggatcagatggcattgccagggccacagccaactgctgattgccagcaccacctgagatggcatctcttgttttaaatagatgcactaaccctgaagattaaggccagaggggcagactgactagagaagtataaggtctgtctctgaatgccatggtgcccacctatgagaccctgaggccgcaggacaagaagaacaccattctagagggcttccagccctttcacaaggtggacctgtactgatagagaaacacactctctaagaagtgcttactcacccttttccaaaggagcacaggtgttggccatcagaagacacactggagcgcatgggcctcttcactgtgtgccaagctcagtcacctctgattcagcccctgaaggtgtctgctgccaggtgccctcagggtaggagagtgggaagtacacgccaagctggaaagtgtgttctgaagaccctcctcttgccaagtgccttgcccattgcaaccttgtgtgtgaattctaatgggtttgaatgggggtcagggtgcatggggaagttgctctgtggacctttgggacacaggaatcttggacttactggcaggggatccattctgaaagcaccatcctgtcaactgtgttattgaggacatttcttgatgtgagtatagtctgggtggctatttactgcccactatagaaattgtttgactatgtagtggaccatgtatatatgataaattatctattttaaacacagctggggtatgagttgtgccctctatatagctgtgtgaacttggctaaatttcttatcccctaatgacctcagactccatgtttgtgtaaagacgacttaacttcccatagaattcttgagggtaaaatgggataatgaatcttgccagttctagaaactgtaaattgctacacaaatgctctgtgttgacattcatgctaaagccagtctgcattttcaaaatgaaaatttcttcactatttaaggctttcattgcaataactttaaaaaccaaatatttgtccaccaacttagccctacagtaatgttcccaaagactcatgagagtttatggtttattggaaagggtccaaattggaagcagatattgattttctgggagcaaactggtctgcctttacaaagtggaagttcaccctctctggataacacctgtgtctcattcctccctctctgccagatctcgaaggcactgaataaaccatgcagcttttgaggaagaaagaaccatttggaagaactcactagaacttctttgagcatctctttgggaggggaggatatatggttagcacaccatttatataataattatcacagggatttttaattttatcatggcagtgttctgacagatgtatagtgttttgagggcagaggatgatctcctaatttgcccaaagagccttatgggtttgtggggctctgggggtgccaaatgggaaggagagggggcacatgaaaaggaaatggcgggaagagggcaacaggccagggggtaatatcttcccaggccccttaggcctctacagaacggaaatgaacttcattcacccccaaacccacccacttaaatccaaagagagcttagggttattatgcatggacaggaacacattctaccaagaacacatgctcttaagagctagtagctcccagttagagtcaaaccagtcattgttatattatagattgaatccagcctctttctcccaaactgtggtcatcactgcatgaatccacactaaggtgtgtgaatgggaacctgcagattatctcctcctactgaaaatgctgcccaggggaatcttggaagctatggacagcatccaggcagagctggtcccactgttatctccagaagcaaatgcccaagctgtgctcagaactggaagcaatggatgacttgtatcaggtgcttgtttgagaggatatattgacattattgccatagtaagcttaaaaaaatgtgcccactcattcattctttgtccatggaccactaatcatgcattgtcatttccaaagataaggggaaacatatcacatatcattgaaatagaaattagggaaagtttgtcaatttgttttcactataaggcatcaatggcagaaactacatatgagtaattttcaaaatagaccattgcttaaatgtttaaatgaagctaaaagaagtatgaacccattggttagagtgcagtggcttctttcaggcagacagcagatgctctcagatttggtggtgagttttggccttggcatggttggcatggagtcagcacaggaagccgggaggtatgaaggggcatccacctgggtgaaactgtcttgccaagccaaagccccgaggcctgccctgaagcagctgtagtggaggagaggcctgggattccttagagtcacctttttacgaatgtaccgccactctgttagctcacagggaaaataaggaaaagccaggcctcccacctcttgactcttgtgagagtgaagacaacatggggcatttagaaaatatatttttagtgtatgataatgtgggctggcccacacagcaatgagcccaaagaccccctcgctttgggaattattcatggccctgctcatcacagcctctgatatgcatgactgtaacctaggctgagccaagaatggagctcatgccagaaatggtcctaagcatgcacatggccccctggaatatcaaaatcctggggagaaagaaatcatctttgccttgggcagtgaagctggaatggcacatatctatctgttgccacatctcctgcctagtggagaagccttggaaggcaacagacactgagcaagcagcagggaggagaatgtcctggaagggcaggactctacccaagtccctaacatccccagactcttctcttccataaactctctaattactctgctgtttaaatcctggttttggtcaagccagtcaggttgcataaagaatatgaatacagtatgcatcaaagttgcttcccagaacaggaagcaaaacaaacaaacaaacaaacaaacaaaatactgatatcagtacccagggtgcccaattaggtcacacccagtggctgcattgcagcccctgagctcctgctgcaccgtgtgtcctgctgcccgagtgggccccaccctgggttctgaagatgcccttcttaatggagagctcccgatggagggctccaggactgatgctctccctaaggaagggaggcctcagatttggagagggacaccaacaggaccagaggaggactgaggggcactggcaccaataagtggaagggaacagcgtggtaacaaaaaagagccatgccacttgcatgctggagggagtctttttgtgtcagcctaaagcttaggctggtgtccatgtggaacatgacatctttccagtatccctgatccaggaaactgcagtgagacccaggtgacccagctctgtgtcatttggagcccattaaaaagtgaggcagccacatggcggggacattgaccccactccagaccacactcccatctccatacataggatagaaactgttcatcaggaaggaaaaccaaacagaaattcgtggtctaggggaggggtctgcattcagcatggccatgctgggctggagtggctgtggggtgtccagatagatgggcatgtagactagtgctttctcaacctttaatgcatgcacaaatcatcgagatcttgttaaaatgtagatcctgggtgggcacggtggctcacgcctgtaatcccagcactttgggaggctgaggcgggcggatcatgaggtcaggagatcgagaccatcctggctaacacggtgaaaccctgtctctactaaaaatacaaaaaattagccaggcatggtggtgggtgcctgtagtcccagctactcgggaggctgaggcaggagaatggcatgaacccgggaggcggagcttgcagtgagccgagatcgtgctgctgcactccagcctgggcaatagagtgagattccgtctcaaaaaaaaaaaaaaaaaaaatgtagatcctggctcaggaggtctgggataggacctgggattctgagtttctaacaagctcccagggatgtccatgcttctggtccctgaaccacactttgagtgacaaggatgtaaactgttggaaacatggatctggtgctcattgcgggaaagggggtgtcctcagggcataggtcacagccaaagccctgacagcgggcaagagtcccagggagaggctgcctgcacattgaggaggggaagggctgggcctgagcagtggggagcatccatgctggcaggtatgcagcaggcaaggagatccaggtggagatcagaggacagtgacagtcacagcagcaggggagagccaggagaaagctgctcctaggggtgtctcaaaggaagaagggatctgcagtgtgaactctgcagagggcagggagaatagaggttaagcctttgctcattctgaattaattgattactgctttttaaaagtgctttctttctctgggaaaaaaaaaacattccccagtgcctaaggctaacagacgtgggcgctgagctgtgtctggtctgctgagtgtattttccccagagcaatcctcatcttctcagggggtggggatttggacaagactcttcctgaacacgcagcgtggtggggaagggtggccatggaggttttctgttccttctgttgtcactggtgaaagacgacttggtgcccaatttctaataaacacaatgctattagcgtcactccaatttagtgtctgattgttaaatgttaatgtactgcactctacagttttaaatataattagagatgtttacagctttggttaaatgcaccttgttcttccacattaaactttattacaagcgtc

SEQ ID NO: 6839 - protein, 320 aa, Homo sapiens
MRLLALAAAALLARAPAPEVCAALNVTVSPGPVVDYLEGENATLLCHVSQKRRKDSLLAVRWFFAHSFDSQEALMVKMTKLRVVQYYGNFSRSAKRRRLRLLEEQRGALYRLSVLTLQPSDQGHYVCRVQEISRHRNKWTAWSNGSSATEMRVISLKASEESSFEKTKETWAFFEDLYVYAVLVCCVGILSILLFMLVIVWQSVFNKRKSRVRHYLVKCPQNSSGETVTSVTSLAPLQPKKGKRQKEKPDIPPAVPAKAPIAPTFHKPKLLKPQRKVTLPKIAEENLTYAELELIKPHRAAKGAPTSTVYAQILFEENKL

SEQ ID NO: 6840 - DNA, 6271 bp, Homo sapiens
gtcacagcgccgggcggcggcggggagatgcggctgctggcactggcggcggccgcgctgctggcgcgggctccggctccggaggtctgtgcggccctcaatgtcactgtgtccccggggcccgtggttgactacctggagggggagaatgccactctcctctgccacgtctcccagaaaaggcggaaggacagcttgctggccgtgcgctggttctttgcacactccttcgactcccaggaggccttgatggtgaagatgaccaagctccgggtggtgcagtactatgggaatttcagccgcagcgccaaacggcggaggctgcgcctgctggaggagcagcggggggcgctctacaggctctccgtcttgacactgcagccctccgatcaagggcattacgtctgcagagtccaggaaatcagcaggcacaggaacaagtggacggcctggtccaatggctcctcagccacggaaatgagagtcatttccctcaaagcttctgaagagtcatcctttgagaaaacaaaagagacttgggcattttttgaagatctctatgtgtatgctgtcctcgtgtgctgcgtggggatcctcagcattctgctcttcatgctggtcatcgtctggcagtctgtgtttaacaagcggaaatccagagtgagacattatttggtgaaatgccctcagaacagctcaggggagactgtcactagcgtgaccagcttggccccactacagcccaagaagggcaagaggcagaaggagaagcctgacattcctcccgcagtccctgccaaagctccgatagcccccacgttccataaaccgaagctgctgaaaccacagagaaaagtcacgctgccaaagattgctgaggaaaacttaacctatgccgaactggagctgatcaaaccccaccgggctgccaaaggcgcccccaccagcactgtctacgcccagatcctcttcgaggagaacaagctgtagtacagcgtccacctccaaggttctatttaatacctgccacccagtgatttatgaagccttggagacaaagcccttatgtctgtattttcactcatgccttctgagtggtggggagccccttttcagcagcattctgggtgcctttgaagaggtacaagcctgctctccccaaaagaatcggggccacagctcttgacagatctcccgggacaagatgcgcctgggtttgagccctgagcgtaaggattctgatcctgagagcagccaaggagattttctgctgagccaaaccccttcacatttttctcctctttccccaggttttctttaaaatcgtttttaaatcttaattttactctctactcttcctgtatccacgatacaagctcacagtatatagctagaggaaatgccattatggacccaactgtaagatggcacatatgttggttttccaaggatcagatggcattgccagggccacagccaactgctgattgccagcaccacctgagatggcatctcttgttttaaatagatgcactaaccctgaagattaaggccagaggggcagactgactagagaagtataaggtctgtctctgaatgccatggtgcccacctatgagaccctgaggccgcaggacaagaagaacaccattctagagggcttccagccctttcacaaggtggacctgtactgatagagaaacacactctctaagaagtgcttactcacccttttccaaaggagcacaggtgttggccatcagaagacacactggagcgcatgggcctcttcactgtgtgccaagctcagtcacctctgattcagcccctgaaggtgtctgctgccaggtgccctcagggtaggagagtgggaagtacacgccaagctggaaagtgtgttctgaagaccctcctcttgccaagtgccttgcccattgcaaccttgtgtgtgaattctaatgggtttgaatgggggtcagggtgcatggggaagttgctctgtggacctttgggacacaggaatcttggacttactggcaggggatccattctgaaagcaccatcctgtcaactgtgttattgaggacatttcttgatgtgagtatagtctgggtggctatttactgcccactatagaaattgtttgactatgtagtggaccatgtatatatgataaattatctattttaaacacagctggggtatgagttgtgccctctatatagctgtgtgaacttggctaaatttcttatcccctaatgacctcagactccatgtttgtgtaaagacgacttaacttcccatagaattcttgagggtaaaatgggataatgaatcttgccagttctagaaactgtaaattgctacacaaatgctctgtgttgacattcatgctaaagccagtctgcattttcaaaatgaaaatttcttcactatttaaggctttcattgcaataactttaaaaaccaaatatttgtccaccaacttagccctacagtaatgttcccaaagactcatgagagtttatggtttattggaaagggtccaaattggaagcagatattgattttctgggagcaaactggtctgcctttacaaagtggaagttcaccctctctggataacacctgtgtctcattcctccctctctgccagatctcgaaggcactgaataaaccatgcagcttttgaggaagaaagaaccatttggaagaactcactagaacttctttgagcatctctttgggaggggaggatatatggttagcacaccatttatataataattatcacagggatttttaattttatcatggcagtgttctgacagatgtatagtgttttgagggcagaggatgatctcctaatttgcccaaagagccttatgggtttgtggggctctgggggtgccaaatgggaaggagagggggcacatgaaaaggaaatggcgggaagagggcaacaggccagggggtaatatcttcccaggccccttaggcctctacagaacggaaatgaacttcattcacccccaaacccacccacttaaatccaaagagagcttagggttattatgcatggacaggaacacattctaccaagaacacatgctcttaagagctagtagctcccagttagagtcaaaccagtcattgttatattatagattgaatccagcctctttctcccaaactgtggtcatcactgcatgaatccacactaaggtgtgtgaatgggaacctgcagattatctcctcctactgaaaatgctgcccaggggaatcttggaagctatggacagcatccaggcagagctggtcccactgttatctccagaagcaaatgcccaagctgtgctcagaactggaagcaatggatgacttgtatcaggtgcttgtttgagaggatatattgacattattgccatagtaagcttaaaaaaatgtgcccactcattcattctttgtccatggaccactaatcatgcattgtcatttccaaagataaggggaaacatatcacatatcattgaaatagaaattagggaaagtttgtcaatttgttttcactataaggcatcaatggcagaaactacatatgagtaattttcaaaatagaccattgcttaaatgtttaaatgaagctaaaagaagtatgaacccattggttagagtgcagtggcttctttcaggcagacagcagatgctctcagatttggtggtgagttttggccttggcatggttggcatggagtcagcacaggaagccgggaggtatgaaggggcatccacctgggtgaaactgtcttgccaagccaaagccccgaggcctgccctgaagcagctgtagtggaggagaggcctgggattccttagagtcacctttttacgaatgtaccgccactctgttagctcacagggaaaataaggaaaagccaggcctcccacctcttgactcttgtgagagtgaagacaacatggggcatttagaaaatatatttttagtgtatgataatgtgggctggcccacacagcaatgagcccaaagaccccctcgctttgggaattattcatggccctgctcatcacagcctctgatatgcatgactgtaacctaggctgagccaagaatggagctcatgccagaaatggtcctaagcatgcacatggccccctggaatatcaaaatcctggggagaaagaaatcatctttgccttgggcagtgaagctggaatggcacatatctatctgttgccacatctcctgcctagtggagaagccttggaaggcaacagacactgagcaagcagcagggaggagaatgtcctggaagggcaggactctacccaagtccctaacatccccagactcttctcttccataaactctctaattactctgctgtttaaatcctggttttggtcaagccagtcaggttgcataaagaatatgaatacagtatgcatcaaagttgcttcccagaacaggaagcaaaacaaacaaacaaacaaacaaacaaaatactgatatcagtacccagggtgcccaattaggtcacacccagtggctgcattgcagcccctgagctcctgctgcaccgtgtgtcctgctgcccgagtgggccccaccctgggttctgaagatgcccttcttaatggagagctcccgatggagggctccaggactgatgctctccctaaggaagggaggcctcagatttggagagggacaccaacaggaccagaggaggactgaggggcactggcaccaataagtggaagggaacagcgtggtaacaaaaaagagccatgccacttgcatgctggagggagtctttttgtgtcagcctaaagcttaggctggtgtccatgtggaacatgacatctttccagtatccctgatccaggaaactgcagtgagacccaggtgacccagctctgtgtcatttggagcccattaaaaagtgaggcagccacatggcggggacattgaccccactccagaccacactcccatctccatacataggatagaaactgttcatcaggaaggaaaaccaaacagaaattcgtggtctaggggaggggtctgcattcagcatggccatgctgggctggagtggctgtggggtgtccagatagatgggcatgtagactagtgctttctcaacctttaatgcatgcacaaatcatcgagatcttgttaaaatgtagatcctgggtgggcacggtggctcacgcctgtaatcccagcactttgggaggctgaggcgggcggatcatgaggtcaggagatcgagaccatcctggctaacacggtgaaaccctgtctctactaaaaatacaaaaaattagccaggcatggtggtgggtgcctgtagtcccagctactcgggaggctgaggcaggagaatggcatgaacccgggaggcggagcttgcagtgagccgagatcgtgctgctgcactccagcctgggcaatagagtgagattccgtctcaaaaaaaaaaaaaaaaaaaatgtagatcctggctcaggaggtctgggataggacctgggattctgagtttctaacaagctcccagggatgtccatgcttctggtccctgaaccacactttgagtgacaaggatgtaaactgttggaaacatggatctggtgctcattgcgggaaagggggtgtcctcagggcataggtcacagccaaagccctgacagcgggcaagagtcccagggagaggctgcctgcacattgaggaggggaagggctgggcctgagcagtggggagcatccatgctggcaggtatgcagcaggcaaggagatccaggtggagatcagaggacagtgacagtcacagcagcaggggagagccaggagaaagctgctcctaggggtgtctcaaaggaagaagggatctgcagtgtgaactctgcagagggcagggagaatagaggttaagcctttgctcattctgaattaattgattactgctttttaaaagtgctttctttctctgggaaaaaaaaaacattccccagtgcctaaggctaacagacgtgggcgctgagctgtgtctggtctgctgagtgtattttccccagagcaatcctcatcttctcagggggtggggatttggacaagactcttcctgaacacgcagcgtggtggggaagggtggccatggaggttttctgttccttctgttgtcactggtgaaagacgacttggtgcccaatttctaataaacacaatgctattagcgtcactcc

SEQ ID NO: 6841 - protein, 320 aa, Homo sapiens; identical to SEQ ID NO: 6839

SEQ ID NO: 6842 - DNA, 2170 bp, Homo sapiens; identical to SEQ ID NO: 942

SEQ ID NO: 6843 - protein, 191 aa, Homo sapiens; identical to SEQ ID NO: 943

SEQ ID NO: 6844 - DNA, 2000 bp, Homo sapiens
aaagcattacatgttattcttaacacctgccacttctctcttcccacctctatctgccttattgaacttcatctttccttcattctcttcaacttccacttcttcttgtatggtcctgttgatgccatcttgtttccgtccccagactcatcatctttaccctctgtcaactgagttcccaccctggttctctctcaagatcttcctctcatagctttcacccttggtaaacaatgaggacacatctcaaaaagaatgatgtaatttaattgccttgagttggctgggccatcatctattataaagtgctcttaaaattaaagctaatttaattctgaagaactaaggattaagaagttaagagctggggttcttacaatatggcttgcagactacaagtgtgaactgaggaggtccccaaagtcacttcttactaaggactctgggagttgcctcttccttctccatttgcacaaaccacgcttcagcctcaatcagcctgataaaatgttcacctgccatctctctgctctgcaacacgctggcacttcactcatttcctccaacaagcttcttaccacttccctctgtggctaatctcttcccacccttggtcagtctcatcaactctattcctttgaatcccaaatactaaacagttcagataggtgatggattgaaaataatcccaatattccacaagcaacatcaacatcccccacacacccagcaccgaggaataccctcctctctagaatgtgaggccactgtgtggaggaagacaccacggtgctctactgagccatgaaagtcacgcctgacctaaacagaagactacgtcccctggctaaaagaggaaatagttgaaagcggtgtaaatggctcttatctgaaccacaatgaattcacatattcaagttggcttcttcggaaatttcaggccacaaatggcagtgatgcgaccaggagcagtaacacgattacaagtcgcaatttaggaagggtgctccatcatcatttcatgattctcactacagcccagacaggtgggcagagcagtgttctttcccctttaatgaatgaagaagctgagcctcaaacagatgagggggcttcctgggttcacagagctctaaagggctgagctgtagatccacggccaccatgatgagctaagagtttctggattcagtgcctgctgttgctcctggagatttgtatcctgattgaaggctggttccatatctgttcacccagtgccacttccatccggacagaaggaacccaggtcaaggctgacaggaggagcaggagccgtcaatgagagcagacctcagaagccaacggaggtgagaagagcaccatccacagccccatcctctgaatgctgtgggaagaagtccacaaaataccaccccttggagtcagtcagtagtagagcccttgctgctggctgcaaataccccatcagaacatgtttggggtgattcttggacctggtttcaatttcttttctgccagtcagcagttgtgcttgactcacaatttgttgccatctcttgaattaaactcaggaaacaggataaagatcagaaccacattgtaaaagcttccttatggttcattttttgctgagataaataatgagcagctctgatccatgtctctggagagctcagagcacactaccaggagctcctagccacagggtgagcacaggtggctggtgttctcttgatgaggaaagacagcagtgtccaatctaccctgccttacacggagccccaggtgctctcccggactgtgttgctacctaaagcacatggcaattgcatgatgctaaccagagcagcccctcactcattagaaacatctgctttgcattatttacacaggcaaagttttcctttttactgagcctacccagttcaaacttaagtgggatttgccagctatctggctaattttatgagcaataataaagattggtgaacacttgg

SEQ ID NO: 6845 - protein, 40 aa, Homo sapiens
MILTTAQTGGQSSVLSPLMNEEAEPQTDEGASWVHRALKG

SEQ ID NO: 6846 - DNA, 690 bp, Homo sapiens
acttctctcttcccacctctatctgccttattgaacttcatctttccttcattctcttcaacttccacttcttcttgtatggtcctgttgatgccatcttgtttccgtccccagactcatcatctttaccctctgtcaactgagttcccaccctggttctctctcaagatcttcctctcatagctttcacccttggtaaacaatgaggacacatctcaaaaagaatgatgtaatttaattgccttgagttggctgggccatcatctattataaagtgctcttaaaattaaagctaatttaattctgaagaactaaggattaagaagttaagagctggggttcttacaatatggcttgcagactacaagtgtgaactgaggaggtccccaaagtcacttcttactaagttcagataggtgatggattgaaaataatcccaatattccacaagcaacatcaacatcccccacacacccagcaccgaggaataccctcctctctagaatgtgaggccactgtgtggaggaagacaccacggtgctctactgagccatgaaagtcacgcctgacctaaacagaagactacgtcccctggctaaaagaggaaatagttgaaagcggtgtaaatggctcttatctgaaccacaatgaattcacatattcaagttggcttcttcggaaatttcaggc

SEQ ID NO: 6847 - protein, 34 aa, Homo sapiens
MVLLMPSCFRPQTHHLYPLSTEFPPWFSLKIFLS

SEQ ID NO: 6848 - DNA, 1421 bp, Homo sapiens
atggggagctcagtgtccactctggctggggccagctggaggccttcagtacagccccagccaactctcactgaacagctggagcaccgacaccctgggcactcatttcaaatcatgaaatgctacttcacagatcacaggggagaacagtcacccaccgatgggaccaccctcagcttgaccagccctgagtccactgaggagagtgtggaagtgttctggccagggactatacagagagaagggtcgtccccacggccggggcctgccattccccgggaggagggcctctacttcgctgccagggaccgggggatgcgggactggagcagctccccatcctcagagtcctccgagtaccagtcctactcccagtaccagtcgtgctgctcctgcatgtgcgatgaggacaatgctgctccgcagagtgtgtgtgccttctacacgcacgtgcagactgtgcggggtgtggctgtggcctgggagacggaggccggcttcgagccggtcaccaggaagccccgcatccatgaagcccagttcatcaagaggcagaggtggaacggctcctccttcgaaatggcttccaacaccgatatgcgctgggacctggaagcctgcaagagcaactgcagccccgagcccgaggacatagacctgctggagtgctgcctgcaggagctgcgggagccgccggactggctggtcaccaccaactacggggtgcgctgcgtggcctgctgcagggtcttgccctccctggacgctctgctggagcacgcccagcatggcatccgggagggcttcagctgtcagatcttttttgaggagatgctggagagaaggcgggctcagggccaagcacatgaccaacagctggaggaggagcagagtccttcagacaacagcgaatgttcccggccccagggtgaggtgctctcagcacagcagcaggagaagcagtgagccagaggggagatacccaaccctgccctcacctccagggcctgggactgctccttccccagccagcagtatcagagccactagggcagggagagaggaccagggtcagggggaaggaaaggcatggagtgtagagcaaggagggccaggagactggaaggaacccccttcctgccctaggcacagcatctccaccagagtccatttcaaaacccaaacgagagggctttgagtgtttctgatggcaggcacaacatctgaaacccacaaacgcatggccagagggatttctatttttgccggtggatcaggcaggtccacacttgctaagtatatgtgggtcacaggacagccaactgcaaattactctccagccctatttttttcactattacaaatctgtcatatgccctagttctatgtcttatgttattgggattaaacttgaataacac

SEQ ID NO: 6849 - protein, 321 aa, Homo sapiens; identical to SEQ ID NO: 945

SEQ ID NO: 6850 - DNA, 1075 bp, Homo sapiens
gttgtgaggaagcctaggccacatggagaggccacatagatgtgttccaggcagcagccccagcaaaggtctcaatcaaccaccatatgtgtgagtgaaggaaccttcagataattttgcttcccagacttcaagtctttcagctggggtccaagacatcacaaggcagagacaagccctcctggaattccccacccaccgtgagcataagaaaacttgaaagcggtgtaaatggctcttatctgaaccacaatgaattcacatattcaagttggcttcttcggaaatttcaggccacaaatggcagtgatgcgaccaggagcagtaacacgtgccacttccatccggacagaaggaacccaggtcaaggctgacaggaggagcaggagccgtcaatgagagcagacctcagaagccaacggaggtgagaagagcaccatccacagccccatcctctgaatgctgtgggaagaagtccacaaaataccaccccttggagtcagtcagtagtagagcccttgctgctggctgcaaataccccatcagaacatgtttggggtgattcttggacctggtttcaatttcttttctgccagtcagcagttgtgcttgactcacaatttgttgccatctcttgaattaaactcaggaaacaggataaagatcagaaccacattgtaaaagcttccttatggttcattttttgctgagataaataatgagcagctctgatccatgtctctggagagctcagagcacactaccaggagctcctagccacagggtgagcacaggtggctggtgttctcttgatgaggaaagacagcagtgtccaatctaccctgccttacacggagccccaggtgctctcccggactgtgttgctacctaaagcacatggcaattgcatgatgctaaccagagcagcccctcactcattagaaacatctgctttgcattatttacacaggcaaagttttcctttttactgagcctacccagttcaaacttaagtgggatttgccagctatctggctaattttatgagcaataataaagattggtgaacacttgg

SEQ ID NO: 6851 - protein, 48 aa, Homo sapiens
MNSHIQVGFFGNFRPQMAVMRPGAVTRATSIRTEGTQVKADRRSRSRQ

SEQ ID NO: 6852 - DNA, 677 bp, Homo sapiens
ttgtgaggaagcctaggccacatggagaggccacatagatgtgttccaggcagcagccccagcaaaggtctcaatcaaccaccatatgtgtgagtgaaggaaccttcagataattttgcttcccagacttcaagtctttcagctggggtccaagacatcacaaggcagagacaagccctcctggaattccccacccaccgtgagcataagaaaacttgaaagcggtgtaaatggctcttatctgaaccacaatgaattcacatattcaagttggcttcttcggaaatttcaggccacaaatggcagtgatgcgaccaggagcagtaacacgtgccacttccatccggacagaaggaacccaggtcaaggctgacaggaggagcaggagccgtcaatgagagcagacctcagaagccaacggaggtgagaagagcaccatccacagccccatcctctgaatgctgtgggaagaagtccacaaaataccaccccttggagtcagtcagtagtagagcccttgctgctggctgcaaataccccatcagaacatgtttggggtgattcttggacctggtttcaatttcttttctgccagtcagcagttgtgcttgactcacaatttgttgccatctcttgaattaaactcaggaaacaggataaagatcagaaccacattg

SEQ ID NO: 6853 - protein, 48 aa, Homo sapiens; identical to SEQ ID NO: 6851

SEQ ID NO: 6854 - DNA, 1307 bp, Homo sapiens
gcctaggccacatggagaggccacatagatgtgttccaggcagcagccccagcaaaggtctcaatcaaccaccatatgtgtgagtgaaggaaccttcagataattttgcttcccagacttcaagtctttcagctggggtccaagacatcacaaggcagagacaagccctcctggaattccccacccaccgtgagcataagaaaacttgaaagcggtgtaaatggctcttatctgaaccacaatgaattcacatattcaagttggcttcttcggaaatttcaggccacaaatggcagtgatgcgaccaggagcagtaacacgattacaagtcgcaatttaggaagggtgctccatcatcatttcatgattctcactacagcccagacagggctgagctgtagatccacggccaccatgatgagctaagagtttctggattcagtgcctgctgttgctcctggagatttgtatcctgattgaaggctggttccatatctgttcacccagtcacctttaaaattaagtcctgggcacaaatcattagtctggcaagttacatcactgtgccacttccatccggacagaaggaacccaggtcaaggctgacaggaggagcaggagccgtcaatgagagcagacctcagaagccaacggaggtgagaagagcaccatccacagccccatcctctgaatgctgtgggaagaagtccacaaaataccaccccttggagtcagtcagtagtagagcccttgctgctggctgcaaataccccatcagaacatgtttggggtgattcttggacctggtttcaatttcttttctgccagtcagcagttgtgcttgactcacaatttgttgccatctcttgaattaaactcaggaaacaggataaagatcagaaccacattgtaaaagcttccttatggttcattttttgctgagataaataatgagcagctctgatccatgtctctggagagctcagagcacactaccaggagctcctagccacagggtgagcacaggtggctggtgttctcttgatgaggaaagacagcagtgtccaatctaccctgccttacacggagccccaggtgctctcccggactgtgttgctacctaaagcacatggcaattgcatgatgctaaccagagcagcccctcactcattagaaacatctgctttgcattatttacacaggcaaagttttcctttttactgagcctacccagttcaaacttaagtgggatttgccagctatctggctaattttatgagcaataataaagattggtgaacacttgg

SEQ ID NO: 6855 - protein, 32 aa, Homo sapiens
MNSHIQVGFFGNFRPQMAVMRPGAVTRLQVAI

SEQ ID NO: 6856 - DNA, 1452 bp, Homo sapiens
agggagctgttcttggcaggtatcgtaacagagctcctctgcaaatagagggactttcagagaggagaagcaggattcgagtttccaaaactaacactagatggagtcaggctgagtcatgaggaagtcagacccaaaagagcaagctaatgacaagcaagccactctcttgcagcaagttttgcattgtctttctggcttctaaggcttaggcaatgaacacccttttatcttgttttgcaggcgaaaccacaatttctccaaaagagatgcacaggtgattgagctgtaggtgagcagtgacgtgaagaggggttctagccccgtggaaaacagcccatggttaacatctcaggatgttctgcattcaaacacccaaggctggtaatgaactttcacatggactgaatattggaggcaaataatagaaggaatagaatatacagtgcctctgtcctgaaggaaaatatcatgcctcttctggaagaaacggactgcacagaggaaggattgagcaatttagcctgcagtggaagaaggtggacaccaaaagcttcaccctgtgttggagctgttcatgcttccatgaggccatggtgtccatgtccgtggaacctaccacagaaaatggctcatgaaaaggggaatccgacccaacacacagcttcctacacactgccatcttatcaacagttaggcactactttgtagaacgattagcttcaccctcttagctgccaggagatcccttcttaaagatggactatgtgaagattcgggagtcctgaaacatggggactccgggatggtctctagccctatcgatgatgaacactggccttctggaggggaaatggcagtctgggctggcgtggtaggaagggctttggtgttcatggaatgggcctgctgctctcagaccttcaaaggatggaaccaacgaaggaccaaatgagaaagcagatgctgtgccttgcagagggccatgaatgtcagttattatttttctccttatacaattattttgtggttattattacaatgtacatggctgttgcatagaagacatgactggtggaggctgaggaaagccatgacattctacaattgccatcaggctaaggccccgtgagcatttctctcccttgtaatattaaccctgtatttctgggatcacatcacggaatattctttgcctttccactttccaggaaatctctcggactgggctaccctccttgtgtgtgatgaaagatgagctatatttcagaacaaagtgctgtgttgtcatgatttgcctggactcccagggcgtctcttacccaacttgataacgatgctgttcattagcagcctttgttaactgataaccaagagcggtaatgtgatactcataagcaattttctgtgtgtaggataaaataaaccatcttgtatgggatctgctaattg

SEQ ID NO: 6857 - protein, 79 aa, Homo sapiens [sequence omitted]

SEQ ID NO: 6858 - DNA, 1755 bp, Homo sapiens
gatgtaggaggagctcaagtgctggcaacaggcaagacccctggggctgaaattgatttcaagtacgccctcatcgggactgctgtgggtgtcgccatatctgctggcttcctggccctgaagatctgcatgatcaggaggcacttatttgacgacgactcttccgacctgaaaagcacgcctgggggcctcagtggcgaaaccacaatttctccaaaagcatctggccagatctgtgcaaattcaccaactacagaaagtgaaaagtttcccaaaatatgcctattaacctcgaggaatgacttctctttttgtcatcaaagtggatgaagttttgtttgccttgggtttggcaggcagaaaacaacttccaggttgagctctcccctttacccagaagccactggccttcagttcctttctatgttgcacaaggaagtggcccaccttgcaggctttgctgatgagcttttatacctgtttaattgtgtgaattgcataaacacatgcaatcattagagtatagttgctctctcaataagtcttccagatggttctcttcctttccagagatgcacaggtgattgagctgtaggtgagcagtgacgtgaagaggggttctagccccgtggaaaacagcccatggttaacatctcaggatgttctgcattcaaacacccaaggctggtaatgaactttcacatggactgaatattggaggcaaataatagaaggaatagaatatacagtgcctctgtcctgaaggaaaatatcatgcctcttctggaagaaacggactgcacagaggaaggattgagcaatttagcctgcagtggaagaaggtggacaccaaaagcttcaccctgtgttggagctgttcatgcttccatgaggccatggtgtccatgtccgtggaacctaccacagaaaatggctcatgaaaaggggaatccgacccaacacacagcttcctacacactgccatcttatcaacagttaggcactactttgtagaacgattagcttcaccctcttagctgccaggagatcccttcttaaagatggactatgtgaagattcgggagtcctgaaacatggggactccgggatggtctctagccctatcgatgatgaacactggccttctggaggggaaatggcagtctgggctggcgtggtaggaagggctttggtgttcatggaatgggcctgctgctctcagaccttcaaaggatggaaccaacgaaggaccaaatgagaaagcagatgctgtgccttgcagagggccatgaatgtcagttattatttttctccttatacaattattttgtggttattattacaatgtacatggctgttgcatagaagacatgactggtggaggctgaggaaagccatgacattctacaattgccatcaggctaaggccccgtgagcatttctctcccttgtaatattaaccctgtatttctgggatcacatcacggaatattctttgcctttccactttccaggaaatctctcggactgggctaccctccttgtgtgtgatgaaagatgagctatatttcagaacaaagtgctgtgttgtcatgatttgcctggactcccagggcgtctcttacccaacttgataacgatgctgttcattagcagcctttgttaactgataaccaagagcggtaatgtgatactcataagcaattttctgtgtgtaggataaaataaaccatcttgtatgggatctgctaattg

SEQ ID NO: 6859 - protein, 66 aa, Homo sapiens
MIRRHLFDDDSSDLKSTPGGLSGETTISPKASGQICANSPTTESEKFPKICLLTSRNDFSFCHQSG

SEQ ID NO: 6860 - DNA, 2073 bp, Homo sapiens
atctggtcttgctgggccattgctctagaacctgctcagtaattagcacttgtttgagtcaattattgcccgaagtggaacatcagcctctggagccagtctgcaagaatgggacaggtggcgtgccatcctaagaagagaggacagcctctgctgaggccccgggcaagggcagcatggactacaggggttgtgcaagaggggagaatgagagatgtaggaggagctcaagtgctggcaacaggcaagacccctggggctgaaattgatttcaagtacgccctcatcgggactgctgtgggtgtcgccatatctgctggcttcctggccctgaagatctgcatgatcaggaggcacttatttgacgacgactcttccgacctgaaaagcacgcctgggggcctcagtggtgagggatgtggtgctcgggcctggctctgccccacccagcgaggcaccgagggccactctgtgatgctggctacagcaagaatgaacccacaagcgcagagcccaacaggctgtaaaggaaggcagtgacctctgcatgtttctgtctctctcactaaccctttgcctctgtttctctttcttctgtctctatctctctctgtctctctatttgtgttcctttttctgtctccctttccatgtctctgtctttctgtgtctctttccctctgtacttttcctttcagttgctcttggcagtcctgagaatcacatttcctggagaaaggtgggagaggaactaaaattggcttcacacagaaatttctgttctctcatccaaatgatgagatcaaataaacccagtcccagtaggcagcgagacaccatcccgctaaagaagagagccccaaggcgaaaccacaatttctccaaaagagatgcacaggtgattgagctgtaggtgagcagtgacgtgaagaggggttctagccccgtggaaaacagcccatggttaacatctcaggatgttctgcattcaaacacccaaggctggtaatgaactttcacatggactgaatattggaggcaaataatagaaggaatagaatatacagtgcctctgtcctgaaggaaaatatcatgcctcttctggaagaaacggactgcacagaggaaggattgagcaatttagcctgcagtggaagaaggtggacaccaaaagcttcaccctgtgttggagctgttcatgcttccatgaggccatggtgtccatgtccgtggaacctaccacagaaaatggctcatgaaaaggggaatccgacccaacacacagcttcctacacactgccatcttatcaacagttaggcactactttgtagaacgattagcttcaccctcttagctgccaggagatcccttcttaaagatggactatgtgaagattcgggagtcctgaaacatggggactccgggatggtctctagccctatcgatgatgaacactggccttctggaggggaaatggcagtctgggctggcgtggtaggaagggctttggtgttcatggaatgggcctgctgctctcagaccttcaaaggatggaaccaacgaaggaccaaatgagaaagcagatgctgtgccttgcagagggccatgaatgtcagttattatttttctccttatacaattattttgtggttattattacaatgtacatggctgttgcatagaagacatgactggtggaggctgaggaaagccatgacattctacaattgccatcaggctaaggccccgtgagcatttctctcccttgtaatattaaccctgtatttctgggatcacatcacggaatattctttgcctttccactttccaggaaatctctcggactgggctaccctccttgtgtgtgatgaaagatgagctatatttcagaacaaagtgctgtgttgtcatgatttgcctggactcccagggcgtctcttacccaacttgataacgatgctgttcattagcagcctttgttaactgataaccaagagcggtaatgtgatactcataagcaattttctgtgtgtaggataaaataaaccatcttgtatgggatctgctaattg

SEQ ID NO: 6861 - protein, 143 aa, Homo sapiens
MGQVACHPKKRGQPLLRPRARAAWTTGVVQEGRMRDVGGAQVLATGKTPGAEIDFKYALIGTAVGVAISAGFLALKICMIRRHLFDDDSSDLKSTPGGLSGEGCGARAWLCPTQRGTEGHSVMLATARMNPQAQSPTGCKGRQ

SEQ ID NO: 6862 - DNA, 1464 bp, Homo sapiens
aagagcagagcgccagcatgaacttgggggtcagcatgctgaggatcctcttcctcctggatgtaggaggagctcaagtgctggcaacaggcaagacccctggggctgaaattgatttcaagtacgccctcatcgggactgctgtgggtgtcgccatatctgctggcttcctggccctgaagatctgcatgatcaggaggcacttatttgacgacgactcttccgacctgaaaagcacgcctgggggcctcagtggcgaaaccacaatttctccaaaagagatgcacaggtgattgagctgtaggtgagcagtgacgtgaagaggggttctagccccgtggaaaacagcccatggttaacatctcaggatgttctgcattcaaacacccaaggctggtaatgaactttcacatggactgaatattggaggcaaataatagaaggaatagaatatacagtgcctctgtcctgaaggaaaatatcatgcctcttctggaagaaacggactgcacagaggaaggattgagcaatttagcctgcagtggaagaaggtggacaccaaaagcttcaccctgtgttggagctgttcatgcttccatgaggccatggtgtccatgtccgtggaacctaccacagaaaatggctcatgaaaaggggaatccgacccaacacacagcttcctacacactgccatcttatcaacagttaggcactactttgtagaacgattagcttcaccctcttagctgccaggagatcccttcttaaagatggactatgtgaagattcgggagtcctgaaacatggggactccgggatggtctctagccctatcgatgatgaacactggccttctggaggggaaatggcagtctgggctggcgtggtaggaagggctttggtgttcatggaatgggcctgctgctctcagaccttcaaaggatggaaccaacgaaggaccaaatgagaaagcagatgctgtgccttgcagagggccatgaatgtcagttattatttttctccttatacaattattttgtggttattattacaatgtacatggctgttgcatagaagacatgactggtggaggctgaggaaagccatgacattctacaattgccatcaggctaaggccccgtgagcatttctctcccttgtaatattaaccctgtatttctgggatcacatcacggaatattctttgcctttccactttccaggaaatctctcggactgggctaccctccttgtgtgtgatgaaagatgagctatatttcagaacaaagtgctgtgttgtcatgatttgcctggactcccagggcgtctcttacccaacttgataacgatgctgttcattagcagcctttgttaactgataaccaagagcggtaatgtgatactcataagcaattttctgtgtgtaggataaaataaaccatcttgtatgggatctgctaattg

SEQ ID NO: 6863 - protein, 91 aa, Homo sapiens
MNLGVSMLRILFLLDVGGAQVLATGKTPGAEIDFKYALIGTAVGVAISAGFLALKICMIRRHLFDDDSSDLKSTPGGLSGETTISPKEMHR

SEQ ID NO: 6864 - DNA, 1597 bp, Homo sapiens
ccagcagccaggagccaggagccaagagcagagcgccagcatgaacttgggggtcagcatgctgaggatcctcttcctcctggatgtaggaggagctcaagtgctggcaacaggcaagacccctggggctgaaattgatttcaagtacgccctcatcgggactgctgtgggtgtcgccatatctgctggcttcctggccctgaagatctgcatgatcaggaggcacttatttgacgacgactcttccgacctgaaaagcacgcctgggggcctcagtgacaccatcccgctaaagaagagagccccaagaaagctgcaagcctcgaccctcttttccttcaaatccctgcttcagtgtcaccactgcatcatggagggcctatttaaggcgaaaccacaatttctccaaaagagatgcacaggtgattgagctgtaggtgagcagtgacgtgaagaggggttctagccccgtggaaaacagcccatggttaacatctcaggatgttctgcattcaaacacccaaggctggtaatgaactttcacatggactgaatattggaggcaaataatagaaggaatagaatatacagtgcctctgtcctgaaggaaaatatcatgcctcttctggaagaaacggactgcacagaggaaggattgagcaatttagcctgcagtggaagaaggtggacaccaaaagcttcaccctgtgttggagctgttcatgcttccatgaggccatggtgtccatgtccgtggaacctaccacagaaaatggctcatgaaaaggggaatccgacccaacacacagcttcctacacactgccatcttatcaacagttaggcactactttgtagaacgattagcttcaccctcttagctgccaggagatcccttcttaaagatggactatgtgaagattcgggagtcctgaaacatggggactccgggatggtctctagccctatcgatgatgaacactggccttctggaggggaaatggcagtctgggctggcgtggtaggaagggctttggtgttcatggaatgggcctgctgctctcagaccttcaaaggatggaaccaacgaaggaccaaatgagaaagcagatgctgtgccttgcagagggccatgaatgtcagttattatttttctccttatacaattattttgtggttattattacaatgtacatggctgttgcatagaagacatgactggtggaggctgaggaaagccatgacattctacaattgccatcaggctaaggccccgtgagcatttctctcccttgtaatattaaccctgtatttctgggatcacatcacggaatattctttgcctttccactttccaggaaatctctcggactgggctaccctccttgtgtgtgatgaaagatgagctatatttcagaacaaagtgctgtgttgtcatgatttgcctggactcccagggcgtctcttacccaacttgataacgatgctgttcattagcagcctttgttaactgataaccaagagcggtaatgtgatactcataagcaattttctgtgtgtaggataaaataaaccatcttgtatgggatctgctaattg

SEQ ID NO: 6865 - protein, 129 aa, Homo sapiens
MNLGVSMLRILFLLDVGGAQVLATGKTPGAEIDFKYALIGTAVGVAISAGFLALKICMIRRHLFDDDSSDLKSTPGGLSDTIPLKKRAPRKLQASTLFSFKSLLQCHHCIMEGLFKAKPQFLQKRCTGD

SEQ ID NO: 6866 - DNA, 1521 bp, Homo sapiens
ctgccagcagccaggagccaggagccaagagcagagcgccagcatgaacttgggggtcagcatgctgaggatcctcttcctcctggatgtaggaggagctcaagtgctggcaacaggcaagacccctggggctgaaattgatttcaagtacgccctcatcgggactgctgtgggtgtcgccatatctgctggcttcctggccctgaagatctgcatgatcaggaggcacttatttgacgacgactcttccgacctgaaaagcacgcctgggggcctcagtgacaccatcccgctaaagaagagagccccaaggcgaaaccacaatttctccaaaagagatgcacaggtgattgagctgtaggtgagcagtgacgtgaagaggggttctagccccgtggaaaacagcccatggttaacatctcaggatgttctgcattcaaacacccaaggctggtaatgaactttcacatggactgaatattggaggcaaataatagaaggaatagaatatacagtgcctctgtcctgaaggaaaatatcatgcctcttctggaagaaacggactgcacagaggaaggattgagcaatttagcctgcagtggaagaaggtggacaccaaaagcttcaccctgtgttggagctgttcatgcttccatgaggccatggtgtccatgtccgtggaacctaccacagaaaatggctcatgaaaaggggaatccgacccaacacacagcttcctacacactgccatcttatcaacagttaggcactactttgtagaacgattagcttcaccctcttagctgccaggagatcccttcttaaagatggactatgtgaagattcgggagtcctgaaacatggggactccgggatggtctctagccctatcgatgatgaacactggccttctggaggggaaatggcagtctgggctggcgtggtaggaagggctttggtgttcatggaatgggcctgctgctctcagaccttcaaaggatggaaccaacgaaggaccaaatgagaaagcagatgctgtgccttgcagagggccatgaatgtcagttattatttttctccttatacaattattttgtggttattattacaatgtacatggctgttgcatagaagacatgactggtggaggctgaggaaagccatgacattctacaattgccatcaggctaaggccccgtgagcatttctctcccttgtaatattaaccctgtatttctgggatcacatcacggaatattctttgcctttccactttccaggaaatctctcggactgggctaccctccttgtgtgtgatgaaagatgagctatatttcagaacaaagtgctgtgttgtcatgatttgcctggactcccagggcgtctcttacccaacttgataacgatgctgttcattagcagcctttgttaactgataaccaagagcggtaatgtgatactcataagcaattttctgtgtgtaggataaaataaaccatcttgtatgggatctgctaattg

SEQ ID NO: 6867 - protein, 105 aa, Homo sapiens
MNLGVSMLRILFLLDVGGAQVLATGKTPGAEIDFKYALIGTAVGVAISAGFLALKICMIRRHLFDDDSSDLKSTPGGLSDTIPLKKRAPRRNHNFSKRDAQVIEL

SEQ ID NO: 6868 - DNA, 1313 bp, Homo sapiens
attgtgcctgcgctgccagcagccaggagccaggagccaagagcagagcgccagcatgaacttgggggtcagcatgctgaggatcctcttcctcctggatgtaggaggagctcaagtgctggcaacaggcaagacccctggggctgaaattgatttcaagtacgccctcatcgggactgctgtgggtgtcgccatatctgctggcttcctggccctgaagatctgcatgatcaggaggcacttatttgacgacgactcttccgacctgaaaagcacgcctgggggcctcagtgacaccatcccgctaaagaagagagccccaaggcgaaaccacaatttctccaaaagaaacggactgcacagaggaaggattgagcaatttagcctgcagtggaagaaggtggacaccaaaagcttcaccctgtgttggagctgttcatgcttccatgaggccatggtgtccatgtccgtggaacctaccacagaaaatggctcatgaaaaggggaatccgacccaacacacagcttcctacacactgccatcttatcaacagttaggcactactttgtagaacgattagcttcaccctcttagctgccaggagatcccttcttaaagatggactatgtgaagattcgggagtcctgaaacatggggactccgggatggtctctagccctatcgatgatgaacactggccttctggaggggaaatggcagtctgggctggcgtggtaggaagggctttggtgttcatggaatgggcctgctgctctcagaccttcaaaggatggaaccaacgaaggaccaaatgagaaagcagatgctgtgccttgcagagggccatgaatgtcagttattatttttctccttatacaattattttgtggttattattacaatgtacatggctgttgcatagaagacatgactggtggaggctgaggaaagccatgacattctacaattgccatcaggctaaggccccgtgagcatttctctcccttgtaatattaaccctgtatttctgggatcacatcacggaatattctttgcctttccactttccaggaaatctctcggactgggctaccctccttgtgtgtgatgaaagatgagctatatttcagaacaaagtgctgtgttgtcatgatttgcctggactcccagggcgtctcttacccaacttgataacgatgctgttcattagcagcctttgttaactgataaccaagagcggtaatgtgatactcataagcaattttctgtgtgtaggataaaataaaccatcttgtatgggatctgctaattg

SEQ ID NO: 6869 - protein, 147 aa, Homo sapiens
MNLGVSMLRILFLLDVGGAQVLATGKTPGAEIDFKYALIGTAVGVAISAGFLALKICMIRRHLFDDDSSDLKSTPGGLSDTIPLKKRAPRRNHNFSKRNGLHRGRIEQFSLQWKKVDTKSFTLCWSCSCFHEAMVSMSVEPTTENGS

SEQ ID NO: 6870 - DNA, 2793 bp, Homo sapiens
cccagcatgtacaatgggtctaatcacagccagcttctggtggagtccagaatgacaggggcttccttcagccctgtcttcagagaggctgagaggaactgaacagcctcctggctgtgacagtggtttccttccccatcagtcacgtgggtcttgtcctgtccccagagccttgggtcacatggctcattgtgcctgcgctgccagcagccaggagccaggagccaagagcagagcgccagcatgaacttgggggtcagcatgctgaggatcctcttcctcctggatgtaggaggagctcaagtgctggcaacaggcaagacccctggggctgaaattgatttcaagtacgccctcatcgggactgctgtgggtgtcgccatatctgctggcttcctggccctgaagatctgcatgatcaggaggcacttatttgacgacgactcttccgacctgaaaagcacgcctgggggcctcagtggtgagggatgtggtgctcgggcctggctctgccccacccagcgaggcaccgagggccactctgtgatgctggctacagcaagaatgaacccacaagcgcagagcccaacaggctgtaaaggaaggcagtgacctctgcatgtttctgtctctctcactaaccctttgcctctgtttctctttcttctgtctctatctctctctgtctctctatttgtgttcctttttctgtctccctttccatgtctctgtctttctgtgtctctttccctctgtacttttcctttcagttgctcttggcagtcctgagaatcacatttcctggagaaaggtgggagaggaactaaaattggcttcacacagaaatttctgttctctcatccaaatgatgagatcaaataaacccagtcccagtaggcagcgaggttggtcctaagtgtgggcggatggtgggaggttctgttgacactgcctttgtgggtcaagatgaattttttttcataaattgggaaagtccttctcaaagcagtactgagtaggccctcagagagaaactgagctggctgacatgcaccatggcacagccctctgcctccttggcacccaaagtgcagtattgatttgcatcccttctctcagggtatcatccccagactcatcctctgttgtattagatggctcactgcaatgacggtgcagttttccatggggtgcttctggggagaatagagcctcactgccttcctggaagacgtgattatgatccgtgaagataagcagaaggggctggtctgggccgggagaggaggaggcttccgagatgctggcgtgtgcatcgcccgaggggcttaataggccatgggagtttgcttatccttgagtttgcttatccttgtgtatccccacaaataaggggaggaaacagcctcttcatcacatagcagccaggccccgggtctctcgagggcaaccgtgagtgagaggaccaaggagagggaggtgaaagctctagggaatgctctgcacctcttgtcacacgacccccttcctaatgcccggctttctctgtttagacaccatcccgctaaagaagagagccccaaggcgaaaccacaatttctccaaaagagatgcacaggtgattgagctgtaggtgagcagtgacgtgaagaggggttctagccccgtggaaaacagcccatggttaacatctcaggatgttctgcattcaaacacccaaggctggtaatgaactttcacatggactgaatattggaggcaaataatagaaggaatagaatatacagtgcctctgtcctgaaggaaaatatcatgcctcttctggaagaaacggactgcacagaggaaggattgagcaatttagcctgcagtggaagaaggtggacaccaaaagcttcaccctgtgttggagctgttcatgcttccatgaggccatggtgtccatgtccgtggaacctaccacagaaaatggctcatgaaaaggggaatccgacccaacacacagcttcctacacactgccatcttatcaacagttaggcactactttgtagaacgattagcttcaccctcttagctgccaggagatcccttcttaaagatggactatgtgaagattcgggagtcctgaaacatggggactccgggatggtctctagccctatcgatgatgaacactggccttctggaggggaaatggcagtctgggctggcgtggtaggaagggctttggtgttcatggaatgggcctgctgctctcagaccttcaaaggatggaaccaacgaaggaccaaatgagaaagcagatgctgtgccttgcagagggccatgaatgtcagttattatttttctccttatacaattattttgtggttattattacaatgtacatggctgttgcatagaagacatgactggtggaggctgaggaaagccatgacattctacaattgccatcaggctaaggccccgtgagcatttctctcccttgtaatattaaccctgtatttctgggatcacatcacggaatattctttgcctttccactttccaggaaatctctcggactgggctaccctccttgtgtgtgatgaaagatgagctatatttcagaacaaagtgctgtgttgtcatgatttgcctggactcccagggcgtctcttacccaacttgataacgatgctgttcattagcagcctttgttaactgataaccaagagcggtaatgtgatactcataagcaattttctgtgtgtaggataaaataaaccatcttgtatgggatctgctaattg

SEQ ID NO: 6871 - protein, 122 aa, Homo sapiens
MNLGVSMLRILFLLDVGGAQVLATGKTPGAEIDFKYALIGTAVGVAISAGFLALKICMIRRHLFDDDSSDLKSTPGGLSGEGCGARAWLCPTQRGTEGHSVMLATARMNPQAQSPTGCKGRQ

SEQ ID NO: 6872 - DNA, 1753 bp, Homo sapiens
attgtgcctgcgctgccagcagccaggagccaggagccaagagcagagcgccagcatgaacttgggggtcagcatgctgaggatcctcttcctcctggatgtaggaggagctcaagtgctggcaacaggcaagacccctggggctgaaattgatttcaagtacgccctcatcgggactgctgtgggtgtcgccatatctgctggcttcctggccctgaagatctgcatgatcaggaggcacttatttgacgacgactcttccgacctgaaaagcacgcctgggggcctcagtgacaccatcccgctaaagaagagagccccaagagcccacgtcctcagggacggtcctgccttgggacctttgcacttgctgttttctgtaattggaatgctctttgccagaaagctgcaagcctcgaccctcttttccttcaaatccctgcttcagtgtcaccactgcatcatggagggcctatttaaggcgaaaccacaatttctccaaaaggtgagttgtaagagtgatcacttgtcttaaaaggaggacaggcagtctctgccccatggggctgcatgggttttcggcatgacctctccctcccctggccacgtgggacgggcaaccatggcatggccaggagccctcatgccaggacagctgtgagaccaggaatcagcatcaccttgggacatgatggtacttggcaagatttaacatgaagctgtggggcatttgcccagttagagctgagaaaatggttttaacaggataggtaaactttttttcattctccaagacctatcctatgatagtgtccaatctaataattagccaatttagtccatttgatgaaaaaaattcccaaacatctcttcatgtcatcatgctatcagtttggctgggtatttgcatctcagtgctgctttggggtctcggagaggacgaagcctgtatgtggagggccggtctacagaaggggacaggatctcggacccctgattgaatgagcctatggatgaagactcctaggaatgaaggcatcttcaccagggttttgagaatcatcatttcacaatccacattccccagcttggcttttcctcacctcatgccccttgcatgtgccaaacccactgagaatttgctccctgtctgaccagcccaggatggtcacacaggcctggggcaatctcttgacctcactctcctgctttatgaaaaattttcaaatccaaagaaaagttgaaagaacgggacaatcaaaatatatacacccttcacctagggtcactcactgacacggtgccccctttgctttatctctgtgtacataagccttttttgactgatctacttgcaaattagtgtagatatcatgatatttcacccctgaatacagcaccattgtgtttcctattgtgtataatcacaatacagtgaccactcctaagaaaattaatgctaatttaatatcatctattatacagtccatatttaaatttctctggttatttcagaagtatcttttattgctctattttttattgtgctattttccaatccagaaaaaatatttgtatttattttgtcttttttttaagtctctttcagtattgaacagcccctctgctttttatccttatggcattgttaattgagaagtccctaagccccgttgtcttatacaatgtcccattttctggatttgtctgatcgttttctcctgagtagattcagattgaagtttttggtcag

SEQ ID NO: 6873 - protein, 159 aa, Homo sapiens
MNLGVSMLRILFLLDVGGAQVLATGKTPGAEIDFKYALIGTAVGVAISAGFLALKICMIRRHLFDDDSSDLKSTPGGLSDTIPLKKRAPRAHVLRDGPALGPLHLLFSVIGMLFARKLQASTLFSFKSLLQCHHCIMEGLFKAKPQFLQKVSCKSDHLS

SEQ ID NO: 6874 - DNA, 528 bp, Homo sapiens
attgtgcctgcgctgccagcagccaggagccaggagccaagagcagagcgccagcatgaacttgggggtcagcatgctgaggatcctcttcctcctggatgtaggaggagctcaagtgctggcaacaggcaagacccctggggctgaaattgatttcaagtacgccctcatcgggactgctgtgggtgtcgccatatctgctggcttcctggccctgaagatctgcatgatcaggaggcacttatttgacgacgactcttccgacctgaaaagcacgcctgggggcctcagtggtgagggatgtggtgctcgggcctggctctgccccacccagcgaggcaccgagggccactctgtgatgctggctacagcaagaatgaattttttttcataaattgggaaagtccttctcaaagcagtactgagtaggccctcagagagaaactgagctggctgacatgcaccatggcacagccctctgcctccttggcacccaaagtgcagtattgatttgcatcccttctctca

SEQ ID NO: 6875 - protein, 112 aa, Homo sapiens
MNLGVSMLRILFLLDVGGAQVLATGKTPGAEIDFKYALIGTAVGVAISAGFLALKICMIRRHLFDDDSSDLKSTPGGLSGEGCGARAWLCPTQRGTEGHSVMLATARMNFFS

SEQ ID NO: 6876 - DNA, 847 bp, Homo sapiens
tcttgctgggccattgctctagaacctgctcagtaattagcacttgtttgagtcaattattgcccgaagtggaacatcagcctctggagccagtctgcaagaatgggacaggtggcgtgccatcctaagaagagaggacagcctctgctgaggccccgggcaagggcagcatggactacaggggttgtgcaagaggggagaatgagagatgtaggaggagctcaagtgctggcaacaggcaagacccctggggctgaaattgatttcaagtacgccctcatcgggactgctgtgggtgtcgccatatctgctggcttcctggccctgaagatctgcatgatcaggaggcacttatttgacgacgactcttccgacctgaaaagcacgcctgggggcctcagtggtgagggatgtggtgctcgggcctggctctgccccacccagcgaggcaccgagggccactctgtgatgctggctacagcaagaatgaacccacaagcgcagagcccaacaggctgtaaaggaaggcagtgacctctgcatgtttctgtctctctcactaaccctttgcctctgtttctctttcttctgtctctatctctctctgtctctctatttgtgttcctttttctgtctccctttccatgtctctgtctttctgtgtctctttccctctgtacttttcctttcagttgctcttggcagtcctgagaatcacatttcctggagaaaggtgggagaggaactaaaattggcttcacacagaaatttctgttctctcatccaaatgatgagatcaaataaacccagtcccagtaggcagcgaggttggtcctaagtgtgggcg

SEQ ID NO: 6877 - protein, 143 aa, Homo sapiens; identical to SEQ ID NO: 6861

SEQ ID NO: 6878 - DNA, 931 bp, Homo sapiens
taataccccagcatgtacaatgggtctaatcacagccagcttctggtggagtccagaatgacaggggcttccttcagccctgtcttcagagaggctgagaggaactgaacagcctcctggctgtgacagtggtttccttccccatcagtcacgtgggtcttgtcctgtccccagagccttgggtcacatggctcattgtgcctgcgctgccagcagccaggagccaggagccaagagcagagcgccagcatgaacttgggggtcagcatgctgaggatcctcttcctcctggatgtaggaggagctcaagtgctggcaacaggcaagacccctggggctgaaattgatttcaagtacgccctcatcgggactgctgtgggtgtcgccatatctgctggcttcctggccctgaagatctgcatgatcaggaggcacttatttgacgacgactcttccgacctgaaaagcacgcctgggggcctcagtggtgagggatgtggtgctcgggcctggctctgccccacccagcgaggcaccgagggccactctgtgatgctggctacagcaagaatgaacccacaagcgcagagcccaacaggctgtaaaggaaggcagtgacctctgcatgtttctgtctctctcactaaccctttgcctctgtttctctttcttctgtctctatctctctctgtctctctatttgtgttcctttttctgtctccctttccatgtctctgtctttctgtgtctctttccctctgtacttttcctttcagttgctcttggcagtcctgagaatcacatttcctggagaaaggtgggagaggaactaaaattggcttcacacagaaatttctgttctctcatccaaatgatgagatcaaataaacccagtcccagtaggcagcgaggttggtcctaagtgtgggcg

SEQ ID NO: 6879 - protein, 122 aa, Homo sapiens; identical to SEQ ID NO: 6871

SEQ ID NO: 6880 - DNA, 1506 bp, Homo sapiens
agagcccccagcctctgcgccgcgggccgggacgagcgcccgggcccacggcctccgcgcctacctttcggacttggtgaacttccggaatgcctgtcggaggtcgtggaaggacctgtacgtctgcggctcggccgagatgccctgcgcccgggtggtccgggggccgatgtgggtcgagggcactgggagcaccgactggcatttgtggagtttcctcttcagctcctgaatttcttcctccttctctgacagccgcttctccagctctctctggggagtaggtgattatctttcattgagaaaccaattagagctgcccttcctcccctgagaccccctccctcgtccccctctcctagtcactccgtgagaatacgcgcgcgccaccccaccgacagccgagttgctagcagagggttggatcagagagcctggtcccactccatcacacaaaactcactcttccacgctgtatggtaccaagggaagggggtggggtggggggggggagatttatgccacttgatccttgaaatagcaacaattaccatgtgatctggcggatgacgcagcgcttgtaactggatcctaaagagtgtgagtgtgtgtgtatgtgtgtgacatttcgtaaatattaaactgcctttagacagtaacctgcacaaattcatcttggtctttgacttttacttcttttctatttttgatgcctggatggattcagaaaggaaggcgtgtgtgtgtgtgtgtgtgcgtgtgtgtgtgttagttactttgaagtctcatggttctgaccctagtaagaatgacagggcaataccagttccaaggtttttcagcgtaaagccttactggacagagtgaactaaaattgttggtggggaagttggatgaacatagggtaatgagccaaatgattacggaaaagagaaaggccatgtgttaactgtaaactttttgtgtctggctttttttccatctactacccttcagtcttgtatacagagcatccaaattatatcacaatctcttcctcaatggctcagaagtggtggccaccagtgctaagctgggtcacactaccagttccagtttgggggagaaattgcatctttaattatctgtgtttaggtcttacctgtgcatccaccatctaccctatgctaaaaggattattctgcacagtagaataatcgcgtattcacggattcttacaatttccttttttatatctatcacagagagcatttacataacataagtcactatttgagagtttgatttgatagggaatgagaagtatttcttctgataatagtcaacacattggtaatttttttaaggaaaaaaatagttgcaactaagataccaggagattctttcctaaattgtaacttttcttaaaaaagaaaaatcaatgtataattactggctacttacaaaaaaaaaattattctaccttttctgaaacaactaaataaaggaaaaacaggtgtatatttt

SEQ ID NO: 6881 - protein, 64 aa, Homo sapiens [sequence omitted]

SEQ ID NO: 6882 - DNA, 3423 bp, Homo sapiens
gcttccaagcttctgccttgaaataatcaatatccaaatttggtggaagaacatggtacaatccttagtggggaagcacgtgagccaaggaaattgatgatgtcatgtacattgtatacacatgaataaaaaagtcaaaaagaacgctgttctagtgatttaactataggtgtatacttatttgcttttccttttcttactggccaacatttattttacattctttaagtagacacactacaatttcttataattgtcccagtgacttctcaagtggataatctggtgacttctccttcccgagacaaggagcaagcacatgacccaaactaggacagtcaggacacattagaaagacacgacaggggagcagatgacgtttagtcactcaggcaatacagctaaagtatacattgagattcaggatgaaaataatcatcccccagtgtttcagaaaaaattctacatcggaggtgtatctgaagatgcaagaatgtttacttctgtactcagagtgaaggctactgataaagatactggcaattatagtgtcatggcctacagactcataataccaccaattaaagagggaaaagaaggatttgtagtggaaacatatacagggcttatcaaaactgctatgctcttccataatatgaggagatcctacttcaagtttcaagttattgcaactgacgactatgggaagggactgagcggcaaagccgatgtactcgtctccgtggtcaatcagctggatatgcaagtcattgtttccaatgtgcctcctactctagtggaaaaaaagatagaagatcttacagagatcttggatcgctatgttcaggaacaaattcctggtgccaaggtcgtagtggagtccattggagctcgccggcatggagatgccttttccctagaagattacaccaaatgtgacttgactgtctatgcaattgacccccaaaccaacagagccatcgatagaaatgagctttttaaatttttggatggcaaactacttgatatcaataaagactttcagccgtattatggggaaggaggacgcattctggagatccggactccagaggcagtgaccagcattaaaaagagaggagaaagtctaggatacacagaaggggccttgttggctctggccttcatcatcatcctctgctgcattcctgccatcttggtggttttggtcagctacagacagtaagtacgtcaagctgagtgtacaaagactgcacgaattcaggccgcattacccgcggctaaaccagcagtgccggctcctgcaccagtggcagcgcccccgccgccgccgccgcctccgccaggtgcgcatctctatgaagaacttggagacagctcaattcttttccttctctaccattttcaacaaagcaggggaaataactcagtctcagaagacaggaaacatcaacaagttgtgatgcccttttcttccaatactattgaggctcacaagtcagctcatgtagacggatcacttaagagcaacaaactgaagtctgcaagaaaattcacatttctatctgatgaggatgacttaagtgcccataatcccctttataaggaaaacataagtcaagtatcaacaaattcagacatttcacagagaacagattttgtagacccattttcacccaaaatacaagccaagagtaagtctctgaggggcccaagagaaaagattcagaggctgtggagtcagtcagtcagcttacccaggaggctgatgaggaaagttccaaatagaccagagatcatagatctgcagcagtggcaaggcaccaggcagaaagctgaaaatgaaaacactggaatctgtacaaacaaaagaggtagcagcaatccattgcttacaactgaagaggcaaatttgacagagaaagaggaaataaggcaaggtgaaacactgatgatagaaggaacagaacagttgaaatctctctcttcagactcttcattttgctttcccaggcctcacttctcattctccactttgccaactgtttcaagaactgtggaactcaaatcagaacctaatgtcatcagttctcctgctgagtgttccttggaactttctccttcaaggccttgtgttttacattcttcactctctaggagagagacacctatttgtatgttacctattgaaaccgaaagaaatatttttgaaaattttgcccatccaccaaacatctctccttctgcctgacattttttccactttccgtttcaacgtctggtcccccaacaagcttcatttctgtccacagagtgtgtctgtataacaggtgttaaatgcacgaccaacttgatgcctgccgagaaaattaagtcctctatgacacagctatcaacaacgacagtgtgtaaaacagaccctcagagagaaccaaaaggcatcctcagacacgttaaaaacttagcagaacttgaaaaatcagtagctaacatgtacagtcaaatagaaaaaaactatctacgcacaaatgtttcagaacttcaaactatgtgcccttcagaagtaacaaatatggaaatcacatctgaacaaaacaaggggagtttgaacaatattgtcgagggaactgaaaaacaatctcacagtcaatctacttcactgtaatgttgcttttcttattttagtcgggcaaacctcttgttgatcatagtcttcaagttgaacatcaaatttgaacgtcaaagaagactctattattttaccccaaattcaatgaaatgcagttttttttctcgtttttaatttaaaaagatattaacctcatcactactaactcactcatataatagatttaccttactttttaaaaactacaaagtagcataatttgttctacatttatttgaaaagtaagtaattttaatctcttttttagtgggaatatgtgggcatgaaaattagatacccaacttaaaccaaaggcatgtctatcatgtggatgcagtaacatttacatttagtttttgatcgtagttttatatgaatgttccaagaaaaaagcagactgttacaaataagttaaaactgatatgattgataggttctgttttttcttgaagcctatgtatttggtaagaagaaatactaccgaagtaaaatataatgtacctagattgtaggagatgacagacataaggtatttcaaaataaatctcaggtgctataacatgtagtcatctgttttctgataagaacatcttttactctgacttgcttttatcttagtagtatgcttatggatttagtagtatgcttatggatttgataaatcttatactttttcagttgctgtcttattctctttatttctcattgtgctttcccttcccttctttataatgaaaataaatcttgagtcgttg

SEQ ID NO: 6883 - protein, 283 aa, Homo sapiens
MTFSHSGNTAKVYIEIQDENNHPPVFQKKFYIGGVSEDARMFTSVLRVKATDKDTGNYSVMAYRLIIPPIKEGKEGFVVETYTGLIKTAMLFHNMRRSYFKFQVIATDDYGKGLSGKADVLVSVVNQLDMQVIVSNVPPTLVEKKIEDLTEILDRYVQEQIPGAKVVVESIGARRHGDAFSLEDYTKCDLTVYAIDPQTNRAIDRNELFKFLDGKLLDINKDFQPYYGEGGRILEIRTPEAVTSIKKRGESLGYTEGALLALAFIIILCCIPAILVVLVSYRQ

SEQ ID NO: 6884 - DNA, 6733 bp, Homo sapiens
caacgtgctgagctaatagcgacagatagagggcagacagattcctgctagcagcttagtgttagttgcttgtggtaactaaggcaggtggcatacatctcagaacgtggagaatgatggtatgctttctgagttaacatgttgaactgttttgcttttctaaaaattttcctagtaacattttcttgatgatatgagagtggatatcaatgcctcacagaaacaagaggtggaacatgtgaatgaatcgtcttggaactagattatgagcactggttctttttaaagggatgtgcaagaggcagccttggcaagaaaacttgctgcataatcttacatggactaaagatgaaactttaaaccgcaaatcagctttgagtgaactttgacagaagatgtttcgacagttttatctctggacatgtttagcttcagggatcatcctgggctctctctttgaaatctgcttgggccagtatgatgatggtacaattctggtggacaacatgctgatcaaagggactgctggaggaccagaccccaccatagaactttctttaaaggataatgtggattactgggtgttgatggatcctgttaagcaaatgcttttcctgaacagcaccggaagagttctggatagagatccaccgatgaacatacactccattgtggtgcaggtccagtgcatcaacaaaaaagtgggcactattatctaccatgaagtgcgaatagtggtgagagacaggaatgacaactcacccactttcaagcatgaaagctactatgccacagtgaatgagctcactccagttggtaccacaatattcacaggattttcaggagacaatggagctacagatatagatgatggaccaaatggacagatagagtatgttattcagtataatccagatgatccgacatccaatgacacctttgaaattcccctaatgttgactggaaatatagtgttaaggaagaggctcaactatgaagataagactcgctactttgtcataatccaagctaatgaccgtgcccaaaatctgaatgagaggcgaaccaccaccaccactctcacagtggatgttctggatggagatgacttgggtccaatgtttcttccttgtgtccttgtgccaaacactcgtgattgccgtccactcacttatcaagctgccatacctgagttgagaactccggaagaactgaaccccattattgttacgccaccaatccaagccattgatcaggaccggaatattcaaccgccatcagataggccaggaatcctctattccatccttgttgggactcctgaggattacccacgatttttccatatgcatcctaggacagcagaacttagtctcctggagccagtaaacagagactttcaccagaaatttgatttggttattaaggctgaacaagacaatggtcatcctcttcctgcctttgccggtctacacattgaaatactggatgaaaacaatcaaagtccatattttacaatgcccagttatcaaggctatatcctggaatctgccccagtgggagcaaccatttcggacagtctcaatttgacttcacctttaagaatagtagctctggacaaggacatagaagatacaaaagacccagagcttcacctttttctgaatgactacacctcagtcttcaccgtcacacagactggtattactcgctacctcaccttacttcaaccagtggacagggaagaacagcaaacttacaccttttcgataacagcatttgatggtgtacaagaaagtgagccagtcatcgtcaatattcaagtgatggatgcaaatgataacacgccaaccttccctgaaatatcctatgatgtgtatgtttatacagacatgagacctggggacagtgtcatacagctcactgcagtcgacgcagacgaagggtcaaatggggagatcacatatgaaatccttgttggggctcagggagacttcatcatcaataaaacaacagggcttatcaccatcgctccaggggtggaaatgatagtcgggcggacttacgcactcacggtccaagcagcggataatgctcctcctgcagagcgaaggaactccatctgcactgtgtatattgaagtgcttccaccaaataatcaaagccctcctcgcttcccacagctgatgtatagccttgaaattagtgaagccatgagggttggtgctgttttattaaatctacaggcaactgatcgagagggagactcaataacatatgccattgagaatggagatcctcagagagtttttaatctttcagaaaccacggggattctaaccttagggaaagcactggacagggaaagcactgatcgctacattctgatcatcacagcttcagatggcaggccagatgggacctcaactgccacagtaaacatagtggtgacagatgtcaatgacaatgctccagtgtttgatccttatctgccaagaaatttatctgtggtggaagaagaagccaatgcctttgtgggtcaagtaaaagcaacagaccctgatgctggaataaatggtcaagtgcactacagtttgggtaactttaataatctttttcgtatcacatccaatgggagcatttacacagcagtgaagcttaacagagaagtcagggactactatgaacttgttgttgtggcaacagatggagcagtacaccctcgtcattcaactctaaccttggccatcaaggttttggacattgatgataacagtcctgtgttcaccaattcaacatacactgtccttgttgaagagaatttgccagctgggactaccatccttcaaatagaggccaaagatgtcgaccttggagcaaatgtgtcttaccggataagaagcccagaagtgaagcacttttttgcactacatccatttacaggagaactatcgcttttaaggagtttagattatgaggcatttccagaccaagaagcaagtatcacttttctggtagaggcctttgatatttatggaacaatgccacctggtattgctactgtcacagtgattgtaaaggatatgaatgattatcctcctgtctttagtaaacgaatatacaaagggatggtggctccggatgcagtcaagggtacacctatcacaacagtttatgctgaagatgcagaccctcctggattacctgcaagtcgtgtgaggtatagagtagatgatgtacagtttccttaccctgccagtatttttgaagtggaagaagattctggaagagtaataacacgagtcaatcttaatgaagaacctacaacaatttttaagttggtggtggttgcttttgatgatggggagcctgtgatgtccagcagtgccacagtgaagattcttgtcttacatcctggtgagatcccacgcttcacacaggaggaatatagacctcctccagtaagtgaacttgccaccaaagggaccatggttggtgtaatttctgctgctgccattaatcaaagtattgtgtactccattgtttcaggaaatgaagaagatacatttggaattaataacatcacaggtgttatctatgtgaatggacctctggattatgagaccaggacaagctatgtacttcgagtccaagctgattccctggaagtggtccttgccaatctccgagttccttcaaaaagcaatacagctaaagtatacattgagattcaggatgaaaataatcatcccccagtgtttcagaaaaaattctacatcggaggtgtatctgaagatgcaagaatgtttacttctgtactcagagtgaaggctactgataaagatactggcaattatagtgtcatggcctacagactcataataccaccaattaaagagggaaaagaaggatttgtagtggaaacatatacagggcttatcaaaactgctatgctcttccataatatgaggagatcctacttcaagtttcaagttattgcaactgacgactatgggaagggactgagcggcaaagccgatgtactcgtctccgtggtcaatcagctggatatgcaagtcattgtttccaatgtgcctcctactctagtggaaaaaaagatagaagatcttacagagatcttggatcgctatgttcaggaacaaattcctggtgccaaggtcgtagtggagtccattggagctcgccggcatggagatgccttttccctagaagattacaccaaatgtgacttgactgtctatgcaattgacccccaaaccaacagagccatcgatagaaatgagctttttaaatttttggatggcaaactacttgatatcaataaagactttcagccgtattatggggaaggaggacgcattctggagatccggactccagaggcagtgaccagcattaaaaagagaggagaaagtctaggatacacagaaggggccttgttggctctggccttcatcatcatcctctgctgcattcctgccatcttggtggttttggtcagctacagacagtaagtacgtcaagctgagtgtacaaagactgcacgaattcaggccgcattacccgcggctaaaccagcagtgccggctcctgcaccagtggcagcgcccccgccgccgccgccgcctccgccaggtgcgcatctctatgaagaacttggagacagctcaattcttttccttctctaccattttcaacaaagcaggggaaataactcagtctcagaagacaggaaacatcaacaagttgtgatgcccttttcttccaatactattgaggctcacaagtcagctcatgtagacggatcacttaagagcaacaaactgaagtctgcaagaaaattcacatttctatctgatgaggatgacttaagtgcccataatcccctttataaggaaaacataagtcaagtatcaacaaattcagacatttcacagagaacagattttgtagacccattttcacccaaaatacaagccaagagtaagtctctgaggggcccaagagaaaagattcagaggctgtggagtcagtcagtcagcttacccaggaggctgatgaggaaagttccaaatagaccagagatcatagatctgcagcagtggcaaggcaccaggcagaaagctgaaaatgaaaacactggaatctgtacaaacaaaagaggtagcagcaatccattgcttacaactgaagaggcaaatttgacagagaaagaggaaataaggcaaggtgaaacactgatgatagaaggaacagaacagttgaaatctctctcttcagactcttcattttgctttcccaggcctcacttctcattctccactttgccaactgtttcaagaactgtggaactcaaatcagaacctaatgtcatcagttctcctgctgagtgttccttggaactttctccttcaaggccttgtgttttacattcttcactctctaggagagagacacctatttgtatgttacctattgaaaccgaaagaaatatttttgaaaattttgcccatccaccaaacatctctccttctgcctgacattttttccactttccgtttcaacgtctggtcccccaacaagcttcatttctgtccacagagtgtgtctgtataacaggtgttaaatgcacgaccaacttgatgcctgccgagaaaattaagtcctctatgacacagctatcaacaacgacagtgtgtaaaacagaccctcagagagaaccaaaaggcatcctcagacacgttaaaaacttagcagaacttgaaaaatcagtagctaacatgtacagtcaaatagaaaaaaactatctacgcacaaatgtttcagaacttcaaactatgtgcccttcagaagtaacaaatatggaaatcacatctgaacaaaacaaggggagtttgaacaatattgtcgagggaactgaaaaacaatctcacagtcaatctacttcactgtaatgttgcttttcttattttagtcgggcaaacctcttgttgatcatagtcttcaagttgaacatcaaatttgaacgtcaaagaagactctattattttaccccaaattcaatgaaatgcagttttttttctcgtttttaatttaaaaagatattaacctcatcactactaactcactcatataatagatttaccttactttttaaaaactacaaagtagcataatttgttctacatttatttgaaaagtaagtaattttaatctcttttttagtgggaatatgtgggcatgaaaattagatacccaacttaaaccaaaggcatgtctatcatgtggatgcagtaacatttacatttagtttttgatcgtagttttatatgaatgttccaagaaaaaagcagactgttacaaataagttaaaactgatatgattgataggttctgttttttcttgaagcctatgtatttggtaagaagaaatactaccgaagtaaaatataatgtacctagattgtaggagatgacagacataaggtatttcaaaataaatctcaggtgctataacatgtagtcatctgttttctgataagaacatcttttactctgacttgcttttatcttagtagtatgcttatggatttagtagtatgcttatggatttgataaatcttatactttttcagttgctgtcttattctctttatttctcattgtgctttcccttcccttctttataatgaaaataaatcttgagtcgttg

SEQ ID NO: 6885 - protein, 1379 aa, Homo sapiens
MFRQFYLWTCLASGIILGSLFEICLGQYDDGTILVDNMLIKGTAGGPDPTIELSLKDNVDYWVLMDPVKQMLFLNSTGRVLDRDPPMNIHSIVVQVQCINKKVGTIIYHEVRIVVRDRNDNSPTFKHESYYATVNELTPVGTTIFTGFSGDNGATDIDDGPNGQIEYVIQYNPDDPTSNDTFEIPLMLTGNIVLRKRLNYEDKTRYFVIIQANDRAQNLNERRTTTTTLTVDVLDGDDLGPMFLPCVLVPNTRDCRPLTYQAAIPELRTPEELNPIIVTPPIQAIDQDRNIQPPSDRPGILYSILVGTPEDYPRFFHMHPRTAELSLLEPVNRDFHQKFDLVIKAEQDNGHPLPAFAGLHIEILDENNQSPYFTMPSYQGYILESAPVGATISDSLNLTSPLRIVALDKDIEDTKDPELHLFLNDYTSVFTVTQTGITRYLTLLQPVDREEQQTYTFSITAFDGVQESEPVIVNIQVMDANDNTPTFPEISYDVYVYTDMRPGDSVIQLTAVDADEGSNGEITYEILVGAQGDFIINKTTGLITIAPGVEMIVGRTYALTVQAADNAPPAERRNSICTVYIEVLPPNNQSPPRFPQLMYSLEISEAMRVGAVLLNLQATDREGDSITYAIENGDPQRVFNLSETTGILTLGKALDRESTDRYILIITASDGRPDGTSTATVNIVVTDVNDNAPVFDPYLPRNLSVVEEEANAFVGQVKATDPDAGINGQVHYSLGNFNNLFRITSNGSIYTAVKLNREVRDYYELVVVATDGAVHPRHSTLTLAIKVLDIDDNSPVFTNSTYTVLVEENLPAGTTILQIEAKDVDLGANVSYRIRSPEVKHFFALHPFTGELSLLRSLDYEAFPDQEASITFLVEAFDIYGTMPPGIATVTVIVKDMNDYPPVFSKRIYKGMVAPDAVKGTPITTVYAEDADPPGLPASRVRYRVDDVQFPYPASIFEVEEDSGRVITRVNLNEEPTTIFKLVVVAFDDGEPVMSSSATVKILVLHPGEIPRFTQEEYRPPPVSELATKGTMVGVISAAAINQSIVYSIVSGNEEDTFGINNITGVIYVNGPLDYETRTSYVLRVQADSLEVVLANLRVPSKSNTAKVYIEIQDENNHPPVFQKKFYIGGVSEDARMFTSVLRVKATDKDTGNYSVMAYRLIIPPIKEGKEGFVVETYTGLIKTAMLFHNMRRSYFKFQVIATDDYGKGLSGKADVLVSVVNQLDMQVIVSNVPPTLVEKKIEDLTEILDRYVQEQIPGAKVVVESIGARRHGDAFSLEDYTKCDLTVYAIDPQTNRAIDRNELFKFLDGKLLDINKDFQPYYGEGGRILEIRTPEAVTSIKKRGESLGYTEGALLALAFIIILCCIPAILVVLVSYRQ

SEQ ID NO: 6886 - DNA, 3426 bp, Homo sapiens
gctatcaggaggagcaaaagggaaggatctgctgctgggggctcgctgggtgaccctttgccagacgaaaagagctggtcgagagagaagcgcttggcaggagctctctgcgggacctaagctccgtggctgctcgggatccctacgtccgctgctgctgaaggagcagaggggaggacgccagcggttgcttactggagcctggaggagatcagctttgagtgaactttgacagaagatgtttcgacagttttatctctggacatgtttagcttcagggatcatcctgggctctctctttgaaatctgcttgggccagtatgatgatggtacaattctggtggacaacatgctgatcaaagggactgctggaggaccagaccccaccatagaactttctttaaaggataatgtggattactgggtgttgatggatcctgttaagcaaatgcttttcctgaacagcaccggaagagttctggatagagatccaccgatgaacatacactccattgtggtgcaggtccagtgcatcaacaaaaaagtgggcactattatctaccatgaagtgcgaatagtggtgagagacaggaatgacaactcacccactttcaagcatgaaagctactatgccacagtgaatgagctcactccagttggtaccacaatattcacaggattttcaggagacaatggagctacagatatagatgatggaccaaatggacagatagagtatgttattcagtataatccagatgatccgacatccaatgacacctttgaaattcccctaatgttgactggaaatatagtgttaaggaagaggctcaactatgaagataagactcgctactttgtcataatccaagctaatgaccgtgcccaaaatctgaatgagaggcgaaccaccaccaccactctcacagtggatgttctggatggagatgacttgggtccaatgtttcttccttgtgtccttgtgccaaacactcgtgattgccgtccactcacttatcaagctgccatacctgagttgagaactccggaagaactgaaccccattattgttacgccaccaatccaagccattgatcaggaccggaatattcaaccgccatcagataggccaggaatcctctattccatccttgttgggactcctgaggattacccacgatttttccatatgcatcctaggacagcagaacttagtctcctggagccagtaaacagagactttcaccagaaatttgatttggttattaaggctgaacaagacaatggtcatcctcttcctgcctttgccggtctacacattgaaatactggatgaaaacaatcaaagtccatattttacaatgcccagttatcaaggctatatcctggaatctgccccagtgggagcaaccatttcggacagtctcaatttgacttcacctttaagaatagtagctctggacaaggacatagaagatacaaaagacccagagcttcacctttttctgaatgactacacctcagtcttcaccgtcacacagactggtattactcgctacctcaccttacttcaaccagtggacagggaagaacagcaaacttacaccttttcgataacagcatttgatggtgtacaagaaagtgagccagtcatcgtcaatattcaagtgatggatgcaaatgataacacgccaaccttccctgaaatatcctatgatgtgtatgtttatacagacatgagacctggggacagtgtcatacagctcactgcagtcgacgcagacgaagggtcaaatggggagatcacatatgaaatccttgttggggctcagggagacttcatcatcaataaaacaacagggcttatcaccatcgctccaggggtggaaatgatagtcgggcggacttacgcactcacggtccaagcagcggataatgctcctcctgcagagcgaaggaactccatctgcactgtgtatattgaagtgcttccaccaaataatcaaagccctcctcgcttcccacagctgatgtatagccttgaaattagtgaagccatgagggttggtgctgttttattaaatctacaggcaactgatcgagagggagactcaataacatatgccattgagaatggagatcctcagagagtttttaatctttcagaaaccacggggattctaaccttagggaaagcactggacagggaaagcactgatcgctacattctgatcatcacagcttcagatggcaggccagatgggacctcaactgccacagtaaacatagtggtgacagatgtcaatgacaatgctccagtgtttgatccttatctgccaagaaatttatctgtggtggaagaagaagccaatgcctttgtgggtcaagtaaaactatcaacaacgacagtgtgtaaaacagaccctcagagagaaccaaaaggcatcctcagacacgttaaaaacttagcagaacttgaaaaatcagtagctaacatgtacagtcaaatagaaaaaaactatctacgcacaaatgtttcagaacttcaaactatgtgcccttcagaagtaacaaatatggaaatcacatctgaacaaaacaaggggagtttgaacaatattgtcgagggaactgaaaaacaatctcacagtcaatctacttcactgtaatgttgcttttcttattttagtcgggcaaacctcttgttgatcatagtcttcaagttgaacatcaaatttgaacgtcaaagaagactctattattttaccccaaattcaatgaaatgcagttttttttctcgtttttaatttaaaaagatattaacctcatcactactaactcactcatataatagatttaccttactttttaaaaactacaaagtagcataatttgttctacatttatttgaaaagtaagtaattttaatctcttttttagtgggaatatgtgggcatgaaaattagatacccaacttaaaccaaaggcatgtctatcatgtggatgcagtaacatttacatttagtttttgatcgtagttttatatgaatgttccaagaaaaaagcagactgttacaaataagttaaaactgatatgattgataggttctgttttttcttgaagcctatgtatttggtaagaagaaatactaccgaagtaaaatataatgtacctagattgtaggagatgacagacataaggtatttcaaaataaatctcaggtgctataacatgtagtcatctgttttctgataagaacatcttttactctgacttgcttttatcttagtagtatgcttatggatttagtagtatgcttatggatttgataaatcttatactttttcagttgctgtcttattctctttatttctcattgtgctttcccttcccttctttataatgaaaataaatcttgagtcgttg

SEQ ID NO: 6887 - protein, 809 aa, Homo sapiens
MFRQFYLWTCLASGIILGSLFEICLGQYDDGTILVDNMLIKGTAGGPDPTIELSLKDNVDYWVLMDPVKQMLFLNSTGRVLDRDPPMNIHSIVVQVQCINKKVGTIIYHEVRIVVRDRNDNSPTFKHESYYATVNELTPVGTTIFTGFSGDNGATDIDDGPNGQIEYVIQYNPDDPTSNDTFEIPLMLTGNIVLRKRLNYEDKTRYFVIIQANDRAQNLNERRTTTTTLTVDVLDGDDLGPMFLPCVLVPNTRDCRPLTYQAAIPELRTPEELNPIIVTPPIQAIDQDRNIQPPSDRPGILYSILVGTPEDYPRFFHMHPRTAELSLLEPVNRDFHQKFDLVIKAEQDNGHPLPAFAGLHIEILDENNQSPYFTMPSYQGYILESAPVGATISDSLNLTSPLRIVALDKDIEDTKDPELHLFLNDYTSVFTVTQTGITRYLTLLQPVDREEQQTYTFSITAFDGVQESEPVIVNIQVMDANDNTPTFPEISYDVYVYTDMRPGDSVIQLTAVDADEGSNGEITYEILVGAQGDFIINKTTGLITIAPGVEMIVGRTYALTVQAADNAPPAERRNSICTVYIEVLPPNNQSPPRFPQLMYSLEISEAMRVGAVLLNLQATDREGDSITYAIENGDPQRVFNLSETTGILTLGKALDRESTDRYILIITASDGRPDGTSTATVNIVVTDVNDNAPVFDPYLPRNLSVVEEEANAFVGQVKLSTTTVCKTDPQREPKGILRHVKNLAELEKSVANMYSQIEKNYLRTNVSELQTMCPSEVTNMEITSEQNKGSLNNIVEGTEKQSHSQSTSL

SEQ ID NO: 6888 - DNA, 6528 bp, Homo sapiens
ctaatagcgacagatagagggcagacagattcctgctagcagcttagtgttagttgcttgtggtaactaaggcaggtggcatacatctcagaacgtggagaatgatggtatgctttctgagttaacatgttgaactgttttgcttttctaaaaattttcctagtaacattttcttgatgatatgagagtggatatcaatgcctcacagaaacaagaggtggaacatgtgaatgaatcgtcttggaactagattatgagcactggttctttttaaagggatgtgcaagaggcagccttggcaagaaaacttgctgcataatcttacatggactaaagatgaaactttaaaccgcaaatcagctttgagtgaactttgacagaagatgtttcgacagttttatctctggacatgtttagcttcagggatcatcctgggctctctctttgaaatctgcttgggccagtatgatgatggtacaattctggtggacaacatgctgatcaaagggactgctggaggaccagaccccaccatagaactttctttaaaggataatgtggattactgggtgttgatggatcctgttaagcaaatgcttttcctgaacagcaccggaagagttctggatagagatccaccgatgaacatacactccattgtggtgcaggtccagtgcatcaacaaaaaagtgggcactattatctaccatgaagtgcgaatagtggtgagagacaggaatgacaactcacccactttcaagcatgaaagctactatgccacagtgaatgagctcactccagttggtaccacaatattcacaggattttcaggagacaatggagctacagatatagatgatggaccaaatggacagatagagtatgttattcagtataatccagatgatccgacatccaatgacacctttgaaattcccctaatgttgactggaaatatagtgttaaggaagaggctcaactatgaagataagactcgctactttgtcataatccaagctaatgaccgtgcccaaaatctgaatgagaggcgaaccaccaccaccactctcacagtggatgttctggatggagatgacttgggtccaatgtttcttccttgtgtccttgtgccaaacactcgtgattgccgtccactcacttatcaagctgccatacctgagttgagaactccggaagaactgaaccccattattgttacgccaccaatccaagccattgatcaggaccggaatattcaaccgccatcagataggccaggaatcctctattccatccttgttgggactcctgaggattacccacgatttttccatatgcatcctaggacagcagaacttagtctcctggagccagtaaacagagactttcaccagaaatttgatttggttattaaggctgaacaagacaatggtcatcctcttcctgcctttgccggtctacacattgaaatactggatgaaaacaatcaaagtccatattttacaatgcccagttatcaaggctatatcctggaatctgccccagtgggagcaaccatttcggacagtctcaatttgacttcacctttaagaatagtagctctggacaaggacatagaagatacaaaagacccagagcttcacctttttctgaatgactacacctcagtcttcaccgtcacacagactggtattactcgctacctcaccttacttcaaccagtggacagggaagaacagcaaacttacaccttttcgataacagcatttgatggtgtacaagaaagtgagccagtcatcgtcaatattcaagtgatggatgcaaatgataacacgccaaccttccctgaaatatcctatgatgtgtatgtttatacagacatgagacctggggacagtgtcatacagctcactgcagtcgacgcagacgaagggtcaaatggggagatcacatatgaaatccttgttggggctcagggagacttcatcatcaataaaacaacagggcttatcaccatcgctccaggggtggaaatgatagtcgggcggacttacgcactcacggtccaagcagcggataatgctcctcctgcagagcgaaggaactccatctgcactgtgtatattgaagtgcttccaccaaataatcaaagccctcctcgcttcccacagctgatgtatagccttgaaattagtgaagccatgagggttggtgctgttttattaaatctacaggcaactgatcgagagggagactcaataacatatgccattgagaatggagatcctcagagagtttttaatctttcagaaaccacggggattctaaccttagggaaagcactggacagggaaagcactgatcgctacattctgatcatcacagcttcagatggcaggccagatgggacctcaactgccacagtaaacatagtggtgacagatgtcaatgacaatgctccagtgtttgatccttatctgccaagaaatttatctgtggtggaagaagaagccaatgcctttgtgggtcaagtaaaagcaacagaccctgatgctggaataaatggtcaagtgcactacagtttgggtaactttaataatctttttcgtatcacatccaatgggagcatttacacagcagtgaagcttaacagagaagtcagggactactatgaacttgttgttgtggcaacagatggagcagtacaccctcgtcattcaactctaaccttggccatcaaggttttggacattgatgataacagtcctgtgttcaccaattcaacatacactgtccttgttgaagagaatttgccagctgggactaccatccttcaaatagaggccaaagatgtcgaccttggagcaaatgtgtcttaccggataagaagcccagaagtgaagcacttttttgcactacatccatttacaggagaactatcgcttttaaggagtttagattatgaggcatttccagaccaagaagcaagtatcacttttctggtagaggcctttgatatttatggaacaatgccacctggtattgctactgtcacagtgattgtaaaggatatgaatgattatcctcctgtctttagtaaacgaatatacaaagggatggtggctccggatgcagtcaagggtacacctatcacaacagtttatgctgaagatgcagaccctcctggattacctgcaagtcgtgtgaggtatagagtagatgatgtacagtttccttaccctgccagtatttttgaagtggaagaagattctggaagagtaataacacgagtcaatcttaatgaagaacctacaacaatttttaagttggtggtggttgcttttgatgatggggagcctgtgatgtccagcagtgccacagtgaagattcttgtcttacatcctggtgagatcccacgcttcacacaggaggaatatagacctcctccagtaagtgaacttgccaccaaagggaccatggttggtgtaatttctgctgctgccattaatcaaagtattgtgtactccattgtttcaggaaatgaagaagatacatttggaattaataacatcacaggtgttatctatgtgaatggacctctggattatgagaccaggacaagctatgtacttcgagtccaagctgattccctggaagtggtccttgccaatctccgagttccttcaaaaagcaatacagctaaagtatacattgagattcaggatgaaaataatcatcccccagtgtttcagaaaaaattctacatcggaggtgtatctgaagatgcaagaatgtttacttctgtactcagagtgaaggctactgataaagatactggcaattatagtgtcatggcctacagactcataataccaccaattaaagagggaaaagaaggatttgtagtggaaacatatacagggcttatcaaaactgctatgctcttccataatatgaggagatcctacttcaagtttcaagttattgcaactgacgactatgggaagggactgagcggcaaagccgatgtactcgtctccgtggtcaatcagctggatatgcaagtcattgtttccaatgtgcctcctactctagtggaaaaaaagatagaagatcttacagagatcttggatcgctatgttcaggaacaaattcctggtgccaaggtcgtagtggagtccattggagctcgccggcatggagatgccttttccctagaagattacaccaaatgtgacttgactgtctatgcaattgacccccaaaccaacagagccatcgatagaaatgagctttttaaatttttggatggcaaactacttgatatcaataaagactttcagccgtattatggggaaggaggacgcattctggagatccggactccagaggcagtgaccagcattaaaaagagaggagaaagtctaggatacacagaaggggccttgttggctctggccttcatcatcatcctctgctgcattcctgccatcttggtggttttggtcagctacagacagtaagtacgtcaagctgagtgtacaaagactgcacgaattcaggccgcattacccgcggctaaaccagcagtgccggctcctgcaccagtggcagcgcccccgccgccgccgccgcctccgccaggtgcgcatctctatgaagaacttggagacagctcaattcttttccttctctaccattttcaacaaagcaggggaaataactcagtctcagaagacaggaaacatcaacaagttgtgatgcccttttcttccaatactattgaggctcacaagtcagctcatgtagacggatcacttaagagcaacaaactgaagtctgcaagaaaattcacatttctatctgatgaggatgacttaagtgcccataatcccctttataaggaaaacataagtcaagtatcaacaaattcagacatttcacagagaacagattttgtagacccattttcacccaaaatacaagccaagagtaagtctctgaggggcccaagagaaaagattcagaggctgtggagtcagtcagtcagcttacccaggaggctgatgaggaaagttccaaatagaccagagatcatagatctgcagcagtggcaaggcaccaggcagaaagctgaaaatgaaaacactggaatctgtacaaacaaaagaggtagcagcaatccattgcttacaactgaagaggcaaatttgacagagaaagaggaaataaggcaaggtgaaacactgatgatagaaggaacagaacagttgaaatctctctcttcagactcttcattttgctttcccaggcctcacttctcattctccactttgccaactgtttcaagaactgtggaactcaaatcagaacctaatgtcatcagttctcctgctgagtgttccttggaactttctccttcaaggccttgtgttttacattcttcactctctaggagagagacacctatttgtatgttacctattgaaaccgaaagaaatatttttgaaaattttgcccatccaccaaacatctctccttctgcctgacattttttccactttccgtttcaacgtctggtcccccaacaagcttcatttctgtccacagagtgtgtctgtataacaggtgttaaatgcacgaccaacttgatgcctgccgagaaaattaagtcctctatgacacagctatcaacaacgacagtgtgtaaaacagaccctcagagagaaccaaaaggcatcctcagacacgttaaaaacttagcagaacttgaaaaatcagtagctaacatgtacagtcaaatagaaaaaaactatctacgcacaaatgtttcagaacttcaaactatgtgcccttcagaagtaacaaatatggaaatcacatctgaacaaaacaaggggagtttgaacaatattgtcgagggaactgaaaaacaatctcacagtcaatctacttcactgtaatgttgcttttcttattttagtcgggcaaacctcttgttgatcatagtcttcaagttgaacatcaaatttgaacgtcaaagaagactctattattttaccccaaattcaatgaaatgcagttttttttctcgtttttaatttaaaaagatattaacctcatcactactaactcactcatataatagatttaccttactttttaaaaactacaaagtagcataatttgttctacatttatttgaaaagtaagtaattttaatctcttttttagtgggaatatgtgggcatgaaaattagatacccaacttaaaccaaaggcatgtctatcatgtggatgcagtaacatttacatttagtttttgatcgtagttttatatgaatgttccaagaaaaaagcagactgttacaaataagttaaaactgatatgattgataggttctgttttttcttgaagcctatgtatttggtaagaagaaatactaccgaagtaaaatataatgtacctagattgtaggagatgacagacataaggtatttcaaaataaatctcaggtgctataacat

SEQ ID NO: 6889 - protein, 1379 aa, Homo sapiens; identical to SEQ ID NO: 6885

SEQ ID NO: 6890 - DNA, 4161 bp, Homo sapiens
aacgtggagaatgatggtatgctttctgagttaacatgttgaactgttttgcttttctaaaaattttcctagtaacattttcttgatgatatgagagtggatatcaatgcctcacagaaacaagaggtggaacatgtgaatgaatcgtcttggaactagattatgagcactggttctttttaaagggatgtgcaagaggcagccttggcaagaaaacttgctgcataatcttacatggactaaagatgaaactttaaaccgcaaatcagctttgagtgaactttgacagaagatgtttcgacagttttatctctggacatgtttagcttcagggatcatcctgggctctctctttgaaatctgcttgggccagtatgatgatggtacaattctggtggacaacatgctgatcaaagggactgctggaggaccagaccccaccatagaactttctttaaaggataatgtggattactgggtgttgatggatcctgttaagcaaatgcttttcctgaacagcaccggaagagttctggatagagatccaccgatgaacatacactccattgtggtgcaggtccagtgcatcaacaaaaaagtgggcactattatctaccatgaagtgcgaatagtggtgagagacaggaatgacaactcacccactttcaagcatgaaagctactatgccacagtgaatgagctcactccagttggtaccacaatattcacaggattttcaggagacaatggagctacagatatagatgatggaccaaatggacagatagagtatgttattcagtataatccagatgatccgacatccaatgacacctttgaaattcccctaatgttgactggaaatatagtgttaaggaagaggctcaactatgaagataagactcgctactttgtcataatccaagctaatgaccgtgcccaaaatctgaatgagaggcgaaccaccaccaccactctcacagtggatgttctggatggagatgacttgggtccaatgtttcttccttgtgtccttgtgccaaacactcgtgattgccgtccactcacttatcaagctgccatacctgagttgagaactccggaagaactgaaccccattattgttacgccaccaatccaagccattgatcaggaccggaatattcaaccgccatcagataggccaggaatcctctattccatccttgttgggactcctgaggattacccacgatttttccatatgcatcctaggacagcagaacttagtctcctggagccagtaaacagagactttcaccagaaatttgatttggttattaaggctgaacaagacaatggtcatcctcttcctgcctttgccggtctacacattgaaatactggatgaaaacaatcaaagtccatattttacaatgcccagttatcaaggctatatcctggaatctgccccagtgggagcaaccatttcggacagtctcaatttgacttcacctttaagaatagtagctctggacaaggacatagaagatacaaaagacccagagcttcacctttttctgaatgactacacctcagtcttcaccgtcacacagactggtattactcgctacctcaccttacttcaaccagtggacagggaagaacagcaaacttacaccttttcgataacagcatttgatggtgtacaagaaagtgagccagtcatcgtcaatattcaagtgatggatgcaaatgataacacgccaaccttccctgaaatatcctatgatgtgtatgtttatacagacatgagacctggggacagtgtcatacagctcactgcagtcgacgcagacgaagggtcaaatggggagatcacatatgaaatccttgttggggctcagggagacttcatcatcaataaaacaacagggcttatcaccatcgctccaggggtggaaatgatagtcgggcggacttacgcactcacggtccaagcagcggataatgctcctcctgcagagcgaaggaactccatctgcactgtgtatattgaagtgcttccaccaaataatcaaagccctcctcgcttcccacagctgatgtatagccttgaaattagtgaagccatgagggttggtgctgttttattaaatctacaggcaactgatcgagagggagactcaataacatatgccattgagaatggagatcctcagagagtttttaatctttcagaaaccacggggattctaaccttagggaaagcactggacagggaaagcactgatcgctacattctgatcatcacagcttcagatggcaggccagatgggacctcaactgccacagtaaacatagtggtgacagatgtcaatgacaatgctccagtgtttgatccttatctgccaagaaatttatctgtggtggaagaagaagccaatgcctttgtgggtcaagtaaaagcaacagaccctgatgctggaataaatggtcaagtgcactacagtttgggtaactttaataatctttttcgtatcacatccaatgggagcatttacacagcagtgaagcttaacagagaagtcagggactactatgaacttgttgttgtggcaacagatggagcagtacaccctcgtcattcaactctaaccttggccatcaaggttttggacattgatgataacagtcctgtgttcaccaattcaacatacactgtccttgttgaagagaatttgccagctgggactaccatccttcaaatagaggccaaagatgtcgaccttggagcaaatgtgtcttaccggataagaagcccagaagtgaagcacttttttgcactacatccatttacaggagaactatcgcttttaaggagtttagattatgaggcatttccagaccaagaagcaagtatcacttttctggtagaggcctttgatatttatggaacaatgccacctggtattgctactgtcacagtgattgtaaaggatatgaatgattatcctcctgtctttagtaaacgaatatacaaagggatggtggctccggatgcagtcaagggtacacctatcacaacagtttatgctgaagatgcagaccctcctgtaagtagaaggcattgattaatattctgaactgtactgagaaaaatccttaacactcataaatgaccgaatcacaagacagcaaaagtagtctctgtaaatttcaccctatttattcatacattttatgttcttttacttatttcatccacaggtacagagcatatttcagatgactattattgaacctagacaaagaatatgctttttgtttttctagaatgcacaatgtactaattactaatttatctaacaatgataaatatatatgaattgtctccatttgtaagcttcacttaatctggatatgttttaaatttatgtattttccactgtatgcatatatgactattttgttagcaaactccaaatcaacatatcacatgaaacttatattgaatgtgtttattttggtaaattaaaaagcttaagattgcttacagaaaatagttaacattcttttatcatatagaactttacttttttgagatatcccaaattatctttcaaggcaaggttttaattaaaatattattatagtgagagtgataaaataccatgtataattaatagtatacatataaaaaagctttctataaataccttgttttataaatattaattattatcctgatgatttaaatttttctctgagtgggctcacactgtaagttggtggctgataaattttagaaaaatacaaataaaagttaaatgaactattttagaagagtaagaaaataaaatcctgaatcttataagtgatttagaagttctgttttctattgctaatataaatagtatttcttttaatgcttgtatttaattaaaagtgaatggccatcataacatttttcagcttcgatttggacaagtcttataaactctattgtgactatatggaatcaaaatgtattaatgttaatatgaaagtggtgggctttaattcagaagctccttttcttaagtgtgttaaaatgtctttgaaactgctttattgtgctttgggatatatgataggcaaaaatttcatagacttgaacccatcaataaagatagtgaatgtg

SEQ ID NO: 6891 - protein, 939 aa, Homo sapiens
MFRQFYLWTCLASGIILGSLFEICLGQYDDGTILVDNMLIKGTAGGPDPTIELSLKDNVDYWVLMDPVKQMLFLNSTGRVLDRDPPMNIHSIVVQVQCINKKVGTIIYHEVRIVVRDRNDNSPTFKHESYYATVNELTPVGTTIFTGFSGDNGATDIDDGPNGQIEYVIQYNPDDPTSNDTFEIPLMLTGNIVLRKRLNYEDKTRYFVIIQANDRAQNLNERRTTTTTLTVDVLDGDDLGPMFLPCVLVPNTRDCRPLTYQAAIPELRTPEELNPIIVTPPIQAIDQDRNIQPPSDRPGILYSILVGTPEDYPRFFHMHPRTAELSLLEPVNRDFHQKFDLVIKAEQDNGHPLPAFAGLHIEILDENNQSPYFTMPSYQGYILESAPVGATISDSLNLTSPLRIVALDKDIEDTKDPELHLFLNDYTSVFTVTQTGITRYLTLLQPVDREEQQTYTFSITAFDGVQESEPVIVNIQVMDANDNTPTFPEISYDVYVYTDMRPGDSVIQLTAVDADEGSNGEITYEILVGAQGDFIINKTTGLITIAPGVEMIVGRTYALTVQAADNAPPAERRNSICTVYIEVLPPNNQSPPRFPQLMYSLEISEAMRVGAVLLNLQATDREGDSITYAIENGDPQRVFNLSETTGILTLGKALDRESTDRYILIITASDGRPDGTSTATVNIVVTDVNDNAPVFDPYLPRNLSVVEEEANAFVGQVKATDPDAGINGQVHYSLGNFNNLFRITSNGSIYTAVKLNREVRDYYELVVVATDGAVHPRHSTLTLAIKVLDIDDNSPVFTNSTYTVLVEENLPAGTTILQIEAKDVDLGANVSYRIRSPEVKHFFALHPFTGELSLLRSLDYEAFPDQEASITFLVEAFDIYGTMPPGIATVTVIVKDMNDYPPVFSKRIYKGMVAPDAVKGTPITTVYAEDADPPVSRRH

SEQ ID NO: 6892 - DNA, 582 bp, Homo sapiens
agttgcttgtggtaactaaggcaggtggcatacatctcagaacgtggagaatgatggtatgctttctgagttaacatgttgaactgttttgcttttctaaaaattttcctagtaacattttcttgatgatatgagagtggatatcaatgcctcacagaaacaagaggtggaacatgtgaatgaatcgtcttggaactagattatgagcactggttctttttaaagggatgtgcaagaggcagccttggcaagaaaacttgctgcataatcttacatggactaaagatgaaactttaaaccgcaaatcagctttgagtgaactttgacagaagatgtttcgacagttttatctctggacatgtttagcttcagggatcatcctgggctctctctttgaaatctgcttgggccagtatgatgatgattgcaaactagctaggggaggaccaccagctaccatagttgctattgatgaagaaagtcggaatggtacaattctggtggacaacatgctgatcaaagggactgctggaggaccagaccccaccatagaactttctttaaaggataatgtggattact

SEQ ID NO: 6893 - protein, 82 aa, Homo sapiens
MFRQFYLWTCLASGIILGSLFEICLGQYDDDCKLARGGPPATIVAIDEESRNGTILVDNMLIKGTAGGPDPTIELSLKDNVD

SEQ ID NO: 6894 - DNA, 720 bp, Homo sapiens
ggggacgggcgggggaccgacctctgcgcagcccaggccgccgcgcgcacacaccgggcccggctcctgagggcgccagcgcggccccggggagcgcgaggagccggcgaagcgcgcggcctgccgttggcggcctggtccgcagcgccctgcgcccacccgccccggacgtggggcccaagcccccgtgaagatggtgtcctggatgatctccagagccgtggtgctggtgtttggaatgctttatcctgcatattattcatacaaagctgtgaaaacaaaaaacgtgaaggaatatgttcgatggatgatgtactggattgtttttgctctctatactgtgattgaaacagtagccgatcaaacagttgcttggtttcccctgtactatgagctgaagattgcttttgtcatatggctgctttctccctataccaaaggagcaagtttaatatatagaaaattccttcatccacttctttcttcaaaggaaagggagattgatgattatattgtacaagcaaaggaacgaggctatgaaaccatggtaaactttggacggcaaggtttaaaccttgcagctactgctgctgttactgcagcagtaaagagccaaggagcaataactgaacgtttaagaagcttcagtatgcatgatttaacaactatccaaggtgatgagcctgtgggacaaagaccataccaacctctaccagaagc

SEQ ID NO: 6895 - protein, 174 aa, Homo sapiens
MVSWMISRAVVLVFGMLYPAYYSYKAVKTKNVKEYVRWMMYWIVFALYTVIETVADQTVAWFPLYYELKIAFVIWLLSPYTKGASLIYRKFLHPLLSSKEREIDDYIVQAKERGYETMVNFGRQGLNLAATAAVTAAVKSQGAITERLRSFSMHDLTTIQGDEPVGQRPYQPLP

SEQ ID NO: 6896 - DNA, 1069 bp, Homo sapiens
ggggacgggcgggggaccgacctctgcgcagcccaggccgccgcgcgcacacaccgggcccggctcctgagggcgccagcgcggccccggggagcgcgaggagccggcgaagcgcgcggcctgccgttggcggcctggtccgcagcgccctgcgcccacccgccccggacgtggggcccaagcccccgtgaagatggtgtcctggatgatctccagagccgtggtgctggtgtttggaatgctttatcctgcatattattcatacaaagctgtgaaaacaaaaaacgtgaaggaatatgttcgatggatgatgtactggattgtttttgctctctatactgtgattgaaacagtagccgatcaaacagttgcttggtttcccctgtactatgagctgaagattgcttttgtcatatggctgctttctccctataccaaaggagcaagtttaatatatagaaaattccttcatccacttctttcttcaaaggaaagggagattgatgattatattgtacaagcaaaggaacgaggctatgaaaccatggtaaactttggacggcaaggtttaaaccttgcagctactgctgctgttactgcagcagtaaagagccaaggagcaataactgaacgtttaagaagcttcagtatgcatgatttaacaactatccaaggtgatgagcctgtgggacaaagaccataccaacctctaccagaagcaaaaaagaaaagtaaaccagcccccagtgaatcagcaggttatggaattccactgaaagacggagatgagaaaacagatgaagaagcagaggggccatattcagataatgagatgttaacacacaaagggcttcgaagatcgcaaagcatgaaatctgtgaaaaccaccaaaggccgcaaagaggtgcggtacgggtcactaaaatacaaagtgaagaaacgaccacaagtgtatttttagtcatctacacgtcaaatatcccaagacagattatgctaaatacatcgacttcatcttctaacatgatatattcaggatttacacattaaaatgattatttaaattgtg

SEQ ID NO: 6897 - protein, 255 aa, Homo sapiens; identical to SEQ ID NO: 951

SEQ ID NO: 6898 - DNA, 2303 bp, Homo sapiens
ggggacgggcgggggaccgacctctgcgcagcccaggccgccgcgcgcacacaccgggcccggctcctgagggcgccagcgcggccccggggagcgcgaggagccggcgaagcgcgcggcctgccgttggcggcctggtccgcagcgccctgcgcccacccgccccggacgtggggcccaagcccccgtgaagatggtgtcctggatgatctccagagccgtggtgctggtgtttggaatgctttatcctgcatattattcatacaaagctgtgaaaacaaaaaacgtgaaggaatatgttcgatggatgatgtactggattgtttttgctctctatactgtgattgaaacagtagccgatcaaacagttgcttggtttcccctgtactatgagctgaagattgcttttgtcatatggctgctttctccctataccaaaggagcaagtttaatatatagaaaattccttcatccacttctttcttcaaaggaaagggagattgatgattatattgtacaagcaaaggaacgaggctatgaaaccatggtaaactttggacggcaaggtttaaaccttgcagctactgctgctgttactgcagcagtaaagagccaaggagcaataactgaacgtttaagaagcttcagtatgcatgatttaacaactatccaaggtgatgagcctgtgggacaaagaccataccaacctctaccagaagcaaaaaagaaaagtaaaccagcccccagtgaatcagcaggttatggaattccactgaaagacggagatgagaaaacagatgaagaagcagaggggccatattcagataatgagatgttaacacacaaagggcttcgaagatcgcaaagcatgaaatctgtgaaaaccaccaaaggccgcaaagaggtgcggtacgggtcactaaaatacaaagtgaagaaacgaccacaagtgtatttttagtcatctacacgtcaaatatcccaagacagattatgctaaatacatcgacttcatcttctaacatgatatattcaggatttacacattaaaatgattatttaaattgtggcagtgatggggtttactttcatgaatttaaattgtttttatttctgtaacaattgcttccaaatattgactactaaaggcagttctgcaagatgtactaaatatgtatattagaaattatagaaaatcatgttgtccgttttcaaattcatcaacagcctagagtgcctgagatataagatgaaacacaaatccacagtatacttgaaaggagcctttttacggttcaggataaatcagcctttgtgatgtactgtgtttacctccttttgtgttgtatctggtaattaaataggcctcagattcagcagtgacataacaaggacataatgtaagataataaagtaggttttatatattctttaaatttttacttatataatactttctagtttttccaccatcagctgaaagtttttgaaacaaatatttgaaaaccaggtatccacacatagcacttttattcctgactagttttgcacacttgaaaattgtttacttattttacaactgttttactgatgctatctttattgtttttgccgtattctgacatgtcaaatctatgccttgaattatatcatctcttttcctgtgggtttcatttgttaaattcattggattttaataatataaaagtatagctaattgttcagttttaactatttttaattatcttcttaacaaataagaagttgctttaaacattaaccaattttctatatttagctatacagagtaattgaacttaacatgtttttgtcaacaccaattacattttcagcttttaaaaatggtagcttttgtgaaatagaatcagtgaccagtatagcacttagatcccttctaactcatataatttttctcagccaatccattcacaagcttggcattgacatgtgctgctagtttataaactggcattgacgaaaatcatttgaatctcttctggctgagataatttgccaatgcaaaatacagttgtcattaatcctgcacattagaaattattagaaacatattactttttaactttaaatctcaaagagattttgagttattgaattcttaaggctttcttagcttgaactgataactatgcattatgaaccctaagtcaatatatttttggtggttttagtgatcagtaatcaaatttgtacttattatgcttgttcaggtaatttacttgactgttctatttgtttgtccaaaagataaaatgatgagagag

SEQ ID NO: 6899 - protein, 255 aa, Homo sapiens; identical to SEQ ID NO: 951

SEQ ID NO: 6900 - DNA, 4669 bp, Homo sapiens
ggggacgggcgggggaccgacctctgcgcagcccaggccgccgcgcgcacacaccgggcccggctcctgagggcgccagcgcggccccggggagcgcgaggagccggcgaagcgcgcggcctgccgttggcggcctggtccgcagcgccctgcgcccacccgccccggacgtggggcccaagcccccgtgaagatggtgtcctggatgatctccagagccgtggtgctggtgtttggaatgctttatcctgcatattattcatacaaagctgtgaaaacaaaaaacgtgaaggaatatgttcgatggatgatgtactggattgtttttgctctctatactgtgattgaaacagtagccgatcaaacagttgcttggtttcccctgtactatgagctgaagattgcttttgtcatatggctgctttctccctataccaaaggagcaagtttaatatatagaaaattccttcatccacttctttcttcaaaggaaagggagattgatgattatattgtacaagcaaaggaacgaggctatgaaaccatggtaaactttggacggcaaggtttaaaccttgcagctactgctgctgttactgcagcagtaaagagccaaggagcaataactgaacgtttaagaagcttcagtatgcatgatttaacaactatccaaggtgatgagcctgtgggacaaagaccataccaacctctaccagaagcaaaaaagaaaagtaaaccagcccccagtgaatcagcaggttatggaattccactgaaagacggagatgagaaaacagatgaagaagcagaggggccatattcagataatgagatgttaacacacaaagggcttcgaagatcgcaaagcatgaaatctgtgaaaaccaccaaaggccgcaaagaggtgcggtacgggtcactaaaatacaaagtgaagaaacgaccacaagtgtatttttagtcatctacacgtcaaatatcccaagacagattatgctaaatacatcgacttcatcttctaacatgatatattcaggatttacacattaaaatgattatttaaattgtggcagtgatggggtttactttcatgaatttaaattgtttttatttctgtaacaattgcttccaaatattgactactaaaggcagttctgcaagatgtactaaatatgtatattagaaattatagaaaatcatgttgtccgttttcaaattcatcaacagcctagagtgcctgagatataagatgaaacacaaatccacagtatacttgaaaggagcctttttacggttcaggataaatcagcctttgtgatgtactgtgtttacctccttttgtgttgtatctggtaattaaataggcctcagattcagcagtgacataacaaggacataatgtaagataataaagtaggttttatatattctttaaatttttacttatataatactttctagtttttccaccatcagctgaaagtttttgaaacaaatatttgaaaaccaggtatccacacatagcacttttattcctgactagttttgcacacttgaaaattgtttacttattttacaactgttttactgatgctatctttattgtttttgccgtattctgacatgtcaaatctatgccttgaattatatcatctcttttcctgtgggtttcatttgttaaattcattggattttaataatataaaagtatagctaattgttcagttttaactatttttaattatcttcttaacaaataagaagttgctttaaacattaaccaattttctatatttagctatacagagtaattgaacttaacatgtttttgtcaacaccaattacattttcagcttttaaaaatggtagcttttgtgaaatagaatcagtgaccagtatagcacttagatcccttctaactcatataatttttctcagccaatccattcacaagcttggcattgacatgtgctgctagtttataaactggcattgacgaaaatcatttgaatctcttctggctgagataatttgccaatgcaaaatacagttgtcattaatcctgcacattagaaattattagaaacatattactttttaactttaaatctcaaagagattttgagttattgaattcttaaggctttcttagcttgaactgataactatgcattatgaaccctaagtcaatatatttttggtggttttagtgatcagtaatcaaatttgtacttattatgcttgttcaggtaatttacttgactgttctatttgtttgtccaaaagataaaatgatgagagagattcgagaggtctttgatctgtctcccttttaagaaatgaagccagctggtaatgtatattcaggacttcctcagagtattggccaagaacataatgtttacacaggagtaccttggtataatgcatacattgtctcatgatactagtcataaaatattttatggattatttcacattcttcatatataacaagtaaaattaattcagttttcttctcccaacgtttaattctgaataactctatctactttaccctaatttttagcctcttaatttctggaaggactctaatttctattccaaatttctatgaattctaattgtaaattatcggaacagagttttatttatatgacctggtactagacttcttaatataactgttacactgtccttgtctttcctactcaaagacagtatcatctgaagttgcctaataaggtcatgtgagtcaagaactttatctgtgggagctgatttgcaccattttaccttttttttttttttttttttgagacggagtcttgctctgtcaccaggctggagtgcagtggcgcgatctcggctcactacaacctctgcctcccgggttcgagcgattctcctgcctcggcctcccgagtaactgggtctacaggcccgtgctaccacgcccagctaatttttgtctttttagtagagacagggtttaaccatgttgcccaggatggtctccatctcttgacctcgtgatccgcccgcctcggcctcccaaacttctgggattacaggcgtgagccaccgcacccagccaccattttatctctctaaagtctggtcccagtattaaacctattctttagtaaactcatattactgttctaaattgaagaaattatttattactctgtacttctagactcaaaattctttatcaaagatagtctcaaagaggtagtacaagtcctgtttaactgcactttttcacattcacagtgcttcctctgatatctttccttacatcattatacactgttgatatcattttactcttctttctcttctacatttcttaaattttggttcttttcctgtacatgtgttttagcggggcccttttctttgaactttgtctaattagcctgtacatttttgtttcttttaaggtagaacagatctttttttgtttctccttttaagtctactggttttaaaagaggtaaatgtatccatagaccacagtgccttgctttttcctctgccagcacatggagcacgggattagatgcacaaacctatttagggaactattttggtagatgtttgagtttatacagaaattgcagctggtattttattttgctgtacatttactcaacttgtccattagtatttaactatttccagagtttgtttaggagtaagaattgacccattcgttagtttaccatattttttcctggtataaaaaggagccagaaataagccttattgctaaataattaattatgtaagcccacctaggtcctgcataagatccccctcacatacttcacaatatatatgtgtgtgtgtgtgtgtgtgtgtgtgtgtgtgtgtgtgtgtgtatttggctaaaaaattatactgccaaaattactgattataaatacttgactacactgattgatgggacaaaatgattaaagtattttcagggatcttattccatatgtcaccaccaaagatttctacagtgttataaagtatataaatattccaaatttctgtggttaaatatttttttcttttttttccttttttagaataacacagtctgtgctttccaaaaatgcttgaacttttatgttgttaagaaatatataatgatatcttacattaagcatgagtctaatttgtattaattgggatggactaaattttcatttgattatcaggaaaattaaggagttatatatttaaaagcaattttctgtgttttcttctttgtaagttgactcatttgtgaagcaattaggcaaattttgagaagatcattgttattgtggtttgcagtatatatttcttagtaaatatcacttaagattaaatttttcagaaagaaaattatagcttttttcccaaaatatttttaagatttaatctttttgtagtatgctacagatttaattatattaactcttttttaagacattgaccatgacttaacattttgccttctaacaccttttaaatctatgtactttaatagttaagagaaaataagtttgcagatttttaataatctgtttgtaaaaggctatctctaagcctagtatgtgggtaattttacaggtgtgttttttgataactttaatataaaataaactcattttatttgtggcaa

SEQ ID NO: 6901 - protein, 255 aa, Homo sapiens; identical to SEQ ID NO: 951

SEQ ID NO: 6902 - DNA, 5208 bp, Homo sapiens
ggggacgggcgggggaccgacctctgcgcagcccaggccgccgcgcgcacacaccgggcccggctcctgagggcgccagcgcggccccggggagcgcgaggagccggcgaagcgcgcggcctgccgttggcggcctggtccgcagcgccctgcgcccacccgccccggacgtggggcccaagcccccgtgaagatggtgtcctggatgatctccagagccgtggtgctggtgtttggaatgctttatcctgcatattattcatacaaagctgtgaaaacaaaaaacgtgaaggaatatgttcgatggatgatgtactggattgtttttgctctctatactgtgattgaaacagtagccgatcaaacagttgcttggtttcccctgtactatgagctgaagattgcttttgtcatatggctgctttctccctataccaaaggagcaagtttaatatatagaaaattccttcatccacttctttcttcaaaggaaagggagattgatgattatattgtacaagcaaaggaacgaggctatgaaaccatggtaaactttggacggcaaggtttaaaccttgcagctactgctgctgttactgcagcagtaaagagccaaggagcaataactgaacgtttaagaagcttcagtatgcatgatttaacaactatccaaggtgatgagcctgtgggacaaagaccataccaacctctaccagaagcaaaaaagaaaagtaaaccagcccccagtgaatcagcaggttatggaattccactgaaagacggagatgagaaaacagatgaagaagcagaggggccatattcagataatgagatgttaacacacaaagggcttcgaagatcgcaaagcatgaaatctgtgaaaaccaccaaaggccgcaaagaggtgcggtacgggtcactaaaatacaaagtgaagaaacgaccacaagtgtatttttagtcatctacacgtcaaatatcccaagacagattatgctaaatacatcgacttcatcttctaacatgatatattcaggatttacacattaaaatgattatttaaattgtggcagtgatggggtttactttcatgaatttaaattgtttttatttctgtaacaattgcttccaaatattgactactaaaggcagttctgcaagatgtactaaatatgtatattagaaattatagaaaatcatgttgtccgttttcaaattcatcaacagcctagagtgcctgagatataagatgaaacacaaatccacagtatacttgaaaggagcctttttacggttcaggataaatcagcctttgtgatgtactgtgtttacctccttttgtgttgtatctggtaattaaataggcctcagattcagcagtgacataacaaggacataatgtaagataataaagtaggttttatatattctttaaatttttacttatataatactttctagtttttccaccatcagctgaaagtttttgaaacaaatatttgaaaaccaggtatccacacatagcacttttattcctgactagttttgcacacttgaaaattgtttacttattttacaactgttttactgatgctatctttattgtttttgccgtattctgacatgtcaaatctatgccttgaattatatcatctcttttcctgtgggtttcatttgttaaattcattggattttaataatataaaagtatagctaattgttcagttttaactatttttaattatcttcttaacaaataagaagttgctttaaacattaaccaattttctatatttagctatacagagtaattgaacttaacatgtttttgtcaacaccaattacattttcagcttttaaaaatggtagcttttgtgaaatagaatcagtgaccagtatagcacttagatcccttctaactcatataatttttctcagccaatccattcacaagcttggcattgacatgtgctgctagtttataaactggcattgacgaaaatcatttgaatctcttctggctgagataatttgccaatgcaaaatacagttgtcattaatcctgcacattagaaattattagaaacatattactttttaactttaaatctcaaagagattttgagttattgaattcttaaggctttcttagcttgaactgataactatgcattatgaaccctaagtcaatatatttttggtggttttagtgatcagtaatcaaatttgtacttattatgcttgttcaggtaatttacttgactgttctatttgtttgtccaaaagataaaatgatgagagagattcgagaggtctttgatctgtctcccttttaagaaatgaagccagctggtaatgtatattcaggacttcctcagagtattggccaagaacataatgtttacacaggagtaccttggtataatgcatacattgtctcatgatactagtcataaaatattttatggattatttcacattcttcatatataacaagtaaaattaattcagttttcttctcccaacgtttaattctgaataactctatctactttaccctaatttttagcctcttaatttctggaaggactctaatttctattccaaatttctatgaattctaattgtaaattatcggaacagagttttatttatatgacctggtactagacttcttaatataactgttacactgtccttgtctttcctactcaaagacagtatcatctgaagttgcctaataaggtcatgtgagtcaagaactttatctgtgggagctgatttgcaccattttaccttttttttttttttttttttgagacggagtcttgctctgtcaccaggctggagtgcagtggcgcgatctcggctcactacaacctctgcctcccgggttcgagcgattctcctgcctcggcctcccgagtaactgggtctacaggcccgtgctaccacgcccagctaatttttgtctttttagtagagacagggtttaaccatgttgcccaggatggtctccatctcttgacctcgtgatccgcccgcctcggcctcccaaacttctgggattacaggcgtgagccaccgcacccagccaccattttatctctctaaagtctggtcccagtattaaacctattctttagtaaactcatattactgttctaaattgaagaaattatttattactctgtacttctagactcaaaattctttatcaaagatagtctcaaagaggtagtacaagtcctgtttaactgcactttttcacattcacagtgcttcctctgatatctttccttacatcattatacactgttgatatcattttactcttctttctcttctacatttcttaaattttggttcttttcctgtacatgtgttttagcggggcccttttctttgaactttgtctaattagcctgtacatttttgtttcttttaaggtagaacagatctttttttgtttctccttttaagtctactggttttaaaagaggtaaatgtatccatagaccacagtgccttgctttttcctctgccagcacatggagcacgggattagatgcacaaacctatttagggaactattttggtagatgtttgagtttatacagaaattgcagctggtattttattttgctgtacatttactcaacttgtccattagtatttaactatttccagagtttgtttaggagtaagaattgacccattcgttagtttaccatattttttcctggtataaaaaggagccagaaataagccttattgctaaataattaattatgtaagcccacctaggtcctgcataagatccccctcacatacttcacaatatatatgtgtgtgtgtgtgtgtgtgtgtgtgtgtgtgtgtgtgtgtgtatttggctaaaaaattatactgccaaaattactgattataaatacttgactacactgattgatgggacaaaatgattaaagtattttcagggatcttattccatatgtcaccaccaaagatttctacagtgttataaagtatataaatattccaaatttctgtggttaaatatttttttcttttttttccttttttagaataacacagtctgtgctttccaaaaatgcttgaacttttatgttgttaagaaatatataatgatatcttacattaagcatgagtctaatttgtattaattgggatggactaaattttcatttgattatcaggaaaattaaggagttatatatttaaaagcaattttctgtgttttcttctttgtaagttgactcatttgtgaagcaattaggcaaattttgagaagatcattgttattgtggtttgcagtatatatttcttagtaaatatcacttaagattaaatttttcagaaagaaaattatagcttttttcccaaaatatttttaagatttaatctttttgtagtatgctacagatttaattatattaactcttttttaagacattgaccatgacttaacattttgccttctaacaccttttaaatctatgtactttaatagttaagagaaaataagtttgcagatttttaataatctgtttgtaaaaggctatctctaagcctagtatgtgggtaattttacaggtgtgttttttgataactttaatataaaataaactcattttatttgtggcaattcgcgtttctttttttatgccagagtacatatgttggattccatgaattggtattacttattattatgtgttgattaaatatatgcacacacttaggattacagatcacagagcaaattatgaaaatcataaacattctggtatggtcatccataggattatgaaaaagaaatactgaattgttaaatttggatgttagaaaggaaagataggaaaaacaatgagtacagaaatcctcaccatcaatttggatgggttagctgtctcaggcataaaatgtaacacaaaattcagatttatgtatcctggaaatgttctggggttccatctgttttaaagttagacgtctgtctgcctcacatttaagctttagagagaaatcctatgttttaagaagtttctttgtgttacttcattatgacacataatgcgtgttaaggtctttctagatagcattttaaatggaattattttcattttcattatgaggtatatacttgtaatgatctaaagaggttagaaatataaataaaaattc

SEQ ID NO: 6903 - protein, 255 aa, Homo sapiens; identical to SEQ ID NO: 951

SEQ ID NO: 6904 - DNA, 1441 bp, Homo sapiens
tcccctctgttccagcgctgagacgcaggcctttcctggcgcgaagcgactcgccccggagctcccctgcaccgtcctgggtgtcaggacgcgtcaacccagatgacccgacccggagatcctggatcctctgccctcttccccctaccaagtccttaaccggagagggaggagctaccaatgtcctccagacgttctccaaagcccgagctgccgggagaagcttgctcaaggcgggtgcgcccctcagacgtttgtttgcacgcaggggttttgacgtttcgctaagcaacagcgtttgccagggaatcagggctgtttcgaagagcttgcgtctatttgatgctcccatcttgaacaaatcgtttccattcgatttgtttaaccaaggcgagggcggactatgttgttacttaaaagttattcttcatccaagctgtcctcagattttcatctaagggtgtcataacaccccaggtcgttgcgcaaatgttttgtgacaatttagaaaaccagaggggggaaatatccttagagaaaaaatcataaccaacaagaaaattatgttaaatgatgttggtcctttttcatcggatggtcccagttgacacatagtcttttacaaaaccagtgactattcacagtcttcaatttatggcacatctcccggtgggggcgaagtgcatgaatgggtcccaccttattcaccagctgaaactctgaacaagccttggggtttcctctcccaaagactgccaggcttcactaagaatcaaaacaaaacaggatactaaatgcctgcggttcctttttccataatttttttcttttaaccagcctttcacctcacccaaaggccacaatgaagtcgaagaaacctgtagatgacagctttcacagtctttctcttgtcttttcatgtactgaagtatgttagagatctgactggcagcttcaggacactcggaagcaagggggacactctattaaggatcgctgaagtatgcccacatgtcaggtttctctcagatgtggttaagtctggaagtggaggaaacaactggtgtctaaatatgactgaaacgtccagtggacaatgcagaaataagagaggcattcttgacacagtttctgtatgctgaagatgccaaaatattcaagagccatcggattcctgaagctgctctcactgcaccagcaaaggcaaaagcagccatccctctcagctctaatttatggatatggatgtatcccaaaccccatcccttcttactacctcctgcactagcaactagtccaaaccaccatcatttcttgcccaacctgctgcaatcacctcttaagtattttccctgcttccactccttcaccgtatatttcattctccacacagcagccaaagcggtttttttaaaaaatacaaatgaaatgtgctcactct

SEQ ID NO: 6905 - protein, 85 aa, Homo sapiens
MTAFTVFLLSFHVLKYVRDLTGSFRTLGSKGDTLLRIAEVCPHVRFLSDVVKSGSGGNNWCLNMTETSSGQCRNKRGILDTVSVC

SEQ ID NO: 6906 - DNA, 2310 bp, Homo sapiens
cgctttccccttcgaagactctccccagagctgccagatgaacgcccacgccaccttctcccaccaaaggtggatccagctaacaggagactggatcgcgaccatagcgcgtttgtgcccagttctggggaaagcctcatgttagcgagtggccctcggctcgtctcgcagatcggccaagtacgcggaggccgcgcggtttcaccattaatactcctgaaggacaatagctcatcaagccccaccgaaagccccggacccgtcgcggagcctgggctggcgggggatgaggctgagcaactcctcctagaggtggttatgtggagaaggagcaatcccttctccctcctcctcctccccccgctactatccgcggcccagagaactgccgcttgccgccattgacacgcacagatagaacccaaagaaaggcaaagagtcctgcccggcaccggcgccgcgtgggccaaacctgcgcccgtggaggggcgcgcagagggcaccgggcgccgggagcaggcggcgcagcaccagcattgtgttagtgccgggaggccactgtgtcagcaagctgagagggaaactgaagcaagatgtcgggccggagtgggaagaagaaaatgtccaagctgtcccgttcagctagggcaggtgtcatctttccagtggggaggctgatgcgttatctgaagaaagggacgttcaagtaccggatcagcgtgggcgcccctgtctacatggcggcagtcattgagtacctggcagcggaaattctagaattggccggcaatgccgcgagggacaacaagaaggcccggatagccccgagacacatcttgctggcagttgccaatgacgaggagctcaaccagctgctaaaaggagtgaccatcgccagtggaggcgtcctgcccagaattcaccccgaactgctggccaaaaagcgagggaccaaaggcaagtcggaaacgatcctctccccacccccagagaaaagaggcaggaaggccacgtcaggcaagaagggggggaagaaatccaaggctgccaaaccacggacgtccaaaaagtccaaaccaaaggacagcgataaagaaggaacttcaaattccacctctgaagatgggccaggggatggattcaccattctgtcttctaagagccttgttctgggacagaagctgtccttaacccagagtgacatcagccatattggctccatgagagtggagggcattgtccacccaaccacagccgaaattgacctcaaagaagatataggtaaagccttggaaaaggctgggggaaaagagttcttggaaacggtaaaggagcttcgcaaatcccaaggccctttggaagtcgccgaagccgccgtcagccaatccagtggactcgcagccaaatttgtcatccactgtcacatccctcagtggggctccgacaaatgtgaagaacagcttgaagagaccatcaaaaactgcctgtcagcggcggaggacaagaagctaaagtccgtcgcgttcccgcctttccccagcggcagaaactgctttcccaaacagactgcggcccaggtgaccctcaaagccatctcagcccactttgatgactcgagcgcgtcctcgctgaagaacgtgtacttcctgctcttcgacagcgagagcatcggcatctacgtgcaggagatggccaagctcgacgccaagtagccgccgcactttccagcagggatcggaggacgacccgagtcccaagagtggggttttgctttttaaaaggagagaggaggggtgatggcaggggagtggagggtggccgggcaggtcctgccggcgcagggagccctctgcccttcacactctcctccaaaagagcctccatctgtaaggaagcaggtctccgcgaggggtttctttccatgtgttttcctcctgttgttttagaacttttttaaaaaaacagacctcgttttagatttatagcattgacttttacacacattcacacaagaaaaaaatcctttcaaaattcttaaatcttctgttcctcctttttccaagggaagagggcaaaaagtggcctgggctctgttggtgtgcgtgttccgtggcggagagaagaaaatgggaaagacatctcactggtgcttttctcttttgttttagtgccccccgcccccatccctataatatctgtaactactcctaaaaaggttttgattcaggcttttttttggtttcattttgtttttttaagaaaaagaaaatgaaaggaaaaaaataaaagatccagtgtctttcttacaac

SEQ ID NO: 6907 - protein, 372 aa, Homo sapiens; identical to SEQ ID NO: 953

SEQ ID NO: 6908 - DNA, 3553 bp, Homo sapiens
cgctttccccttcgaagactctccccagagctgccagatgaacgcccacgccaccttctcccaccaaaggtggatccagctaacaggagactggatcgcgaccatagcgcgtttgtgcccagttctggggaaagcctcatgttagcgagtggccctcggctcgtctcgcagatcggccaagtacgcggaggccgcgcggtttcaccattaatactcctgaaggacaatagctcatcaagccccaccgaaagccccggacccgtcgcggagcctgggctggcgggggatgaggctgagcaactcctcctagaggtggttatgtggagaaggagcaatcccttctccctcctcctcctccccccgctactatccgcggcccagagaactgccgcttgccgccattgacacgcacagatagaacccaaagaaaggcaaagagtcctgcccggcaccggcgccgcgtgggccaaacctgcgcccgtggaggggcgcgcagagggcaccgggcgccgggagcaggcggcgcagcaccagcattgtgttagtgccgggaggccactgtgtcagcaagctgagagggaaactgaagcaagatgtcgggccggagtgggaagaagaaaatgtccaagctgtcccgttcagctagggcaggtgtcatctttccagtggggaggctgatgcgttatctgaagaaagggacgttcaagtaccggatcagcgtgggcgcccctgtctacatggcggcagtcattgagtacctggcagcggaaattctagaattggccggcaatgccgcgagggacaacaagaaggcccggatagccccgagacacatcttgctggcagttgccaatgacgaggagctcaaccagctgctaaaaggagtgaccatcgccagtggaggcgtcctgcccagaattcaccccgaactgctggccaaaaagcgagggaccaaaggcaagtcggaaacgatcctctccccacccccagagaaaagaggcaggaaggccacgtcaggcaagaagggggggaagaaatccaaggctgccaaaccacggacgtccaaaaagtccaaaccaaaggacagcgataaagaaggaacttcaaattccacctctgaagatgggccaggggatggattcaccattctgtcttctaagagccttgttctgggacagaagctgtccttaacccagagtgacatcagccatattggctccatgagagtggagggcattgtccacccaaccacagccgaaattgacctcaaagaagatataggtaaagccttggaaaaggctgggggaaaagagttcttggaaacggtaaaggagcttcgcaaatcccaaggccctttggaagtcgccgaagccgccgtcagccaatccagtggactcgcagccaaatttgtcatccactgtcacatccctcagtggggctccgacaaatgtgaagaacagcttgaagagaccatcaaaaactgcctgtcagcggcggaggacaagaagctaaagtccgtcgcgttcccgcctttccccagcggcagaaactgctttcccaaacagactgcggcccaggtgaccctcaaagccatctcagcccactttgatgactcgagcgcgtcctcgctgaagaacgtgtacttcctgctcttcgacagcgagagcatcggcatctacgtgcaggagatggccaagctcgacgccaagtagccgccgcactttccagcagggatcggaggacgacccgagtcccaagagtggggttttgctttttaaaaggagagaggaggggtgatggcaggggagtggagggtggccgggcaggtcctgccggcgcagggagccctctgcccttcacactctcctccaaaagagcctccatctgtaaggaagcaggtctccgcgaggggtttctttccatgtgttttcctcctgttgttttagaacttttttaaaaaaacagacctcgttttagatttatagcattgacttttacacacattcacacaagaaaaaaatcctttcaaaattcttaaatcttctgttcctcctttttccaagggaagagggcaaaaagtggcctgggctctgttggtgtgcgtgttccgtggcggagagaagaaaatgggaaagacatctcactggtgcttttctcttttgttttagtgccccccgcccccatccctataatatctgtaactactcctaaaaaggttttgattcaggcttttttttggtttcattttgtttttttaagaaaaagaaaatgaaaggaaaaaaataaaagatccagtgtctttcttacaacatattcttttattgcaacattttcctcagtttggaaaactgtgtccccacacgtaggtccttctagaatattgtaagtcaatagaagaaggcctgtcgctcacacactgggattcccacctcgctggaccccaggtcagatagcaccagggcctgtgtttcttaggccgaaggtcctgcctccaggaaggtgggcttcccttcgtggtccataaagaaagacagatacttggatgcaaccaccaggggaacagccatcctccaatagaggcacacgactcacttaggcctgggcgacagccccaacgggatggcctgagaaccccagagaggctggtgtcccaaggactctgcccgagtacccagaggccaccatcaaaagggagcagggaggggcagggtggggaggtggggcctgaatttcttcagatgaactcatcaaccacttctgctatgcagatttaacccaggcagtccaagaggggctcctctggattggaagatctctcccaaatagaggaatcatttatacactgtaacatagtcggtggcagacattagtgcccagctgggcctccagacaagtgaccctggggttggccaggaaaccagaagcacaaaaccacaaagtccctcaagggccctctccccattcccagcatcagctggagttttgtcacttacaaatctgcccataagtaacctagaaatatgctgggggtcacccgcagaaaccccctctgctcgctaatgggtaagcagatggcaccccgcaaagagtcacattatctgcccttccttaaacacctccaatggctggcaggccaggctgcagtctcaacccctgctagccgtgtaaaaatgcactctgtcagggtggggtaaccagaagagcacatttatctagctctttcttcttaaatgaaacctgtggtatggagtaggatctaaaagtggaaatgtgctggccgcagtggctcacgcctggaatcccagcacttcgagaggccaagacgaatggatcacctgaggtcaggtgttcgagaccagcctggccaacacagtgaaaccccgtctctatttaaaaaatacaaaaattagccaggcatggtggcacgtgcctgtagtcccagctacttgggaggctaaggcaagagaatcacgtgaacccagaaggcgtaggttgcagtgagctgagatcgtgccactgcactccagcctgggtgacagggcgagactgtctc

SEQ ID NO: 6909 - protein, 372 aa, Homo sapiens; identical to SEQ ID NO: 953

SEQ ID NO: 6910 - DNA, 695 bp, Homo sapiens
cagaaactgctttcccaaacagactgcggcccaggtgaccctcaaagccatctcagcccactttgatgactcgagcgcgtcctcgctgaagaacgtgtacttcctgctcttcgacagcgagagcatcggcatctacgtgcaggagatggccaagctcgacgccaagtagccgccgcactttccagcagggatcggaggacgacccgagtcccaagagtggggttttgctttttaaaaggagagaggaggggtgatggcagagcctccatctgtaaggaagcaggtctccgcgaggggtttctttccatgtgttttcctcctgttgttttagaacttttttaaaaaaacagacctcgttttagatttatagcattgacttttacacacattcacacaagaaaaaaatcctttcaaaattcttaaatcttctgttcctcctttttccaagggaagagggcaaaaagtggcctgggctctgttggtgtgcgtgttccgtggcggagagaagaaaatgggaaagacatctcactggtgcttttctcttttgttttagtgccccccgcccccatccctataatatctgtaactactcctaaaaaggttttgattcaggcttttttttggtttcattttgtttttttaagaaaaagaaaatgaaaggaaaaaaataaaagatccagtgtctttcttacaac

SEQ ID NO: 6911 - protein, 77 aa, Homo sapiens
IFCSSFFQGKRAKSGLGSVGVRVPWRREENGKDISLVLFSFVLVPPAPIPIISVTTPKKVLIQAFFWFHFVFLRKRK

SEQ ID NO: 6912 - DNA, 1938 bp, Homo sapiens
cagaaactgctttcccaaacagactgcggcccaggtgaccctcaaagccatctcagcccactttgatgactcgagcgcgtcctcgctgaagaacgtgtacttcctgctcttcgacagcgagagcatcggcatctacgtgcaggagatggccaagctcgacgccaagtagccgccgcactttccagcagggatcggaggacgacccgagtcccaagagtggggttttgctttttaaaaggagagaggaggggtgatggcagagcctccatctgtaaggaagcaggtctccgcgaggggtttctttccatgtgttttcctcctgttgttttagaacttttttaaaaaaacagacctcgttttagatttatagcattgacttttacacacattcacacaagaaaaaaatcctttcaaaattcttaaatcttctgttcctcctttttccaagggaagagggcaaaaagtggcctgggctctgttggtgtgcgtgttccgtggcggagagaagaaaatgggaaagacatctcactggtgcttttctcttttgttttagtgccccccgcccccatccctataatatctgtaactactcctaaaaaggttttgattcaggcttttttttggtttcattttgtttttttaagaaaaagaaaatgaaaggaaaaaaataaaagatccagtgtctttcttacaacatattcttttattgcaacattttcctcagtttggaaaactgtgtccccacacgtaggtccttctagaatattgtaagtcaatagaagaaggcctgtcgctcacacactgggattcccacctcgctggaccccaggtcagatagcaccagggcctgtgtttcttaggccgaaggtcctgcctccaggaaggtgggcttcccttcgtggtccataaagaaagacagatacttggatgcaaccaccaggggaacagccatcctccaatagaggcacacgactcacttaggcctgggcgacagccccaacgggatggcctgagaaccccagagaggctggtgtcccaaggactctgcccgagtacccagaggccaccatcaaaagggagcagggaggggcagggtggggaggtggggcctgaatttcttcagatgaactcatcaaccacttctgctatgcagatttaacccaggcagtccaagaggggctcctctggattggaagatctctcccaaatagaggaatcatttatacactgtaacatagtcggtggcagacattagtgcccagctgggcctccagacaagtgaccctggggttggccaggaaaccagaagcacaaaaccacaaagtccctcaagggccctctccccattcccagcatcagctggagttttgtcacttacaaatctgcccataagtaacctagaaatatgctgggggtcacccgcagaaaccccctctgctcgctaatgggtaagcagatggcaccccgcaaagagtcacattatctgcccttccttaaacacctccaatggctggcaggccaggctgcagtctcaacccctgctagccgtgtaaaaatgcactctgtcagggtggggtaaccagaagagcacatttatctagctctttcttcttaaatgaaacctgtggtatggagtaggatctaaaagtggaaatgtgctggccgcagtggctcacgcctggaatcccagcacttcgagaggccaagacgaatggatcacctgaggtcaggtgttcgagaccagcctggccaacacagtgaaaccccgtctctatttaaaaaatacaaaaattagccaggcatggtggcacgtgcctgtagtcccagctacttgggaggctaaggcaagagaatcacgtgaacccagaaggcgtaggttgcagtgagctgagatcgtgccactgcactccagcctgggtgacagggcgagactgtctc

SEQ ID NO: 6913 - protein, 57 aa, Homo sapiens
MLGVTRRNPLCSLMGKQMAPRKESHYLPFLKHLQWLAGQAAVSTPASRVKMHSVRVG

SEQ ID NO: 6914 - DNA, 2416 bp, Homo sapiens
gtgagcgggtgagcaatctggaggagctgcctctcaatgagtatcgagagtacatcaaagtgcagacggacaaaggcacagaggtggccaccaacctggtgattctctgcaccggcatcaagatcaacagctccgcctaccgcaaagcgtttgagagcagactagccagcagtggtgctctgagagtgaacgagcacctccaggtggagggccacagcaacgtctacgccattggtgactgtgccgacgtgaggacgcccaagatggcctatcttgccggcctccacgccaacatcgccgtggccaacatcgtcaactctgtgaagcagcggcctctccaggcctacaagccgggtgcactgacgttcctcctgtccatggggagaaatgacggtgtgggccaaatcagtggcttctatgtgggccggctcatggttcggctgaccaagagccgggacctgttcgtctctacgagctggaaaaccatgaggcagtctccaccttgatggagaggccaggcgggagaactaccgcagcaggtgggcgtacggactgcttggcgcatggcacccgcctggcaagtgctagaactaatgctattcttctggaataagatgccaatgatgtggtggctagaaatgcaacttgtataaaacaaaaatgggagagagagaggtattaaacaaataccccccttagaggatactttctgggtttggaaggtgtgcttgctgtggtactgggtgagcggctcatgtgtgctggctgcatggtgctggggaggccacagccagcccttcctctgcacctgcctcctctgggatgtgcatgtgtgtgtacgtgcttgtggtcatgacgcgtgccatttagagctctcagagcagggcagattgctgggctctggtggccagtgtctgtctgtgagggcaggaaggagagctgcacattgagaacaaaggagggacctgaggtggagagaggcccagcaccccaaatctctgccatcacacggtcggggagcccatacattctgcaacaaccagggacttcacaggagccttgttttcaatttgctaacaggtgcataatccctgtgctccttaagcctcatggccttcctacatttccactttatttgtttgtttgtttatttatttttgagacagtctcgccctgtcacccaggctggagtgcagtggcacgatctcagctcactgcaacctacgccttctgggttcacgtgattctcttgccttagcctcccaagtagctgggactacaggcacgtgccaccatgcctggctaatttttgtattttttaaatagagacggggtttcactgtgttggccaggctggtctcgaacacctgacctcaggtgatccattcgtcttggcctctcgaagtgctgggattccaggcgtgagccactgcggccagcacatttccacttttagatcctactccataccacaggtttcatttaagaagaaagagctagataaatgtgctcttctggttaccccaccctgacagagtgcatttttacacggctagcaggggttgagactgcagcctggcctgccagccattggaggtgtttaaggaagggcagataatgtgactctttgcggggtgccatctgcttacccattagcgagcagagggggtttctgcgggtgacccccagcatatttctaggttacttatgggcagatttgtaagtgacaaaactccagctgatgctgggaatggggagagggcccttgagggactttgtggttttgtgcttctggtttcctggccaaccccagggtcacttgtctggaggcccagctgggcactaatgtctgccaccgactatgttacagtgtataaatgattcctctatttgggagagatcttccaatccagaggagcccctcttggactgcctgggttaaatctgcatagcagaagtggttgatgagttcatctgaagaaattcaggccccacctccccaccctgcccctccctgctcccttttgatggtggcctctgggtactcgggcagagtccttgggacaccagcctctctggggttctcaggccatcccgttggggctgtcgcccaggcctaagtgagtcgtgtgcctctattggaggatggctgttcccctggtggttgcatccaagtatctgtctttctttatggaccacgaagggaagcccaccttcctggaggcaggaccttcggcctaagaaacacaggccctggtgctatctgacctggggtccagcgaggtgggaatcccagtgtgtgagcgacaggccttcttctattgacttacaatattctagaaggacctacgtgtggggacacagttttccaaactgaggaaaatgttgcaataaaagaatatgttgtaagaaagac

SEQ ID NO: 6915 - protein, 80 aa, Homo sapiens [sequence omitted]

SEQ ID NO: 6916 - DNA, 4741 bp, Homo sapiens
aattgagccactgtactccagcctgtgcaatagagtgagactccatctcaaaaacaaaacaaaacatcactcaccctttaaaaacaactggctacacagtactgcattgtatgggtttataatattttatcctgtagcctctcattggtggcagtttccattgattgatggagtgtcacacaggtggaggtttgcacagcactactgctatgttagaacatacaactgggcatccactaattccatacgtgcattttcatctcctacagggtgtgtggctggaaatgcagctccatggcttaagcccttgctttaggtgtctggccaagtagatcatggccaagcagaggggagttcactgttttctggggccaggcaagaaccgacactggcagagccaaagagagtcggcatgtccaagagtattgggcaaggggctgccaaagaggcagggtgaaatctgctggagagtcactggcctccctattccacaagtaagcgtggcaggggtcagtagaggagagagaagagagagagagcagattgcaggagaggcctcaggcagcctgaagaggaaaagtgcctcccctccctggccctgctctggtctgggtgtcccctcaggccccaggcccttcacagggaaccccagataagcaatttgccttccttgggtgaggcaagagtttgccctttcggggaagcaggttgatgatactaggggcctgggggtcaagggcttggctcctttggtcaactcattgcccctgaggtccactctggggtcactagactttctttccctggaggaaaccccatgaagggcccggagcaggcttgtatgtccacctgattgtcaaagctgccctggcatggcaggctgtctgtctgtcggcccctgtcacctgtcctctaagcctctccaccttctgccacaggtgccctgaactctacctgcctcctcccttcctgccactgggcctctggcccaagttgtttcctctgctaggaaggccccctgatctcagctctttttcagggctctaggctgtcctttttgagtgtccctgggtgctccagtgtgacctgacgcacagtggactcccctgtccctatccccggccagctgcgtagcccctctcaggggccatgcccagctaacttggaagtggggctttctgggtgttttcttgacctcatccctggctgacagccccaagggtaagacccagcacagagggttgcacgctgccaggggctggtgaaacacacgccacccacggcctgcctcatcactgcctacattctcaggccctgcgcagctcctggtgtgcactgctacctctggctgggcctgtgggccctcctgggtcctggtccctaggagacattcccttctggcccagttggcagattcagcctgaggtacgcttgggattagctctagacaacccttctgagggcttagaggagccagggtggccctgcctgccggggggttgtcttgggtcctaatctctacgagggctcagcctcctcatctgtgaaatgggtatgttcaagcctcaatgctttggggaccatttgacccacgagaaacaactttaaattccctccaatccattgtgtcagtgccctccgtccgctctactgtccgcccccaggggagaagttaggcagtgggcatttgaacaccaatgggaacagtgcccggagttctaaccaaaagctgccccataagtgtgggatgatttggggaccgtcttggggaaccaccaccatgtcttggaaaccagtgtgtacgaggacagctcagtggccttccagcggcctgagggtcccagatgagctggaacacacttccttatgaggctgttcagtggcttgatgtctatccttcaaggttgacctcagagtctacttcctccttcgctgacacccgctccagtcccccttcctgaagcccacagcagctgttgagcctctggggctgctttctgtatagttgcctgatttgagatggggtcccaggtctcggtggaatcgggagctctgcacgtggtgattgtgggtgggggctttggcgggatcgcagcagccagccagctgcaggccctgaacgtccccttcatgctggtggacatgaaggactccttccaccacaatgtggctgctctccgagcctccgtggagacagggttcgccaaaaagacattcatttcttactcggtgactttcaaggacaacttccggcaggggctagtagtggggatagacctgaagaaccagatggtgctgctgcagggtggcgaggccctgcccttctctcatcttatcctggccacgggcagcactgggcccttcccgggcaagtttaatgaggtttccagccagcaggccgctatccaggcctatgaggacatggtgaggcaggtccagcgctcacggttcatcgtggtggtgggaggaggctcggctggagtggagatggcagcagagattaaaacagaatatcctgagaaagaggtcactctcattcactcccaagtggccctggctgacaaggagctcctgccctccgtccggcaggaagtgaaggagatcctcctccggaagggcgtgcagctgctgctgagtgagcgggtgagcaatctggaggagctgcctctcaatgagtatcgagagtacatcaaagtgcagacggacaaaggcacagaggtggccaccaacctggtgattctctgcaccggcatcaagatcaacagctccgcctaccgcaaagcgtttgagagcagactagccagcagtggtgctctgagagtgaacgagcacctccaggtggagggccacagcaacgtctacgccattggtgactgtgccgacgtgaggacgcccaagatggcctatcttgccggcctccacgccaacatcgccgtggccaacatcgtcaactctgtgaagcagcggcctctccaggcctacaagccgggtgcactgacgttcctcctgtccatggggagaaatgacggtgtgggccaaatcagtggcttctatgtgggccggctcatggttcggctgaccaagagccgggacctgttcgtctctacgagctggaaaaccatgaggcagtctccaccttgatggagaggccaggcgggagaactaccgcagcaggtgggcgtacggactgcttggcgcatggcacccgcctggcaagtgctagaactaatgctattcttctggaataagatgccaatgatgtggtggctagaaatgcaacttgtataaaacaaaaatgggagagagagaggtattaaacaaataccccccttagaggatactttctgggtttggaaggtgtgcttgctgtggtactgggtgagcggctcatgtgtgctggctgcatggtgctggggaggccacagccagcccttcctctgcacctgcctcctctgggatgtgcatgtgtgtgtacgtgcttgtggtcatgacgcgtgccatttagagctctcagagcagggcagattgctgggctctggtggccagtgtctgtctgtgagggcaggaaggagagctgcacattgagaacaaaggagggacctgaggtggagagaggcccagcaccccaaatctctgccatcacacggtcggggagcccatacattctgcaacaaccagggacttcacaggagccttgttttcaatttgctaacaggtgcataatccctgtgctccttaagcctcatggccttcctacatttccacacatttccacttttagatcctactccataccacaggtttcatttaagaagaaagagctagataaatgtgctcttctggttaccccaccctgacagagtgcatttttacacggctagcaggggttgagactgcagcctggcctgccagccattggaggtgtttaaggaagggcagataatgtgactctttgcggggtgccatctgcttacccattagcgagcagagggggtttctgcgggtgacccccagcatatttctaggttacttatgggcagatttgtaagtgacaaaactccagctgatgctgggaatggggagagggcccttgagggactttgtggttttgtgcttctggtttcctggccaaccccagggtcacttgtctggaggcccagctgggcactaatgtctgccaccgactatgttacagtgtataaatgattcctctatttgggagagatcttccaatccagaggagcccctcttggactgcctgggttaaatctgcatagcagaagtggttgatgagttcatctgaagaaattcaggccccacctccccaccctgcccctccctgctcccttttgatggtggcctctgggtactcgggcagagtccttgggacaccagcctctctggggttctcaggccatcccgttggggctgtcgcccaggcctaagtgagtcgtgtgcctctattggaggatggctgttcccctggtggttgcatccaagtatctgtctttctttatggaccacgaagggaagcccaccttcctggaggcaggaccttcggcctaagaaacacaggccctggtgctatctgacctggggtccagcgaggtgggaatcccagtgtgtgagcgacaggccttcttctattgacttacaatattctagaaggacctacgtgtggggacacagttttccaaactgaggaaaatgttgcaataaaagaatatgttgtaagaaagac

SEQ ID NO: 6917 - protein, 373 aa, Homo sapiens; identical to SEQ ID NO: 955

SEQ ID NO: 6918 - DNA, 3345 bp, Homo sapiens
gcgcgggtgctggcaggagccggagaggcgacatctggccatgggagcatttgtttcaaagttcaaggccgttcgctcagggtcaaggttagtccggcgggccgttcggagaccagccccagcgtgccaggaccgtttccggggcctggccggggcgttgccgcggggtcggggaccagcacgagtgctgagtcacgccccgcccgggagcgcctcgggtcagtaactcgggaagacgaccaagcgggagcgggagcgggagcgggagccggagcgagagcgcgcgggcgcggccgacagtgcctgatttgagatggggtcccaggtctcggtggaatcgggagctctgcacgtggtgattgtgggtgggggctttggcgggatcgcagcagccagccagctgcaggccctgaacgtccccttcatgctggtggacatgaaggactccttccaccacaatgtggctgctctccgagcctccgtggagacagggttcgccaaaaagacattcatttcttactcggtgactttcaaggacaacttccggcaggggctagtagtggggatagacctgaagaaccagatggtgctgctgcagggtggcgaggccctgcccttctctcatcttatcctggccacgggcagcactgggcccttcccgggcaagtttaatgaggtttccagccagcaggccgctatccaggcctatgaggacatggtgaggcaggtccagcgctcacggttcatcgtggtggtgggaggaggctcggctggagtggagatggcagcagagattaaaacagaatatcctgagaaagaggtcactctcattcactcccaagtggccctggctgacaaggagctcctgccctccgtccggcaggaagtgaaggagatcctcctccggaagggcgtgcagctgctgctgagtgagcgggtgagcaatctggaggagctgcctctcaatgagtatcgagagtacatcaaagtgcagacggacaaaggcacagaggtggccaccaacctggtgattctctgcaccggcatcaagatcaacagctccgcctaccgcaaagcgtttgagagcagactagccagcagtggtgctctgagagtgaacgagcacctccaggtggagggccacagcaacgtctacgccattggtgactgtgccgacgtgaggacgcccaagatggcctatcttgccggcctccacgccaacatcgccgtggccaacatcgtcaactctgtgaagcagcggcctctccaggcctacaagccgggtgcactgacgttcctcctgtccatggggagaaatgacggtgtgggccaaatcagtggcttctatgtgggccggctcatggttcggctgaccaagagccgggacctgttcgtctctacgagctggaaaaccatgaggcagtctccaccttgatggagaggccaggcgggagaactaccgcagcaggtgggcgtacggactgcttggcgcatggcacccgcctggcaagtgctagaactaatgctattcttctggaataagatgccaatgatgtggtggctagaaatgcaacttgtataaaacaaaaatgggagagagagaggtattaaacaaataccccccttagaggatactttctgggtttggaaggtgtgcttgctgtggtactgggtgagcggctcatgtgtgctggctgcatggtgctggggaggccacagccagcccttcctctgcacctgcctcctctgggatgtgcatgtgtgtgtacgtgcttgtggtcatgacgcgtgccatttagagctctcagagcagggcagattgctgggctctggtggccagtgtctgtctgtgagggcaggaaggagagctgcacattgagaacaaaggagggacctgaggtggagagaggcccagcaccccaaatctctgccatcacacggtcggggagcccatacattctgcaacaaccagggacttcacaggagccttgttttcaatttgctaacaggtgcataatccctgtgctccttaagcctcatggccttcctacatttccactttatttgtttgtttgtttatttatttttgagacagtctcgccctgtcacccaggctggagtgcagtggcacgatctcagctcactgcaacctacgccttctgggttcacgtgattctcttgccttagcctcccaagtagctgggactacaggcacgtgccaccatgcctggctaatttttgtattttttaaatagagacggggtttcactgtgttggccaggctggtctcgaacacctgacctcaggtgatccattcgtcttggcctctcgaagtgctgggattccaggcgtgagccactgcggccagcacatttccacttttagatcctactccataccacaggtttcatttaagaagaaagagctagataaatgtgctcttctggttaccccaccctgacagagtgcatttttacacggctagcaggggttgagactgcagcctggcctgccagccattggaggtgtttaaggaagggcagataatgtgactctttgcggggtgccatctgcttacccattagcgagcagagggggtttctgcgggtgacccccagcatatttctaggttacttatgggcagatttgtaagtgacaaaactccagctgatgctgggaatggggagagggcccttgagggactttgtggttttgtgcttctggtttcctggccaaccccagggtcacttgtctggaggcccagctgggcactaatgtctgccaccgactatgttacagtgtataaatgattcctctatttgggagagatcttccaatccagaggagcccctcttggactgcctgggttaaatctgcatagcagaagtggttgatgagttcatctgaagaaattcaggccccacctccccaccctgcccctccctgctcccttttgatggtggcctctgggtactcgggcagagtccttgggacaccagcctctctggggttctcaggccatcccgttggggctgtcgcccaggcctaagtgagtcgtgtgcctctattggaggatggctgttcccctggtggttgcatccaagtatctgtctttctttatggaccacgaagggaagcccaccttcctggaggcaggaccttcggcctaagaaacacaggccctggtgctatctgacctggggtccagcgaggtgggaatcccagtgtgtgagcgacaggccttcttctattgacttacaatattctagaaggacctacgtgtggggacacagttttccaaactgaggaaaatgttgcaataaaagaatatgttgtaagaaagac

SEQ ID NO: 6919 - protein, 373 aa, Homo sapiens; identical to SEQ ID NO: 955

SEQ ID NO: 6920 - DNA, 704 bp, Homo sapiens
gtgagcgggtgagcaatctggaggagctgcctctcaatgagtatcgagagtacatcaaagtgcagacggacaaaggcacagaggtggccaccaacctggtgattctctgcaccggcatcaagatcaacagctccgcctaccgcaaagcgtttgagagcagactagccagcagtggtgctctgagagtgaacgagcacctccaggtggagggccacagcaacgtctacgccattggtgactgtgccgacgtgaggacgcccaagatggcctatcttgccggcctccacgccaacatcgccgtggccaacatcgtcaactctgtgaagcagcggcctctccaggcctacaagccgggtgcactgacgttcctcctgtccatggggagaaatgacggtgtgggccaaatcagtggcttctatgtgggccggctcatggttcggctgaccaagagccgggacctgttcgtctctacgagctggaaaaccatgaggcagtctccaccttgatggagaggccaggcgggagaactaccgcagcaggtgggcgtacggactgcttggcgcatggcacccgcctggcaagtgctagaactaatgctattcttctggaataagatgccaatgatgtggtggctagaaatgcaacttgtataaaacaaaaatgggagagagagaggtattaaacaaataccccccttagaggat

SEQ ID NO: 6921 - protein, 80 aa, Homo sapiens [sequence omitted]

SEQ ID NO: 6922 - DNA, 1633 bp, Homo sapiens
gcgcgggtgctggcaggagccggagaggcgacatctggccatgggagcatttgtttcaaagttcaaggccgttcgctcagggtcaaggttagtccggcgggccgttcggagaccagccccagcgtgccaggaccgtttccggggcctggccggggcgttgccgcggggtcggggaccagcacgagtgctgagtcacgccccgcccgggagcgcctcgggtcagtaactcgggaagacgaccaagcgggagcgggagcgggagcgggagccggagcgagagcgcgcgggcgcggccgacagtgcctgatttgagatggggtcccaggtctcggtggaatcgggagctctgcacgtggtgattgtgggtgggggctttggcgggatcgcagcagccagccagctgcaggccctgaacgtccccttcatgctggtggacatgaaggactccttccaccacaatgtggctgctctccgagcctccgtggagacagggttcgccaaaaagacattcatttcttactcggtgactttcaaggacaacttccggcaggggctagtagtggggatagacctgaagaaccagatggtgctgctgcagggtggcgaggccctgcccttctctcatcttatcctggccacgggcagcactgggcccttcccgggcaagtttaatgaggtttccagccagcaggccgctatccaggcctatgaggacatggtgaggcaggtccagcgctcacggttcatcgtggtggtgggaggaggctcggctggagtggagatggcagcagagattaaaacagaatatcctgagaaagaggtcactctcattcactcccaagtggccctggctgacaaggagctcctgccctccgtccggcaggaagtgaaggagatcctcctccggaagggcgtgcagctgctgctgagtgagcgggtgagcaatctggaggagctgcctctcaatgagtatcgagagtacatcaaagtgcagacggacaaaggcacagaggtggccaccaacctggtgattctctgcaccggcatcaagatcaacagctccgcctaccgcaaagcgtttgagagcagactagccagcagtggtgctctgagagtgaacgagcacctccaggtggagggccacagcaacgtctacgccattggtgactgtgccgacgtgaggacgcccaagatggcctatcttgccggcctccacgccaacatcgccgtggccaacatcgtcaactctgtgaagcagcggcctctccaggcctacaagccgggtgcactgacgttcctcctgtccatggggagaaatgacggtgtgggccaaatcagtggcttctatgtgggccggctcatggttcggctgaccaagagccgggacctgttcgtctctacgagctggaaaaccatgaggcagtctccaccttgatggagaggccaggcgggagaactaccgcagcaggtgggcgtacggactgcttggcgcatggcacccgcctggcaagtgctagaactaatgctattcttctggaataagatgccaatgatgtggtggctagaaatgcaacttgtataaaacaaaaatgggagagagagaggtattaaacaaataccccccttagaggat

SEQ ID NO: 6923 - protein, 373 aa, Homo sapiens; identical to SEQ ID NO: 955

SEQ ID NO: 6924 - DNA, 1328 bp, Homo sapiens
gcgcgggtgctggcaggagccggagaggcgacatctggccatgggagcatttgtttcaaagttcaaggccgttcgctcagggtcaaggttagtccggcgggccgttcggagaccagccccagcgtgccaggaccgtttccggggcctggccggggcgttgccgcggggtcggggaccagcacgagtgctgagtcacgccccgcccgggagcgcctcgggtcagtaactcgggaagacgaccaagcgggagcgggagcgggagcgggagccggagcgagagcgcgcgggcgcggccgacagtgcctgatttgagatggggtcccaggtctcggtggaatcgggagctctgcacgtggtgattgtgggtgggggctttggcgggatcgcagcagccagccagctgcaggccctgaacgtccccttcatgctggtggacatgaaggactccttccaccacaatgtggctgctctccgagcctccgtggagacagggttcgccaaaaagacattcatttcttactcggtgactttcaaggacaacttccggcaggggctagtagtggggatagacctgaagaaccagatggtgctgctgcagggtggcgaggccctgcccttctctcatcttatcctggccacgggcagcactgggcccttcccgggcaagtttaatgaggtttccagccagcaggccgctatccaggcctatgaggacatggtgaggcaggtccagcgctcacggttcatcgtggtggtgggaggaggctcggctggagtggagatggcagcagagattaaaacagaatatcctgagaaagaggtcactctcattcactcccaagtggccctggctgacaaggagctcctgccctccgtccggcaggaagtgaaggagatcctcctccggaagggcgtgcagctgctgctgagtacgtgcaccctcacctccctccctgccctgccctggcctggtgagatgtggcttggaggcttggtgactgcttccagcaggagggtggctatggtccaccccaggctctctcttttccactgtgtcctggggtggagcatgaagcgctcagaagaggccgtgaacatcaaagcccatctgagccttgtccagctggaagttgtgcccgtccctgggcagggaagagggcctggtacttacgggatttccatgtcctggttattgctttggatgcagtgcagatggtgggatgcctgtctgctgaatgatttttcttgagtgcatctgaaggatttgccccaaataggatgtctctgtggttgagggaataggtttattggtttatgttttgagagtg

SEQ ID NO: 6925 - protein, 311 aa, Homo sapiens
MGSQVSVESGALHVVIVGGGFGGIAAASQLQALNVPFMLVDMKDSFHHNVAALRASVETGFAKKTFISYSVTFKDNFRQGLVVGIDLKNQMVLLQGGEALPFSHLILATGSTGPFPGKFNEVSSQQAAIQAYEDMVRQVQRSRFIVVVGGGSAGVEMAAEIKTEYPEKEVTLIHSQVALADKELLPSVRQEVKEILLRKGVQLLLSTCTLTSLPALPWPGEMWLGGLVTASSRRVAMVHPRLSLFHCVLGWSMKRSEEAVNIKAHLSLVQLEVVPVPGQGRGPGTYGISMSWLLLWMQCRWWDACLLNDFS

SEQ ID NO: 6926 - DNA, 779 bp, Homo sapiens
gcgcgggtgctggcaggagccggagaggcgacatctggccatgggagcatttgtttcaaagttcaaggccgttcgctcagggtcaaggttagtccggcgggccgttcggagaccagccccagcgtgccaggaccgtttccggggcctggccggggcgttgccgcggggtcggggaccagcacgagtgctgagtcacgccccgcccgggagcgcctcgggtcagtaactcgggaagacgaccaagcgggagcgggagcgggagcgggagccggagcgagagcgcgcgggcgcggccgacagtgcctgatttgagatggggtcccaggtctcggtggaatcgggagctctgcacgtggtgattgtgggtgggggctttggcgggatcgcagcagccagccagctgcaggccctgaacgtccccttcatgctggtggacatgaaggactccttccaccacaatgtggctgctctccgagcctccgtggagacagggttcgccaaaaagacattcatttcttactcggtgactttcaaggacaacttccggcaggggctagtagtggggatagacctgaagaaccagatggtgctgctgcagggtggcgaggccctgcccttctctcatcttatcctggccacgggcagcactgggcccttcccgggcaagtttaatgaggtttccagccagcaggccgctatccaggcctatgaggacatggtgaggcaggtgagctgtgcactgaaggcatggggcagtgtgggcagatggaaggacagcc

SEQ ID NO: 6927 - protein, 154 aa, Homo sapiens
MGSQVSVESGALHVVIVGGGFGGIAAASQLQALNVPFMLVDMKDSFHHNVAALRASVETGFAKKTFISYSVTFKDNFRQGLVVGIDLKNQMVLLQGGEALPFSHLILATGSTGPFPGKFNEVSSQQAAIQAYEDMVRQVSCALKAWGSVGRWKD

SEQ ID NO: 6928 - DNA, 608 bp, Homo sapiens
gcgcgggtgctggcaggagccggagaggcgacatctggccatgggagcatttgtttcaaagttcaaggccgttcgctcagggtcaaggttagtccggcgggccgttcggagaccagccccagcgtgccaggaccgtttccggggcctggccggggcgttgccgcggggtcggggaccagcacgagtgctgagtcacgccccgcccgggagcgcctcgggtcagtaactcgggaagacgaccaagcgggagcgggagcgggagcgggagccggagcgagagcgcgcgggcgcggccgacagtgcctgatttgagatggggtcccaggtctcggtggaatcgggagctctgcacgtggtgattgtgggtgggggctttggcgggatcgcagcagccagccagctgcaggccctgaacgtccccttcatgctggtggacatgaaggactccttccaccacaatgtggctgctctccgagcctccgtggagacagggttcgccaaaaagacattcatttcttactcggtgactttcaaggacaacttccggcaggggctagtagtggggatagacctgaagaaccagatggtgctgctgcagggtggcgagg

SEQ ID NO: 6929 - protein, 97 aa, Homo sapiens
MGSQVSVESGALHVVIVGGGFGGIAAASQLQALNVPFMLVDMKDSFHHNVAALRASVETGFAKKTFISYSVTFKDNFRQGLVVGIDLKNQMVLLQGG

SEQ ID NO: 6930 - DNA, 1039 bp, Homo sapiens
aacaaagaggtgaatgagcagaatgggtcatgtacatcccactgatgtgtgctgatgtgacaaagagagaaggcaggtagaagagctatctgaacgttgctaacagagggcctggggaggagggacgggcacgaccgcatctgctcctctgtcctgtgtgcgtgtttggccacctgatgccaactccatgatggcacatttgtcttattaagtgagttggcttcctggtctgaaccctccataagccctggctgggaattttcctcactgtgaccttgtgagcagtccctggttaccctcaaggattgtgccaagcaggctctgggttaacatcttggagagtacagagtaggctgataatcagcctatgctcaacagcacacccaagagttgaagatttctgatggcatccctggggtgctcagcagtggcctttgtctgcacccatcttcattacatgttaataccaccagagacactttgaggtcactggaaggactgagcgcattcaggagcctggaggaactcatcttggacaacaatcagctgggggacgaccttgtgttgccagggttacccagactgcataccttaaccctcaacaagaaccgaatcactgatttggagaacctgctggatcacttggcagaagtgacaccagctctggagtacctcagtctgctgggcaacgtggcctgtcccaacgagctggtcagcttggaaaaggatgaggaagactacaagagatacagatgctttgttctgtacaagctgcccaacttgaaatttctggatgcccagaaagtaaccagacaagaacgagaggaggcgttggtcagaggagtcttcatgaaggtggtgaagcccaaggtgagaggtgtcctggggaagtgtcgctacgtttactatgggaaaaactcagagggcaacaggtttatccgagatgaccagctctgaagccaacttctgtataccttcacccatttcatgaaaataaaatcaaaagggaaatcaaaaataaagaaaacgctaaagaaaa

SEQ ID NO: 6931 - protein, 64 aa, Homo sapiens
MLCSVQAAQLEISGCPESNQTRTRGGVGQRSLHEGGEAQGERCPGEVSLRLLWEKLRGQQVYPR

SEQ ID NO: 6932 - DNA, 576 bp, Homo sapiens
ataaaatgtacagtccactgtcctcggctgcacctttgtcattgcaggtcactggaaggactgagcgcattcaggagcctggaggaactcatcttggacaacaatcagctgggggacgaccttgtgttgccagggttacccagactgcataccttaaccctcaacaagaaccgaatcactgatttggagaacctgctggatcacttggcagaagtgacaccagctctggagtacctcagtctgctgggcaacgtggcctgtcccaacgagctggtcagcttggaaaaggatgaggaagactacaagagatacagatgctttgttctgtacaagctgcccaacttgaaatttctggatgcccagaaagtaaccagacaagaacgagaggaggcgttggtcagaggagtcttcatgaaggtggtgaagcccaaggcttctagtgaggacgttgccagctccccggagcgccactacacgcccttgccttctgcttccagggaactcaccagtcaccaaggttggaactcagctttttattgctctcagtgggtgcagggagggacacttggctgtgca

SEQ ID NO: 6933 - protein, 58 aa, Homo sapiens [sequence omitted]

SEQ ID NO: 6934 - DNA, 816 bp, Homo sapiens
gttgaagaaagaggatctggctgaaagacccgcaactttcacttgttgagaacctttagccagcgccggcgtgcatgtgttttagttttattctttttcccttgcccccaaagccgtggagtacctgctgttgctctcatgcctcttgccaacagtggcatctgctcagtgtagccatcaagaatttgaatgtcaatatctttgccttgaaatgaatggaaaagtatttgtcactcagcggcaatcattcttcaaataaaaggtcactggaaggactgagcgcattcaggagcctggaggaactcatcttggacaacaatcagctgggggacgaccttgtgttgccagggttacccagactgcataccttaaccctcaacaagaaccgaatcactgatttggagaacctgctggatcacttggcagaagtgacaccagctctggagtacctcagtctgctgggcaacgtggcctgtcccaacgagctggtcagcttggaaaaggatgaggaagactacaagagatacagatgctttgttctgtacaagctgcccaacttgaaatttctggatgcccagaaagtaaccagacaagaacgagaggaggcgttggtcagaggagtcttcatgaaggtggtgaagcccaaggtgagaggtgtcctggggaagtgtcgctacgtttactatgggaaaaactcagagggcaacaggtttatccgagatgaccagctctgaagccaacttctgtataccttcacccatttcatgaaaataaaatcaaaagggaaatcaaaaataaagaaaacgctaaagaaaa

SEQ ID NO: 6935 - protein, 172 aa, Homo sapiens
MEKYLSLSGNHSSNKRSLEGLSAFRSLEELILDNNQLGDDLVLPGLPRLHTLTLNKNRITDLENLLDHLAEVTPALEYLSLLGNVACPNELVSLEKDEEDYKRYRCFVLYKLPNLKFLDAQKVTRQEREEALVRGVFMKVVKPKVRGVLGKCRYVYYGKNSEGNRFIRDDQL

SEQ ID NO: 6936 - DNA, 587 bp, Homo sapiens
ttgaagaaagaggatctggctgaaagacccgcaactttcacttgttgagaacctttagccagcgccggcgtgcatgtgttttagttttattctttttcccttgcccccaaagccgtggagtacctgctgttgctctcatgcctcttgccaacagtggcatctgctcagtgtagccatcaagaatttgaatgtcaatatctttgccttgaaatgaatggaaaagtatttgtcactcagcggcaatcattcttcaaataaaaggtcactggaaggactgagcgcattcaggagcctggaggaactcatcttggacaacaatcagctgggggacgaccttgtgttgccagggttacccagactgcataccttaaccctcaacaagaaccgaatcactgatttggagaacctgctggatcacttggcagaagtgacaccagctctggagtacctcagtctgctgggcaacgtggcctgtcccaacgagctggtcactgcccaacttgaaatttctggatgcccagaaagtaaccagacaagaacgagaggaggcgttggtcagaggagtcttcatgaaggtggtgaagccc

SEQ ID NO: 6937 - protein, 123 aa, Homo sapiens
MEKYLSLSGNHSSNKRSLEGLSAFRSLEELILDNNQLGDDLVLPGLPRLHTLTLNKNRITDLENLLDHLAEVTPALEYLSLLGNVACPNELVTAQLEISGCPESNQTRTRGGVGQRSLHEGGE

SEQ ID NO: 6938 - DNA, 3923 bp, Homo sapiens
agatgccactgtgggcactggcagaactgggccccctgtagatcagatagaaacaaatgggaagctctgggccattgccttcaaaaggctttcttattccagagaggtttttgacataatcctcccctccccaccagcctctgctgtgaccagcttcttacttgaattacccttcagctccctcgctcagcttcatgctcagcatttgcccagactctgacctcttctccattgggatctttttcttggtctcttggttccagactcaccctcatccctaccttgccttttgttttcctcccaatttcttggcttctggctctagacaggatatggctgttcctgctttcaaacctgtctattattcccaacttaatctgtctgtcagtgacaccttctctcttgctttactgaaaggcatggcaccttaatctgtgagaggggtgggaagcttcagccttctacctggttctttagtttctctaacttaatccttcagaagatggcaagtctttacttttggattctggcaatgtggcccacactttcgtgttgaattacagtcatggtatgtagttttttttttgtttgtttgagacagagtctggctctgtcgcccaggctggagtggagtggcacgatctcggctcactgcaagctccgcctcctgggctcacgccattctcctgccttagcctccagaatagctgggactacaggcacccgccaccatgcctggagaagtttttgtatttttagtggagacagggtttcaccatgttaaccaggatggtctcgatctcctgacctcgtgatccacccgtctcggcctcccaaagtgctgggattacaggcgtgagccactgcgcccagcccatggcttctagtgaggacgttgccagctccccggagcgccactacacgcccttgccttctgcttccagggaactcaccagtcaccaaggtgtcctggggaagtgtcgctacgtttactatgggaaaaactcagagggcaacaggtttatccgagatgaccagctctgaagccaacttctgtataccttcacccatttcatgaaaataaaatcaaaagggaaatcaaaaataaagaaaacgctaaagaaaaaacaatagcccacattgcctctctttgggaaaagctatgacttcagcttttggtaccttccgctgactttgccaggcctgtcaagatgatccttctgccttagactgagtggtcacatagagattgacatgattgcccttaagcaggtctcatccaccagggtgacagacagcggtggcaaagcaacagggctgacagcatgaacaccatgatagattgcctggtcctgccactgctcacaggggagcagaggtcacacctggggcctccctggacatgctcagtggctgcagtcaagtgagaaagactgtcctcagctcgcctattgaattgaaatccctctgataccatcgtgctgtgggcttatttttagtgaaatagtcacagtttaggggatggccattctccctcactccttttaaatcttaacgtcctgtattctgcatatacatagctcccgtctcttcccctccaccttcctttagcatcgattttatgacaggtggtgcatttcagtttgcagtttttcggagaacaaggtataacttcccagccaggtcatacatttatggctggcttcatgttgctacaatccctttattggcgtaaatagctttccctaaatccctgactacaaaagcgtggacttttatcttgtttcattcaactctaaatccacttcttgccctgaatatgatgcagtgtaaggcataaggcatctttctcagcatgagggtttggttgcaccagggactcttatttattaatttatttttaaccgtacacacttccagtgatgcctgtggccatacttgtgcgtggggctggcttgctcctttgggtgctatttaaagggagtgaggtgatgaaagatagagtgaagggtcaggaggttaaaaaacaaaattaagactgttgaaaacacccaccagaccaaagagtttttatagaaggcacaaaccttttggattttgcatctttgtcatgacctctcagaaatcaaatccacaggttgtgagacagtgctctgtcttcctgtatgcttggctgtgcactagcactaatgtcacaaggaacataagtgtgatcattgctagttgggtgactcaaagtttatctaacttgctggtgcaccagtcaaatcactctagaagatgttcaaaaggttgattgattgttcttgacacgatagtgtttatttttctgcttcttccatttagaccaagtgttcattgtcctcccagtattaggtcagtttgatgacagcaaaacctgaaagagaatccctccaagttatagatactgagggactaggagctgctattgtaaaactatggggactcagaatccctaagctgcccaaggagaacctactttctcagctctagcccgtttacatagcctctggcccactgagtcaacacaggccttgaatgacatgtattgaggctggcaggagtccctgtttgagattacacaacctttgttaatcagttctttagacaagttaacattaaaatcctcaaaaccatgaaaaattggagaatgttgaatgtttgcatttatctctcaaatccattagtaactggatttgagtaccttttctctgtttgatctacaaaacagcactggaaaaatgctttaaattatctgcatttggtcccaccctgggtcattgtttagaagcatcaacacatgttttctccctggcataatatgggcagccagaattctgtgcaagggcagctagacgagtcagatgtcatatccaatctagccacacatatatccttgtctttataaaaggctttaaccctgcctcaaacaataaaaaagcacttgtgaactgaccacagaatttttccatctttatttttcttacttgtttactttttttaatgtcagaaccatttgtatcatgcgcaggaatgtctccctcaatgtgagctttggaggcaaaacatatttttggagtgagttattgaccacattgtttccctctctttgggttgtttattttcttccagaatggtgtaataactttaattaagattagctttaattataaattacctaaaggccatcactaaggtatattcatcttattgatagaattatagtcagctttgtttctcttaagcagggatagtgataatgaagtgctgggttggttacagttccactgtgtgttaaccaaaatttgctgtgctagagctagactttggtctgaattggcagaggtagaacccatgttgcatgtttatcctaaatctgtaggaatttcccaaaccttgtttttcaaagttgagaagtagaaagtaataaattcaatcagggcccagacatgttttgtaccccctttaccctttggtctttcttccttttatcctattccactgagcttgttctttggggattgtggtgcctgacatcactgtctttcctcccctaggacactgacttgagtggagagacctcggcaattcaaggctgtcctgcagctctctgttgcctcagcaatgtcaggacgactgtctctttcctaagtaacataattttaaagaacaatttgttcctcagggaataatgtcttggattgtggggaatcctattaaaagtacaactattgcagtcatttgcttttacttttaccagcctcactcataaaccctccatctgtttgttgctttaaatagaagcacattataagagattatcacttgatcaggctgcatgtctgagtgttgtgtgttttcacatactcatgtatactaaggaataaaagaaagcaaaccac

SEQ ID NO: 6939 - protein, 55 aa, Homo sapiens
MASSEDVASSPERHYTPLPSASRELTSHQGVLGKCRYVYYGKNSEGNRFIRDDQL

SEQ ID NO: 6940 - DNA, 672 bp, Homo sapiens
ggaacaagcttgaaatagccaagagctagacacaaaagccagtgctgcagtagcctagagactgtggaagagaggaggcttggggcatttactaagtgcagacgtggaaatgttggcatgtggatagaccctgtaccaaaaacccagcagaagattcagagtccctgagatgcttcctcctcatcttcttcgccaagcacctcttgtcactgatcttggaagttagaggtgggaaaaggcaggtgtcctggggaagtgtcgctacgtttactatgggaaaaactcagagggcaacaggtttatccgagatgaccagctctgaagccaacttctgtataccttcacccatttcatgaaaataaaatcaaaagggaaatcaaaaataaagaaaacgctaaagaaaaaacaatagcccacattgcctctctttgggaaaagctatgacttcagcttttggtaccttccgctgactttgccaggcctgtcaagatgatccttctgccttagactgagtggtcacatagagattgacatgattgcccttaagcaggtctcatccaccagggtgacagacagcggtggcaaagcaacagggctgacagcatgaacaccatgatagattgcctggtcctgccactgctcacaggggagcagaggtcacacctggggcct

SEQ ID NO: 6941 - protein, 32 aa, Homo sapiens
SWKLEVGKGRCPGEVSLRLLWEKLRGQQVYPR

SEQ ID NO: 6942 - DNA, 355 bp, Homo sapiens
tgcagacgtggaaatgttggcatgtggatagaccctgtaccaaaaacccagcagaagattcagagtccctgagatgcttcctcctcatcttcttcgccaagcacctcttgtcactgatcttggaagttagaggtgggaaaaggcagccccagccctgagattgctccagcctgttcttcacctgcagtgccaggtgtcctggggaagtgtcgctacgtttactatgggaaaaactcagagggcaacaggtttatccgagatgaccagctctgaagccaacttctgtataccttcacccatttcatgaaaataaaatcaaaagggaaatcaaaaataaagaaaacgctaaagaaaa

SEQ ID NO: 6943 - protein, 51 aa, Homo sapiens
SWKLEVGKGSPSPEIAPACSSPAVPGVLGKCRYVYYGKNSEGNRFIRDDQL

SEQ ID NO: 6944 - DNA, 570 bp, Homo sapiens
agctgaaagaggaggtggtgttcaatgggaatcacaaaggctatggtagaagtgagtaatgagagctgggctcgagccctggtctgagttcagtgtggatgtttaaaggcgaccattcttaagaggcaagagaattcgatactgggttcaaatctcaattttattttaaaagtgcatcagtaacttgtagctcatttgatggcctgcagcccagcttgtttagaaatcccttctattctctctggtactccaagtcccaaagaatctgttctgatggtgtggttacacaaccagccaagcacagccttaggttgctctcaactcagaactcaccctatcacacgttgacgaatgcaagagcctgttagagacactggaacccaagatggtgtcctggggaagtgtcgctacgtttactatgggaaaaactcagagggcaacaggtttatccgagatgaccagctctgaagccaacttctgtataccttcacccatttcatgaaaataaaatcaaaagggaaatcaaaaataaagaaaacgctaaagaaaaaacaatagcccacattgcct

SEQ ID NO: 6945 - protein, 38 aa, Homo sapiens
MQEPVRDTGTQDGVLGKCRYVYYGKNSEGNRFIRDDQL

SEQ ID NO: 6946 - DNA, 276 bp, Homo sapiens
aatgggtgtgaatctctgtgtgctcatatacatatgcttgattatatgatcatctcgtggaggacatgtgacacgggaagacaatagggcacatgatatgctctttgatctaaggtgtcctggggaagtgtcgctacgtttactatgggaaaaactcagagggcaacaggtttatccgagatgaccagctctgaagccaacttctgtataccttcacccatttcatgaaaataaaatcaaaagggaaatcaaaaataaagaaaacgctaaagaaaa

SEQ ID NO: 6947 - DNA, 370 bp, Homo sapiens
atacaccccaaagaactgaaaacaagaactcaaacagatacttgtacacctatgttcatagcagccttattcacatggacaaaagatgaagtttcattcttgtcgcccaggctggagtgcagtggtgcgttctcggctcactgcaacctccgcctccccggctcaagcgattctcctgtctcagcctcccaagtagctggaaatacaggtgtcctggggaagtgtcgctacgtttactatgggaaaaactcagagggcaacaggtttatccgagatgaccagctctgaagccaacttctgtataccttcacccatttcatgaaaataaaatcaaaagggaaatcaaaaataaagaaaacgctaaagaaaa

SEQ ID NO: 6948 - protein, 78 aa, Homo sapiens
MFIAALFTWTKDEVSFLSPRLECSGAFSAHCNLRLPGSSDSPVSASQVAGNTGVLGKCRYVYYGKNSEGNRFIRDDQL

SEQ ID NO: 6949 - DNA, 1241 bp, Homo sapiens
aggatttggagagcggaggaatgaaggagagcagagaggagaggcttggagaaagaagagggttgtcatctcagttgacacaggggtggaggcccgtgcgtgggcccctgaagtttctagggctgactcttcctaattttctgtgtggccttgaacaaatcctctctctggatgtcactcgcacctaagaagccagatacttcagatgaggaaactgagtctcagagaagtcgagggactggctcagagatgtacagcatggcattgctggagccggcctggaagacaagcagtctccctccaattgcacactgttttctctgaggctctgcattgttggaggaagggtcagaggggctggagaggaagaaacaatgcaaatatgaggcagcagaagggaaatagaggtactgggggcttccagcctcatgctgcttgctctctcctgaatccatcgttggtctttctgtcctaatccgaccactccatcgccagcctccattcctctgaatgttgatagaagagctccggactctttccagctttccagacttttccactcacacagactcaagggtcctcccaactgtcttgtgaaaagaggccatcccattccacaggaggggaaactgaggcttggaaaaggcacatggtcccatgtagcgtcactgtggctcttcggactcttccaggtccctctgcctgtcctgggcctgccattgttccacctccaggtctgcccactgcctgcacctctcctccccgtctcaccttgccctgcactgcagctgccacgacctccagcagccctttagaccaacgtcctaaagcgataatgccatgatgttcctggctttttcaaaacccttttcctagagtgtgttaaccagaatggcagtcccacgaggatctctgtgatgaaagggcttcatggtcaaatagtttgggaaacgtggcttcctttgtcccttccttctcagtttgccaaatttaattatgccacacccccatgcaccttcttttgtttcatgatatcattatttaataccccattttggaatattatctaagaaatgtggcctgaggaatgaagttcaaatctctcctcttggcgtccaaagggcttcaccatcagatctcaaccttgttttccaccgtgcctctcttggacatccagagcccttgccctcccctcagtagtccctggtgtccacaaaatccatggtctcaccctccctgtt

SEQ ID NO: 6950 - protein, 89 aa, Homo sapiens
MRKLSLREVEGLAQRCTAWHCWSRPGRQAVSLQLHTVFSEALHCWRKGQRGWRGRNNANMRQQKGNRGTGGFQPHAACSLLNPSLVFLS

SEQ ID NO: 6951 - DNA, 664 bp, Homo sapiens
agagcggaggaatgaaggagagcagagaggagaggcttggagaaaaatgagaagtctctccagccccaatgacggcaagcaccctggagctgagggggctgagtggcggctgtgccctttggacaggcagcagctcccagttttctcacctaggggtagctggtggccaagaggaaagaggagttgtcggacagggctttgctctgtctcccaggctggagtgcaggggtgccatcatagctcactgcagctttgacctcctggactaagctatcctcctgcctcggcctcctgagtgggaaggactacaggcccccaaaggctctgcgcagaccagcactgtctcctccttcatccacagagaggatgaaagaacatggcaagaggaagactcacagaaccccacagagaagctttgagaattgggctgtctggctctcccatcacccatttggccaccagctttggtcccagctgctgtgccctcgggggatgcattatggccctgaaaggggcccttgtccctttttggggtgtcatcctggctgggtggtatggatttctgctgtaaacatggcccatctgggagaagcccaggtgccacgttttgaacagctctgaaacttaaagctcagaaggctttgaaatgcaaatattttgaagg

SEQ ID NO: 6952 - protein, 69 aa, Homo sapiens
MRSLSSPNDGKHPGAEGAEWRLCPLDRQQLPVFSPRGSWWPRGKRSCRTGLCSVSQAGVQGCHHSSLQL

SEQ ID NO: 6953 - DNA, 3664 bp, Homo sapiens
ggcagggagcggatttgcatgcggccgccgcggccgctgcctgcgcccgagcccgccgccgccgccggagcccgcgcccgcgcccgcgcccggcccgcgcggccccatgcctctgccgcggccctcgggggggcgaaggtgaagaccggctcctaggatgagtgaaggggcggccgctgcctcgccacctggtgccgcttcggcagccgccgcctcggccgaggagggcaccgcggcggctgcggcggcggcagcggcgggcgggggcccggacggcggcggcgaaggggcggccgagcccccccgggagttacgctgtagcgactgcatcgtgtggaaccggcagcagacgtggctgtgcgtggtacctctgttcatcggcttcatcggcctggggctcagcctcatgcttctcaaatggatcgtggtgggctccgtcaaggagtacgtgcccaccgacctagtggactccaaggggatgggccaggaccccttcttcctctccaagcccagctctttccccaaggccatggagaccaccaccactaccacttccaccacgtcccccgccaccccctccgccgggggtgccgcctcctccaggacgcccaaccggattagcactcgcctgaccaccatcacgcgggcgcccactcgcttccccgggcaccgggtgcccatccgggccagcccgcgctccaccacagcacggaacactgcggcccctgcgacggtcccgtccaccacggccccgttcttcagtagcagcacgctgggctcccgacccccggtgccaggaactccaagtacccaggcaatgccctcctggcctactgcggcatacgctacctcctcctaccttcacgattctactccctcctggaccctgtctccctttcaggatgctgcctcctcttcttcctcttcttcctcctccgctaccaccaccacaccagaaactagcaccagccccaaatttcatacgacgacatattccacagagcgatccgagcacttcaaaccctgccgagacaaggaccttgcatactgtctcaatgatggcgagtgctttgtgatcgaaaccctgaccggatcccataaacactgtcggtgcaaagaaggctaccaaggagtccgttgtgatcaatttctgccgaaaactgattccatcttatcggatccaacagaccacttggggattgaattcatggagagtgaagaagtttatcaaaggcaggtgctgtcaatttcatgtatcatctttggaattgtcatcgtgggcatgttctgtgcagcattctacttcaaaagcaagaaacaagctaaacaaatccaagagcagctgaaagtgccacaaaatggtaaaagctacagtctcaaagcatccagcacaatggcaaagtcagagaacttggtgaagagccatgtccagctgcaaaattattcaaaggtggaaaggcatcctgtgactgcattggagaaaatgatggagtcaagttttgtcggcccccagtcattccctgaggtcccttctcctgacagaggaagccagtctgtcaaacaccacaggagtctatcctcttgctgcagcccagggcaaagaagtggcatgctccataggaatgccttcagaaggacacccccgtcaccccgaagtaggctaggtggaattgtgggaccagcatatcagcaactcgaagaatcaaggatcccagaccaggatacgataccttgccaagggtattcatccagtggtttaaaaacccaacgaaatacatcaataaatatgcaactgccttcaagagagacaaacccctattttaatagcttggagcaaaaggacctggtgggctattcatccacaagggccagttctgtgcccatcatcccttcagtgggtttagaggaaacctgcctgcaaatgccagggatttctgaagtcaaaagcatcaaatggtgcaaaaactcctattcagctgacgttgtcaatgtgagtattccagtcagcgattgtcttatagcagaacaacaagaagtgaaaatattgctagaaactgtccaggagcagatccgaattctgactgatgccagacggtcagaagactacgaactggccagcgtagaaaccgaggacagtgcaagcgaaaacacagcctttctccccctgagtcccacagccaaatcagaacgagaggcgcaatttgtcttaagaaatgaaatacaaagagactctgcattgaccaagtgacttgagatgtaggaatctgtgcattctatgctttgctcaacaggaaagagaggaaatcaaatacaaattatttatatgcattaatttaagagcatctacttagaagaaaccaaatagtctatcgccctcatatcatagtgttttttaacaaaatatttttttaagggaaagaaatgtttcaggagggataaagcttaccattaaagcttttgggtagaattctgaatccaatttcgtttagtcccaacactgtcctctttggctcttagaagatgtgggcaattcagacccttggccccacagtgccagtgtctcattaaaaaacactggcagttacctggtttcaaaaagaggagagctgcatcccgcaggtggatgcaccagtgagcaggtggctcttgccatttggcttgccagtcccaagccctaaatttctattcacccaatagcctcatcacaggttatgtcatgtcgacacatgtagtgttttctatttgatttttggagaatgccacaaaagactctgcaatgggaaggaggacaggagatagaaggagaaaccgggggcaatcttaactactcttgtgtgccaccttcctctgagatttgaatgcacagatctcagctggaggtatgaaattattacagaaaaagagacaaaaaaatccttatatcgtgtcactaaaatcatgctaatagaaatgtttttccttgagattgtttagaggctctggaggagcgtttctcagtttttgtgtgcctgtgtgcacatgtgtgtgcgagcgtgtgtgtgtgtggacttgctcacgcgggcacatatgctgtaagcacatgtgttcattgtgcgtatgtgtgtgcatgtgtgcgcgtattacgcttgctaaaatttgttctgaaacatcagggaatctactattcagaaaaattatttccctcttagatcttttcactttaaatttttccattaagtataaagttcagttagttcttaaatcaaggtcacttgcatggtggggtcgtataaaactcttgacactgtctagaccattttctgatgtgaatacttttgagaggatcaactattggctcattaatgatatcagtatcataaggtgagttcatcaaggatgtgtgtttattttgaatcatgcctacttaaattattaatacaagacaattaacaaattgacagttaccatttgctttctcatcatcctcattaccatttattttatagcaagtctgctatgtgtggaccaaggcttcggcttctgtggttagtatgggaagaataaattgttgaaataaaaatacccagactattcagttcacaagaagccccccaaaagaacagtaaattgtgttgtatgttcatttggaataaagcaatatttttaccactgctaaggtgaactg

SEQ ID NO: 6954 - protein, 696 aa, Homo sapiens; identical to SEQ ID NO: 960

SEQ ID NO: 6955 - DNA, 4325 bp, Homo sapiens
ggcagggagcggatttgcatgcggccgccgcggccgctgcctgcgcccgagcccgccgccgccgccggagcccgcgcccgcgcccgcgcccggcccgcgcggccccatgcctctgccgcggccctcgggggggcgaaggtgaagaccggctcctaggatgagtgaaggggcggccgctgcctcgccacctggtgccgcttcggcagccgccgcctcggccgaggagggcaccgcggcggctgcggcggcggcagcggcgggcgggggcccggacggcggcggcgaaggggcggccgagcccccccgggagttacgctgtagcgactgcatcgtgtggaaccggcagcagacgtggctgtgcgtggtacctctgttcatcggcttcatcggcctggggctcagcctcatgcttctcaaatggatcgtggtgggctccgtcaaggagtacgtgcccaccgacctagtggactccaaggggatgggccaggaccccttcttcctctccaagcccagctctttccccaaggccatggagaccaccaccactaccacttccaccacgtcccccgccaccccctccgccgggggtgccgcctcctccaggacgcccaaccggattagcactcgcctgaccaccatcacgcgggcgcccactcgcttccccgggcaccgggtgcccatccgggccagcccgcgctccaccacagcacggaacactgcggcccctgcgacggtcccgtccaccacggccccgttcttcagtagcagcacgctgggctcccgacccccggtgccaggaactccaagtacccaggcaatgccctcctggcctactgcggcatacgctacctcctcctaccttcacgattctactccctcctggaccctgtctccctttcaggatgctgcctcctcttcttcctcttcttcctcctccgctaccaccaccacaccagaaactagcaccagccccaaatttcatacgacgacatattccacagagcgatccgagcacttcaaaccctgccgagacaaggaccttgcatactgtctcaatgatggcgagtgctttgtgatcgaaaccctgaccggatcccataaacactgtcggtgcaaagaaggctaccaaggagtccgttgtgatcaatttctgccgaaaactgattccatcttatcggatccaacagaccacttggggattgaattcatggagagtgaagaagtttatcaaaggcaggtgctgtcaatttcatgtatcatctttggaattgtcatcgtgggcatgttctgtgcagcattctacttcaaaagcaagaaacaagctaaacaaatccaagagcagctgaaagtgccacaaaatggtaaaagctacagtctcaaagcatccagcacaatggcaaagtcagagaacttggtgaagagccatgtccagctgcaaaattattcaaaggtggaaaggcatcctgtgactgcattggagaaaatgatggagtcaagttttgtcggcccccagtcattccctgaggtcccttctcctgacagaggaagccagtctgtcaaacaccacaggagtctatcctcttgctgcagcccagggcaaagaagtggcatgctccataggaatgccttcagaaggacacccccgtcaccccgaagtaggctaggtggaattgtgggaccagcatatcagcaactcgaagaatcaaggatcccagaccaggatacgataccttgccaagggtattcatccagtggtttaaaaacccaacgaaatacatcaataaatatgcaactgccttcaagagagacaaacccctattttaatagcttggagcaaaaggacctggtgggctattcatccacaagggccagttctgtgcccatcatcccttcagtgggtttagaggaaacctgcctgcaaatgccagggatttctgaagtcaaaagcatcaaatggtgcaaaaactcctattcagctgacgttgtcaatgtgagtattccagtcagcgattgtcttatagcagaacaacaagaagtgaaaatattgctagaaactgtccaggagcagatccgaattctgactgatgccagacggtcagaagactacgaactggccagcgtagaaaccgaggacagtgcaagcgaaaacacagcctttctccccctgagtcccacagccaaatcagaacgagaggcgcaatttgtcttaagaaatgaaatacaaagagactctgcattgaccaagtgacttgagatgtaggaatctgtgcattctatgctttgctcaacaggaaagagaggaaatcaaatacaaattatttatatgcattaatttaagagcatctacttagaagaaaccaaatagtctatcgccctcatatcatagtgttttttaacaaaatatttttttaagggaaagaaatgtttcaggagggataaagcttaccattaaagcttttgggtagaattctgaatccaatttcgtttagtcccaacactgtcctctttggctcttagaagatgtgggcaattcagacccttggccccacagtgccagtgtctcattaaaaaacactggcagttacctggtttcaaaaagaggagagctgcatcccgcaggtggatgcaccagtgagcaggtggctcttgccatttggcttgccagtcccaagccctaaatttctattcacccaatagcctcatcacaggttatgtcatgtcgacacatgtagtgttttctatttgatttttggagaatgccacaaaagactctgcaatgggaaggaggacaggagatagaaggagaaaccgggggcaatcttaactactcttgtgtgccaccttcctctgagatttgaatgcacagatctcagctggaggtatgaaattattacagaaaaagagacaaaaaaatccttatatcgtgtcactaaaatcatgctaatagaaatgtttttccttgagattgtttagaggctctggaggagcgtttctcagtttttgtgtgcctgtgtgcacatgtgtgtgcgagcgtgtgtgtgtgtggacttgctcacgcgggcacatatgctgtaagcacatgtgttcattgtgcgtatgtgtgtgcatgtgtgcgcgtattacgcttgctaaaatttgttctgaaacatcagggaatctactattcagaaaaattatttccctcttagatcttttcactttaaatttttccattaagtataaagttcagttagttcttaaatcaaggtcacttgcatggtggggtcgtataaaactcttgacactgtctagaccattttctgatgtgaatacttttgagaggatcaactattggctcattaatgatatcagtatcataaggtgagttcatcaaggatgtgtgtttattttgaatcatgcctacttaaattattaatacaagacaattaacaaattgacagttaccatttgctttctcatcatcctcattaccatttattttatagcaagtctgctatgtgtggaccaaggcttcggcttctgtggttagtatgggaagaataaattgttgaaataaaaatacccagactattcagttcacaagaagccccccaaaagaacagtaaattgtgttgtatgttcatttggaataaagcaatatttttaccactgctaaggtgaactgaaacctctcctgaagatttgtctgtttatttaccctcactttcatgggacatatgaggaaattagtgttcacatatccagtctttttccaattattggtggtgttgagttgttatgtttacactgttttaaataaaaaggcaccgtatttgaaagcataaaagatttcttttactgcagttttggaaaaccttggttaaaatctctttgtggaagacacattccatggagaaggaatgtaactatttctgagtcaagcagtaaatatatacaattcttatttcaggttaagttgtttctgttgaaaatacattgcaaattgctccttgggaacatgagttattagtagacatattgtcatccagaaaaaagaaagagcactatgtatttatcagaactacttaatagaaattcaaagtctcagatgttgaaacactttggtaaaaatgcattttacatttaacaaaaggttgtgtgatgatatttattatttgttctgttacagttccatcgttttgaatatggaggtaatattggtagaatttcaaaagattattataaatttgtaatgtctagatcatctaagttctcatttaaaaatattatatctgtgggaacattttagaaaatggtcttaaaaactaacagatctataaaaaccc

SEQ ID NO: 6956 - protein, 696 aa, Homo sapiens; identical to SEQ ID NO: 960

SEQ ID NO: 6957 - DNA, 4243 bp, Homo sapiens
caggaaggagggaaggaaggaatctgccacaaaccagaatggcagtagagccagtaacttgctgcttctctctcctttggctgaagcagtcatttttgagagcacattttcccaggaggtgtttagagcctccactcaacaaatctagcttgtgttttgtagaaggataaaggattcatgagtgtatgtgtgaacatattcaatggattgaaaatgagtctaccctgaagaccccagatttttgatctgctcttttgatgcagttgatagaataatggagtgtggtatacctccaacccttgtatgcgttgggagaggagggggactacacacggtttttcagaggcaaaaactcctttatgaattgattgccacatcacccttctggttccatctgaggtcttctttgcagaagccactcagcaccttttggaattgaatgctgacatcgcatcagattcaaaaggaatgctgctgttgattcctttctgtactcatcacatggtgaggaatatgctgggagtctgtataagatgaggctcttgcacggcctgccagagagtgcctgtcatggactggagaactgcatccgttcatttacatatcggcagctaaaattagtggagtcacccacgtttttcaccctaaagaagaaccttcagataagaatccagttcatcactctcgcctgctcaggcttacttggttgctccttgttaccagacagaggggctatagcgctgtgtaagagcaaatgttaaattagtattaatagccaatggcatctctcttctatttttcactgatcagatacgacgacatattccacagagcgatccgagcacttcaaaccctgccgagacaaggaccttgcatactgtctcaatgatggcgagtgctttgtgatcgaaaccctgaccggatcccataaacactgtcggtgcaaagaaggctaccaaggagtccgttgtgatcaatttctgccgaaaactgattccatcttatcggatccaaagacggggtttcaccgtgttaaccaggatggtctcaatttcctgacctcgtgatccgcctacctcggcctcccaaagtgctgggattacagaccacttggggattgaattcatggagagtgaagaagtttatcaaaggcaggtgctgtcaatttcatgtatcatctttggaattgtcatcgtgggcatgttctgtgcagcattctacttcaaaagcaagaaacaagctaaacaaatccaagagcagctgaaagtgccacaaaatggtaaaagctacagtctcaaagcatccagcacaatggcaaagtcagagaacttggtgaagagccatgtccagctgcaaaattattcaaaggtggaaaggcatcctgtgactgcattggagaaaatgatggagtcaagttttgtcggcccccagtcattccctgaggtcccttctcctgacagaggaagccagtctgtcaaacaccacaggagtctatcctcttgctgcagcccagggcaaagaagtggcatgctccataggaatgccttcagaaggacacccccgtcaccccgaagtaggctaggtggaattgtgggaccagcatatcagcaactcgaagaatcaaggatcccagaccaggatacgataccttgccaagggtattcatccagtggtttaaaaacccaacgaaatacatcaataaatatgcaactgccttcaagagagacaaacccctattttaatagcttggagcaaaaggacctggtgggctattcatccacaagggccagttctgtgcccatcatcccttcagtgggtttagaggaaacctgcctgcaaatgccagggatttctgaagtcaaaagcatcaaatggtgcaaaaactcctattcagctgacgttgtcaatgtgagtattccagtcagcgattgtcttatagcagaacaacaagaagtgaaaatattgctagaaactgtccaggagcagatccgaattctgactgatgccagacggtcagaagactacgaactggccagcgtagaaaccgaggacagtgcaagcgaaaacacagcctttctccccctgagtcccacagccaaatcagaacgagaggcgcaatttgtcttaagaaatgaaatacaaagagactctgcattgaccaagtgacttgagatgtaggaatctgtgcattctatgctttgctcaacaggaaagagaggaaatcaaatacaaattatttatatgcattaatttaagagcatctacttagaagaaaccaaatagtctatcgccctcatatcatagtgttttttaacaaaatatttttttaagggaaagaaatgtttcaggagggataaagcttaccattaaagcttttgggtagaattctgaatccaatttcgtttagtcccaacactgtcctctttggctcttagaagatgtgggcaattcagacccttggccccacagtgccagtgtctcattaaaaaacactggcagttacctggtttcaaaaagaggagagctgcatcccgcaggtggatgcaccagtgagcaggtggctcttgccatttggcttgccagtcccaagccctaaatttctattcacccaatagcctcatcacaggttatgtcatgtcgacacatgtagtgttttctatttgatttttggagaatgccacaaaagactctgcaatgggaaggaggacaggagatagaaggagaaaccgggggcaatcttaactactcttgtgtgccaccttcctctgagatttgaatgcacagatctcagctggaggtatgaaattattacagaaaaagagacaaaaaaatccttatatcgtgtcactaaaatcatgctaatagaaatgtttttccttgagattgtttagaggctctggaggagcgtttctcagtttttgtgtgcctgtgtgcacatgtgtgtgcgagcgtgtgtgtgtgtggacttgctcacgcgggcacatatgctgtaagcacatgtgttcattgtgcgtatgtgtgtgcatgtgtgcgcgtattacgcttgctaaaatttgttctgaaacatcagggaatctactattcagaaaaattatttccctcttagatcttttcactttaaatttttccattaagtataaagttcagttagttcttaaatcaaggtcacttgcatggtggggtcgtataaaactcttgacactgtctagaccattttctgatgtgaatacttttgagaggatcaactattggctcattaatgatatcagtatcataaggtgagttcatcaaggatgtgtgtttattttgaatcatgcctacttaaattattaatacaagacaattaacaaattgacagttaccatttgctttctcatcatcctcattaccatttattttatagcaagtctgctatgtgtggaccaaggcttcggcttctgtggttagtatgggaagaataaattgttgaaataaaaatacccagactattcagttcacaagaagccccccaaaagaacagtaaattgtgttgtatgttcatttggaataaagcaatatttttaccactgctaaggtgaactgaaacctctcctgaagatttgtctgtttatttaccctcactttcatgggacatatgaggaaattagtgttcacatatccagtctttttccaattattggtggtgttgagttgttatgtttacactgttttaaataaaaaggcaccgtatttgaaagcataaaagatttcttttactgcagttttggaaaaccttggttaaaatctctttgtggaagacacattccatggagaaggaatgtaactatttctgagtcaagcagtaaatatatacaattcttatttcaggttaagttgtttctgttgaaaatacattgcaaattgctccttgggaacatgagttattagtagacatattgtcatccagaaaaaagaaagagcactatgtatttatcagaactacttaatagaaattcaaagtctcagatgttgaaacactttggtaaaaatgcattttacatttaacaaaaggttgtgtgatgatatttattatttgttctgttacagttccatcgttttgaatatggaggtaatattggtagaatttcaaaagattattataaatttgtaatgtctagatcatctaagttctcatttaaaaatattatatctgtgggaacattttagaaaatggtcttaaaaactaacagatctataaaaaccc

SEQ ID NO: 6958 - protein, 346 aa, Homo sapiens
MESEEVYQRQVLSISCIIFGIVIVGMFCAAFYFKSKKQAKQIQEQLKVPQNGKSYSLKASSTMAKSENLVKSHVQLQNYSKVERHPVTALEKMMESSFVGPQSFPEVPSPDRGSQSVKHHRSLSSCCSPGQRSGMLHRNAFRRTPPSPRSRLGGIVGPAYQQLEESRIPDQDTIPCQGYSSSGLKTQRNTSINMQLPSRETNPYFNSLEQKDLVGYSSTRASSVPIIPSVGLEETCLQMPGISEVKSIKWCKNSYSADVVNVSIPVSDCLIAEQQEVKILLETVQEQIRILTDARRSEDYELASVETEDSASENTAFLPLSPTAKSEREAQFVLRNEIQRDSALTK

SEQ ID NO: 6959 - DNA, 531 bp, Homo sapiens
ccctcgggatgcgcttcgctgttctctaggaggtaccaacctctggcggtgggtcttgcgtcccggcggaaagctccgaggagtcctgtagacttgtggctcgggtggagccggcggaaaaccccgagaagcttgagacagccgtggctgaggtggagccggcgtcgctgccctggagcgtgggcgagtttcctcttagccggagcttcagggattgactcaaagactcctccgcttttttagttgttttgggtgtgaatacagcccggactaaaccttagtcgcctagactaaaccttagcctcccaggctgccaaaacagcacagcttttacagatgactcttacatcaccatccctactctgtgatactgtgtttttcaaagtttagtgcctgaaccatcagcatgaaatctgcctgagacggttgttgaaaattcacatcgctgggccttgcggcaggatgcctcttgaagcccaagtggaagccaacagaagaggggtccatgtgtacagataggcctggagtgat

SEQ ID NO: 6960 - protein, 80 aa, Homo sapiens
PSGCASLFSRRYQPLAVGLASRRKAPRSPVDLWLGWSRRKTPRSLRQPWLRWSRRRCPGAWASFLLAGASGIDSKTPPLF

SEQ ID NO: 6961 - DNA, 2591 bp, Homo sapiens
gatgtaagagtcatctgtaaaagctgtgctgttttggcagcctgggaggctaaggtttagtctaggcgactaaggtttagtccgggctgtattcacacccaaaacaactaaaaaagcggaggagtctttgagtcaatccctgaagctccggctaagaggaaactcgcccacgctccagggcagcgacgccggctccacctcagccacggctgtctcaagcttctcggggttttccgccggctccacccgagccacaagtctacaggactcctcggagctttccgccgggacgcaagacccaccgccagaggttggtacctcctagagaacagcgaagcgcatcccgagggccgccggccggaagcgccctccagacccgccccctgccctccggagccggaagctgggcatctgcagctggctcggcgcactccactgaccgtcccgacgatgctacgcgcgcccggctgcctcctccggacctccgtagcgcctgccgcggccctggctgcggcgctgctctcgtcgcttgcgcgctgctctcttctagagccgagggacccggtggcctcgtcgctcagcccctatttcggcaccaagactcgctacgaggatgtcaaccccgtgctattgtcgggccccgaggctccgtggcgggaccctgagctgctggaggggacctgcaccccggtgcagctggtcgccctcattcgccacggcacccgctaccccacggtcaaacagatccgcaagctgaggcagctgcacgggttgctgcaggcccgcgggtccagggatggcggggctagtagtaccggcagccgcgacctgggtgcagcgctggccgactggcctttgtggtacgcggactggatggacgggcagctagtagagaagggacggcaggatatgcgacagctggcgctgcgtctggcctcgctcttcccggcccttttcagccgtgagaactacggccgcctgcggctcatcaccagttccaagcaccgctgcatggatagcagcgccgccttcctgcaggggctgtggcagcactaccaccctggcttgccgccgccggacgtcgcagatatggagtttggacctccaacagttaatgataaactaatgagattttttgatcactgtgagaagtttttaactgaagtagaaaaaaatgctacagctctttatcacgtggaagccttcaaaactggaccagaaatgcagaacattttaaaaaaagttgcagctactttgcaagtgccagtaaatgatttaaatgcaggtctcagccaatttcttctccagtcatcctccagtttggtcatgcagagactcttcttccactgctttctctcatgggctacttcaaagacaaggaacccctaacagcgtacaattacaaaaaacaaatgcatcggaagttccgaagtggtctcattgtaccttatgcctcgaacctgatatttgtgctttaccactgtgaaaatgctaagactcctaaagaacaattccgagtgcagatgttattaaatgaaaaggtgttacctttggcttactcacaagaaactgtttcattttatgaagatctgaagaaccactacaaggacatccttcagagttgtcaaaccagtgaagaatgtgaattagcaagggctaacagtacatctgatgaactatgagtaactgaagaacatttttaattctttaggaatctgcaatgagtgattacatgcttgtaataggtaggcaattccttgattacaggaagcttttatattacttgagtatttctgtcttttcacagaaaaacattgggtttctctctgggtttggacatgaaatgtaagaaaagatttttcactggagcagctctcttaaggagaaacaaatctatttagagaaacagctggccctgcaaatgtttacagaaatgaaattcttcctacttatataagaaatctcacactgagatagaattgtgatttcataataacacttgaaaagtgctggagtaacaaaatatctcagttggaccatccttaacttgattgaactgtctaggaactttacagattgttctgcagttctctcttcttttcctcaggtaggacagctctagcattttcttaatcaggaatattgtggtaagctgggagtatcactctggaagaaagtaacatctccagatgagaatttgaaacaagaaacagagtgttgtaaaaggacaccttcactgaagcaagtcggaaagtacaatgaaaataaatatttttggtatttatttatgaaatatttgaacattttttcaataattcctttttacttctaggaagtctcaaaagaccatcttaaattattatatgtttggacaattagcaacaagtcagatagttagaatcgaagtttttcaaatccattgcttagctaactttttcattctgtcacttggcttcgatttttatattttcctattatatgaaatgtatcttttggttgtttgatttttctttctttctttgtaaatagttctgagttctgtcaaatgccgtgaaagtatttgctataataaagaaaattcttgtgacttt

SEQ ID NO: 6962 - protein, 312 aa, Homo sapiens
MLRAPGCLLRTSVAPAAALAAALLSSLARCSLLEPRDPVASSLSPYFGTKTRYEDVNPVLLSGPEAPWRDPELLEGTCTPVQLVALIRHGTRYPTVKQIRKLRQLHGLLQARGSRDGGASSTGSRDLGAALADWPLWYADWMDGQLVEKGRQDMRQLALRLASLFPALFSRENYGRLRLITSSKHRCMDSSAAFLQGLWQHYHPGLPPPDVADMEFGPPTVNDKLMRFFDHCEKFLTEVEKNATALYHVEAFKTGPEMQNILKKVAATLQVPVNDLNAGLSQFLLQSSSSLVMQRLFFHCFLSWATSKTRNP

SEQ ID NO: 6963 - DNA, 2725 bp, Homo sapiens
gatgtaagagtcatctgtaaaagctgtgctgttttggcagcctgggaggctaaggtttagtctaggcgactaaggtttagtccgggctgtattcacacccaaaacaactaaaaaagcggaggagtctttgagtcaatccctgaagctccggctaagaggaaactcgcccacgctccagggcagcgacgccggctccacctcagccacggctgtctcaagcttctcggggttttccgccggctccacccgagccacaagtctacaggactcctcggagctttccgccgggacgcaagacccaccgccagaggttggtacctcctagagaacagcgaagcgcatcccgagggccgccggccggaagcgccctccagacccgccccctgccctccggagccggaagctgggcatctgcagctggctcggcgcactccactgaccgtcccgacgatgctacgcgcgcccggctgcctcctccggacctccgtagcgcctgccgcggccctggctgcggcgctgctctcgtcgcttgcgcgctgctctcttctagagccgagggacccggtggcctcgtcgctcagcccctatttcggcaccaagactcgctacgaggatgtcaaccccgtgctattgtcgggccccgaggctccgtggcgggaccctgagctgctggaggggacctgcaccccggtgcagctggtcgccctcattcgccacggcacccgctaccccacggtcaaacagatccgcaagctgaggcagctgcacgggttgctgcaggcccgcgggtccagggatggcggggctagtagtaccggcagccgcgacctgggtgcagcgctggccgactggcctttgtggtacgcggactggatggacgggcagctagtagagaagggacggcaggatatgcgacagctggcgctgcgtctggcctcgctcttcccggcccttttcagccgtgagaactacggccgcctgcggctcatcaccagttccaagcaccgctgcatggatagcagcgccgccttcctgcaggggctgtggcagcactaccaccctggcttgccgccgccggacgtcgcagatatggagtttggacctccaacagttaatgataaactaatgagattttttgatcactgtgagaagtttttaactgaagtagaaaaaaatgctacagctctttatcacgtggaagccttcaaaactggaccagaaatgcagaacattttaaaaaaagttgcagctactttgcaagtgccagtaaatgatttaaatgcaggtattagaatatttaaatgatctgaaacaatattggaaaagaggatatgggtatactattaacagtcgatccagctgcaccttgtttcaggatatctttcagcacttggacaaagcagttgaacagaaacaaaggtctcagccaatttcttctccagtcatcctccagtttggtcatgcagagactcttcttccactgctttctctcatgggctacttcaaagacaaggaacccctaacagcgtacaattacaaaaaacaaatgcatcggaagttccgaagtggtctcattgtaccttatgcctcgaacctgatatttgtgctttaccactgtgaaaatgctaagactcctaaagaacaattccgagtgcagatgttattaaatgaaaaggtgttacctttggcttactcacaagaaactgtttcattttatgaagatctgaagaaccactacaaggacatccttcagagttgtcaaaccagtgaagaatgtgaattagcaagggctaacagtacatctgatgaactatgagtaactgaagaacatttttaattctttaggaatctgcaatgagtgattacatgcttgtaataggtaggcaattccttgattacaggaagcttttatattacttgagtatttctgtcttttcacagaaaaacattgggtttctctctgggtttggacatgaaatgtaagaaaagatttttcactggagcagctctcttaaggagaaacaaatctatttagagaaacagctggccctgcaaatgtttacagaaatgaaattcttcctacttatataagaaatctcacactgagatagaattgtgatttcataataacacttgaaaagtgctggagtaacaaaatatctcagttggaccatccttaacttgattgaactgtctaggaactttacagattgttctgcagttctctcttcttttcctcaggtaggacagctctagcattttcttaatcaggaatattgtggtaagctgggagtatcactctggaagaaagtaacatctccagatgagaatttgaaacaagaaacagagtgttgtaaaaggacaccttcactgaagcaagtcggaaagtacaatgaaaataaatatttttggtatttatttatgaaatatttgaacattttttcaataattcctttttacttctaggaagtctcaaaagaccatcttaaattattatatgtttggacaattagcaacaagtcagatagttagaatcgaagtttttcaaatccattgcttagctaactttttcattctgtcacttggcttcgatttttatattttcctattatatgaaatgtatcttttggttgtttgatttttctttctttctttgtaaatagttctgagttctgtcaaatgccgtgaaagtatttgctataataaagaaaattcttgtgacttt

SEQ ID NO: 6964 - protein, 284 aa, Homo sapiens
MLRAPGCLLRTSVAPAAALAAALLSSLARCSLLEPRDPVASSLSPYFGTKTRYEDVNPVLLSGPEAPWRDPELLEGTCTPVQLVALIRHGTRYPTVKQIRKLRQLHGLLQARGSRDGGASSTGSRDLGAALADWPLWYADWMDGQLVEKGRQDMRQLALRLASLFPALFSRENYGRLRLITSSKHRCMDSSAAFLQGLWQHYHPGLPPPDVADMEFGPPTVNDKLMRFFDHCEKFLTEVEKNATALYHVEAFKTGPEMQNILKKVAATLQVPVNDLNAGIRIFK

SEQ ID NO: 6965 - DNA, 2823 bp, Homo sapiens
gatgtaagagtcatctgtaaaagctgtgctgttttggcagcctgggaggctaaggtttagtctaggcgactaaggtttagtccgggctgtattcacacccaaaacaactaaaaaagcggaggagtctttgagtcaatccctgaagctccggctaagaggaaactcgcccacgctccagggcagcgacgccggctccacctcagccacggctgtctcaagcttctcggggttttccgccggctccacccgagccacaagtctacaggactcctcggagctttccgccgggacgcaagacccaccgccagaggttggtacctcctagagaacagcgaagcgcatcccgagggccgccggccggaagcgccctccagacccgccccctgccctccggagccggaagctgggcatctgcagctggctcggcgcactccactgaccgtcccgacgatgctacgcgcgcccggctgcctcctccggacctccgtagcgcctgccgcggccctggctgcggcgctgctctcgtcgcttgcgcgctgctctcttctagagccgagggacccggtggcctcgtcgctcagcccctatttcggcaccaagactcgctacgaggatgtcaaccccgtgctattgtcgggccccgaggctccgtggcgggaccctgagctgctggaggggacctgcaccccggtgcagctggtcgccctcattcgccacggcacccgctaccccacggtcaaacagatccgcaagctgaggcagctgcacgggttgctgcaggcccgcgggtccagggatggcggggctagtagtaccggcagccgcgacctgggtgcagcgctggccgactggcctttgtggtacgcggactggatggacgggcagctagtagagaagggacggcaggatatgcgacagctggcgctgcgtctggcctcgctcttcccggcccttttcagccgtgagaactacggccgcctgcggctcatcaccagttccaagcaccgctgcatggatagcagcgccgccttcctgcaggggctgtggcagcactaccaccctggcttgccgccgccggacgtcgcagatatggagtttggacctccaacagttaatgataaactaatgagattttttgatcactgtgagaagtttttaactgaagtagaaaaaaatgctacagctctttatcacgtggaagccttcaaaactggaccagaaatgcagaacattttaaaaaaagttgcagctactttgcaagtgccagtaaatgatttaaatgcagatttaattcaagtagcctttttcacctgttcatttgacctggcaattaaaggtgttaaatctccttggtgtgatgtttttgacatagatgatgcaaaggtattagaatatttaaatgatctgaaacaatattggaaaagaggatatgggtatactattaacagtcgatccagctgcaccttgtttcaggatatctttcagcacttggacaaagcagttgaacagaaacaaaggtctcagccaatttcttctccagtcatcctccagtttggtcatgcagagactcttcttccactgctttctctcatgggctacttcaaagacaaggaacccctaacagcgtacaattacaaaaaacaaatgcatcggaagttccgaagtggtctcattgtaccttatgcctcgaacctgatatttgtgctttaccactgtgaaaatgctaagactcctaaagaacaattccgagtgcagatgttattaaatgaaaaggtgttacctttggcttactcacaagaaactgtttcattttatgaagatctgaagaaccactacaaggacatccttcagagttgtcaaaccagtgaagaatgtgaattagcaagggctaacagtacatctgatgaactatgagtaactgaagaacatttttaattctttaggaatctgcaatgagtgattacatgcttgtaataggtaggcaattccttgattacaggaagcttttatattacttgagtatttctgtcttttcacagaaaaacattgggtttctctctgggtttggacatgaaatgtaagaaaagatttttcactggagcagctctcttaaggagaaacaaatctatttagagaaacagctggccctgcaaatgtttacagaaatgaaattcttcctacttatataagaaatctcacactgagatagaattgtgatttcataataacacttgaaaagtgctggagtaacaaaatatctcagttggaccatccttaacttgattgaactgtctaggaactttacagattgttctgcagttctctcttcttttcctcaggtaggacagctctagcattttcttaatcaggaatattgtggtaagctgggagtatcactctggaagaaagtaacatctccagatgagaatttgaaacaagaaacagagtgttgtaaaaggacaccttcactgaagcaagtcggaaagtacaatgaaaataaatatttttggtatttatttatgaaatatttgaacattttttcaataattcctttttacttctaggaagtctcaaaagaccatcttaaattattatatgtttggacaattagcaacaagtcagatagttagaatcgaagtttttcaaatccattgcttagctaactttttcattctgtcacttggcttcgatttttatattttcctattatatgaaatgtatcttttggttgtttgatttttctttctttctttgtaaatagttctgagttctgtcaaatgccgtgaaagtatttgctataataaagaaaattcttgtgacttt

SEQ ID NO: 6966 - protein, 487 aa, Homo sapiens; identical to SEQ ID NO: 962

SEQ ID NO: 6967 - DNA, 2798 bp, Homo sapiens
gatgtaagagtcatctgtaaaagctgtgctgttttggcagcctgggaggctaaggtttagtctaggcgactaaggtttagtccgggctgtattcacacccaaaacaactaaaaaagcggaggagtctttgagtcaatccctgaagctccggctaagaggaaactcgcccacgctccagggcagcgacgccggctccacctcagccacggctgtctcaagcttctcggggttttccgccggctccacccgagccacaagtctacaggactcctcggagctttccgccgggacgcaagacccaccgccagaggttggtacctcctagagaacagcgaagcgcatcccgagggccgccggccggaagcgccctccagacccgccccctgccctccggagccggaagctgggcatctgcagctggctcggcgcactccactgaccgtcccgacgatgctacgcgcgcccggctgcctcctccggacctccgtagcgcctgccgcggccctggctgcggcgctgctctcgtcgcttgcgcgctgctctcttctagagccgagggacccggtggcctcgtcgctcagcccctatttcggcaccaagactcgctacgaggatgtcaaccccgtgctattgtcgggccccgaggctccgtggcgggaccctgagctgctggaggggacctgcaccccggtgcagctggtcgccctcattcgccacggcacccgctaccccacggtcaaacagatccgcaagctgaggcagctgcacgggttgctgcaggcccgcgggtccagggatggcggggctagtagtaccggcagccgcgacctgggtgcagcgctggccgactggcctttgtggtacgcggactggatggacgggcagctagtagagaagggacggcaggatatgcgacagctggcgctgcgtctggcctcgctcttcccggcccttttcagccgtgagaactacggccgcctgcggctcatcaccagttccaagcaccgctgcatggatagcagcgccgccttcctgcaggggctgtggcagcactaccaccctggcttgccgccgccggacgtcgcagatatggagtttggacctccaacagttaatgataaactaatgagattttttgatcactgtgagaagtttttaactgaagtagaaaaaaatgctacagctctttatcacgtggaagccttcaaaactggaccagaaatgcagaacattttaaaaaaagttgcagctactttgcaagtgccagtaaatgatttaaatgcaggtattagaatatttaaatgatctgaaacaatattggaaaagaggatatgggtatactattaacagtcgatccagctgcaccttgtttcaggatatctttcagcacttggacaaagcagttgaacagaaacaaaggtctcagccaatttcttctccagtcatcctccagtttggtcatgcagagactcttcttccactgctttctctcatgggctacttcaaagacaaggaacccctaacagcgtacaattacaaaaaacaaatgcatcggaagttccgaagtggtctcattgtaccttatgcctcgaacctgatatttgtgctttaccactgtgaaaatgctaagactcctaaagaacaattccgagtgcagatgttattaaatgaaaaggtgttacctttggcttactcacaagaaactgtttcattttatgaagatctgaagaaccactacaaggacatccttcagagttgtcaaaccagtgaagaatgtgaattagcaagggctaacagtacatctgatgaactatgagtaactgaagaacatttttaattctttaggaatctgcaatgagtgattacatgcttgtaataggtaggcaattccttgattacaggaagcttttatattacttgagtatttctgtcttttcacagaaaaacattgggtttctctctgggtttggacatgaaatgtaagaaaagatttttcactggagcagctctcttaaggagaaacaaatctatttagagaaacagctggccctgcaaatgtttacagaaatgaaattcttcctacttatataagaaatctcacactgagatagaattgtgatttcataataacacttgaaaagtgctggagtaacaaaatatctcagttggaccatccttaacttgattgaactgtctaggaactttacagattgttctgcagttctctcttcttttcctcaggtaggacagctctagcattttcttaatcaggaatattgtggtaagctgggagtatcactctggaagaaagtaacatctccagatgagaatttgaaacaagaaacagagtgttgtaaaaggacaccttcactgaagcaagtcggaaagtacaatgaaaataaatatttttggtatttatttatgaaatatttgaacattttttcaataattcctttttacttctaggaagtctcaaaagaccatcttaaattattatatgtttggacaattagcaacaagtcagatagttagaatcgaagtttttcaaatccattgcttagctaactttttcattctgtcacttggcttcgatttttatattttcctattatatgaaatgtatcttttggttgtttgatttttctttctttctttgtaaatagttctgagttctgtcaaatgccgtgaaagtatttgctataataaagaaaattcttgtgactttactaccaggacttttctcttccccatgtcaaaatacaatcaataattgatggtaaaagtttggaaattcaagc

SEQ ID NO: 6968 - protein, 284 aa, Homo sapiens; identical to SEQ ID NO: 6964

SEQ ID NO: 6969 - DNA, 2896 bp, Homo sapiens
gatgtaagagtcatctgtaaaagctgtgctgttttggcagcctgggaggctaaggtttagtctaggcgactaaggtttagtccgggctgtattcacacccaaaacaactaaaaaagcggaggagtctttgagtcaatccctgaagctccggctaagaggaaactcgcccacgctccagggcagcgacgccggctccacctcagccacggctgtctcaagcttctcggggttttccgccggctccacccgagccacaagtctacaggactcctcggagctttccgccgggacgcaagacccaccgccagaggttggtacctcctagagaacagcgaagcgcatcccgagggccgccggccggaagcgccctccagacccgccccctgccctccggagccggaagctgggcatctgcagctggctcggcgcactccactgaccgtcccgacgatgctacgcgcgcccggctgcctcctccggacctccgtagcgcctgccgcggccctggctgcggcgctgctctcgtcgcttgcgcgctgctctcttctagagccgagggacccggtggcctcgtcgctcagcccctatttcggcaccaagactcgctacgaggatgtcaaccccgtgctattgtcgggccccgaggctccgtggcgggaccctgagctgctggaggggacctgcaccccggtgcagctggtcgccctcattcgccacggcacccgctaccccacggtcaaacagatccgcaagctgaggcagctgcacgggttgctgcaggcccgcgggtccagggatggcggggctagtagtaccggcagccgcgacctgggtgcagcgctggccgactggcctttgtggtacgcggactggatggacgggcagctagtagagaagggacggcaggatatgcgacagctggcgctgcgtctggcctcgctcttcccggcccttttcagccgtgagaactacggccgcctgcggctcatcaccagttccaagcaccgctgcatggatagcagcgccgccttcctgcaggggctgtggcagcactaccaccctggcttgccgccgccggacgtcgcagatatggagtttggacctccaacagttaatgataaactaatgagattttttgatcactgtgagaagtttttaactgaagtagaaaaaaatgctacagctctttatcacgtggaagccttcaaaactggaccagaaatgcagaacattttaaaaaaagttgcagctactttgcaagtgccagtaaatgatttaaatgcagatttaattcaagtagcctttttcacctgttcatttgacctggcaattaaaggtgttaaatctccttggtgtgatgtttttgacatagatgatgcaaaggtattagaatatttaaatgatctgaaacaatattggaaaagaggatatgggtatactattaacagtcgatccagctgcaccttgtttcaggatatctttcagcacttggacaaagcagttgaacagaaacaaaggtctcagccaatttcttctccagtcatcctccagtttggtcatgcagagactcttcttccactgctttctctcatgggctacttcaaagacaaggaacccctaacagcgtacaattacaaaaaacaaatgcatcggaagttccgaagtggtctcattgtaccttatgcctcgaacctgatatttgtgctttaccactgtgaaaatgctaagactcctaaagaacaattccgagtgcagatgttattaaatgaaaaggtgttacctttggcttactcacaagaaactgtttcattttatgaagatctgaagaaccactacaaggacatccttcagagttgtcaaaccagtgaagaatgtgaattagcaagggctaacagtacatctgatgaactatgagtaactgaagaacatttttaattctttaggaatctgcaatgagtgattacatgcttgtaataggtaggcaattccttgattacaggaagcttttatattacttgagtatttctgtcttttcacagaaaaacattgggtttctctctgggtttggacatgaaatgtaagaaaagatttttcactggagcagctctcttaaggagaaacaaatctatttagagaaacagctggccctgcaaatgtttacagaaatgaaattcttcctacttatataagaaatctcacactgagatagaattgtgatttcataataacacttgaaaagtgctggagtaacaaaatatctcagttggaccatccttaacttgattgaactgtctaggaactttacagattgttctgcagttctctcttcttttcctcaggtaggacagctctagcattttcttaatcaggaatattgtggtaagctgggagtatcactctggaagaaagtaacatctccagatgagaatttgaaacaagaaacagagtgttgtaaaaggacaccttcactgaagcaagtcggaaagtacaatgaaaataaatatttttggtatttatttatgaaatatttgaacattttttcaataattcctttttacttctaggaagtctcaaaagaccatcttaaattattatatgtttggacaattagcaacaagtcagatagttagaatcgaagtttttcaaatccattgcttagctaactttttcattctgtcacttggcttcgatttttatattttcctattatatgaaatgtatcttttggttgtttgatttttctttctttctttgtaaatagttctgagttctgtcaaatgccgtgaaagtatttgctataataaagaaaattcttgtgactttactaccaggacttttctcttccccatgtcaaaatacaatcaataattgatggtaaaagtttggaaattcaagc

SEQ ID NO: 6970 - protein, 487 aa, Homo sapiens; identical to SEQ ID NO: 962

SEQ ID NO: 6971 - DNA, 1622 bp, Homo sapiens
ataaatctctctgtggtatgaaccttagggaccaactcttaaatgctggaaaggacaaatactatattttgtgcagaatggtaattaaacattgtaaccatttcttagagaatcattattaaatcagggaatcttgttatatttttgaaaatatattagaaattatttttgaatttttttaggtattagaatatttaaatgatctgaaacaatattggaaaagaggatatgggtatactattaacagtcgatccagctgcaccttgtttcaggatatctttcagcacttggacaaagcagttgaacagaaacaaaggtctcagccaatttcttctccagtcatcctccagtttggtcatgcagagactcttcttccactgctttctctcatgggctacttcaaagacaaggaacccctaacagcgtacaattacaaaaaacaaatgcatcggaagttccgaagtggtctcattgtaccttatgcctcgaacctgatatttgtgctttaccactgtgaaaatgctaagactcctaaagaacaattccgagtgcagatgttattaaatgaaaaggtgttacctttggcttactcacaagaaactgtttcattttatgaagatctgaagaaccactacaaggacatccttcagagttgtcaaaccagtgaagaatgtgaattagcaagggctaacagtacatctgatgaactatgagtaactgaagaacatttttaattctttaggaatctgcaatgagtgattacatgcttgtaataggtaggcaattccttgattacaggaagcttttatattacttgagtatttctgtcttttcacagaaaaacattgggtttctctctgggtttggacatgaaatgtaagaaaagatttttcactggagcagctctcttaaggagaaacaaatctatttagagaaacagctggccctgcaaatgtttacagaaatgaaattcttcctacttatataagaaatctcacactgagatagaattgtgatttcataataacacttgaaaagtgctggagtaacaaaatatctcagttggaccatccttaacttgattgaactgtctaggaactttacagattgttctgcagttctctcttcttttcctcaggtaggacagctctagcattttcttaatcaggaatattgtggtaagctgggagtatcactctggaagaaagtaacatctccagatgagaatttgaaacaagaaacagagtgttgtaaaaggacaccttcactgaagcaagtcggaaagtacaatgaaaataaatatttttggtatttatttatgaaatatttgaacattttttcaataattcctttttacttctaggaagtctcaaaagaccatcttaaattattatatgtttggacaattagcaacaagtcagatagttagaatcgaagtttttcaaatccattgcttagctaactttttcattctgtcacttggcttcgatttttatattttcctattatatgaaatgtatcttttggttgtttgatttttctttctttctttgtaaatagttctgagttctgtcaaatgccgtgaaagtatttgctataataaagaaaattcttgtgacttt

SEQ ID NO: 6972 - protein, 63 aa, Homo sapiens
MGILLTVDPAAPCFRISFSTWTKQLNRNKGLSQFLLQSSSSLVMQRLFFHCFLSWATSKTRNP

SEQ ID NO: 6973 - DNA, 1695 bp, Homo sapiens
ataaatctctctgtggtatgaaccttagggaccaactcttaaatgctggaaaggacaaatactatattttgtgcagaatggtaattaaacattgtaaccatttcttagagaatcattattaaatcagggaatcttgttatatttttgaaaatatattagaaattatttttgaatttttttaggtattagaatatttaaatgatctgaaacaatattggaaaagaggatatgggtatactattaacagtcgatccagctgcaccttgtttcaggatatctttcagcacttggacaaagcagttgaacagaaacaaaggtctcagccaatttcttctccagtcatcctccagtttggtcatgcagagactcttcttccactgctttctctcatgggctacttcaaagacaaggaacccctaacagcgtacaattacaaaaaacaaatgcatcggaagttccgaagtggtctcattgtaccttatgcctcgaacctgatatttgtgctttaccactgtgaaaatgctaagactcctaaagaacaattccgagtgcagatgttattaaatgaaaaggtgttacctttggcttactcacaagaaactgtttcattttatgaagatctgaagaaccactacaaggacatccttcagagttgtcaaaccagtgaagaatgtgaattagcaagggctaacagtacatctgatgaactatgagtaactgaagaacatttttaattctttaggaatctgcaatgagtgattacatgcttgtaataggtaggcaattccttgattacaggaagcttttatattacttgagtatttctgtcttttcacagaaaaacattgggtttctctctgggtttggacatgaaatgtaagaaaagatttttcactggagcagctctcttaaggagaaacaaatctatttagagaaacagctggccctgcaaatgtttacagaaatgaaattcttcctacttatataagaaatctcacactgagatagaattgtgatttcataataacacttgaaaagtgctggagtaacaaaatatctcagttggaccatccttaacttgattgaactgtctaggaactttacagattgttctgcagttctctcttcttttcctcaggtaggacagctctagcattttcttaatcaggaatattgtggtaagctgggagtatcactctggaagaaagtaacatctccagatgagaatttgaaacaagaaacagagtgttgtaaaaggacaccttcactgaagcaagtcggaaagtacaatgaaaataaatatttttggtatttatttatgaaatatttgaacattttttcaataattcctttttacttctaggaagtctcaaaagaccatcttaaattattatatgtttggacaattagcaacaagtcagatagttagaatcgaagtttttcaaatccattgcttagctaactttttcattctgtcacttggcttcgatttttatattttcctattatatgaaatgtatcttttggttgtttgatttttctttctttctttgtaaatagttctgagttctgtcaaatgccgtgaaagtatttgctataataaagaaaattcttgtgactttactaccaggacttttctcttccccatgtcaaaatacaatcaataattgatggtaaaagtttggaaattcaagc

SEQ ID NO: 6974 - protein, 63 aa, Homo sapiens; identical to SEQ ID NO: 6972

SEQ ID NO: 6975 - DNA, 1744 bp, Homo sapiens
taaatctctctgtggtatgaaccttagggaccaactcttaaatgctggaaaggacaaatactatattttgtgcagaatggtaattaaacattgtaaccatttcttagagaatcattattaaatcagggaatcttgttatatttttgaaaatatattagaaattatttttgaatttttttaggtattagaatatttaaatgatctgaaacaatattggaaaagaggatatgggtatactattaacagtcgatccagctgcaccttgtttcaggatatctttcagcacttggacaaagcagttgaacagaaacaaagatgaaaaacctgagaaatgtggtcttcgcctttgcgttggaaaagaattgatgccttatttaagaaacaatcagctaggtgtggtggttcacacctatgatcccagcactttgggaggccgaggtctcagccaatttcttctccagtcatcctccagtttggtcatgcagagactcttcttccactgctttctctcatgggctacttcaaagacaaggaacccctaacagcgtacaattacaaaaaacaaatgcatcggaagttccgaagtggtctcattgtaccttatgcctcgaacctgatatttgtgctttaccactgtgaaaatgctaagactcctaaagaacaattccgagtgcagatgttattaaatgaaaaggtgttacctttggcttactcacaagaaactgtttcattttatgaagatctgaagaaccactacaaggacatccttcagagttgtcaaaccagtgaagaatgtgaattagcaagggctaacagtacatctgatgaactatgagtaactgaagaacatttttaattctttaggaatctgcaatgagtgattacatgcttgtaataggtaggcaattccttgattacaggaagcttttatattacttgagtatttctgtcttttcacagaaaaacattgggtttctctctgggtttggacatgaaatgtaagaaaagatttttcactggagcagctctcttaaggagaaacaaatctatttagagaaacagctggccctgcaaatgtttacagaaatgaaattcttcctacttatataagaaatctcacactgagatagaattgtgatttcataataacacttgaaaagtgctggagtaacaaaatatctcagttggaccatccttaacttgattgaactgtctaggaactttacagattgttctgcagttctctcttcttttcctcaggtaggacagctctagcattttcttaatcaggaatattgtggtaagctgggagtatcactctggaagaaagtaacatctccagatgagaatttgaaacaagaaacagagtgttgtaaaaggacaccttcactgaagcaagtcggaaagtacaatgaaaataaatatttttggtatttatttatgaaatatttgaacattttttcaataattcctttttacttctaggaagtctcaaaagaccatcttaaattattatatgtttggacaattagcaacaagtcagatagttagaatcgaagtttttcaaatccattgcttagctaactttttcattctgtcacttggcttcgatttttatattttcctattatatgaaatgtatcttttggttgtttgatttttctttctttctttgtaaatagttctgagttctgtcaaatgccgtgaaagtatttgctataataaagaaaattcttgtgacttt

SEQ ID NO: 6976 - protein, 104 aa, Homo sapiens
MGILLTVDPAAPCFRISFSTWTKQLNRNKDEKPEKCGLRLCVGKELMPYLRNNQLGVVVHTYDPSTLGGRGLSQFLLQSSSSLVMQRLFFHCFLSWATSKTRNP

SEQ ID NO: 6977 - DNA, 1817 bp, Homo sapiens
taaatctctctgtggtatgaaccttagggaccaactcttaaatgctggaaaggacaaatactatattttgtgcagaatggtaattaaacattgtaaccatttcttagagaatcattattaaatcagggaatcttgttatatttttgaaaatatattagaaattatttttgaatttttttaggtattagaatatttaaatgatctgaaacaatattggaaaagaggatatgggtatactattaacagtcgatccagctgcaccttgtttcaggatatctttcagcacttggacaaagcagttgaacagaaacaaagatgaaaaacctgagaaatgtggtcttcgcctttgcgttggaaaagaattgatgccttatttaagaaacaatcagctaggtgtggtggttcacacctatgatcccagcactttgggaggccgaggtctcagccaatttcttctccagtcatcctccagtttggtcatgcagagactcttcttccactgctttctctcatgggctacttcaaagacaaggaacccctaacagcgtacaattacaaaaaacaaatgcatcggaagttccgaagtggtctcattgtaccttatgcctcgaacctgatatttgtgctttaccactgtgaaaatgctaagactcctaaagaacaattccgagtgcagatgttattaaatgaaaaggtgttacctttggcttactcacaagaaactgtttcattttatgaagatctgaagaaccactacaaggacatccttcagagttgtcaaaccagtgaagaatgtgaattagcaagggctaacagtacatctgatgaactatgagtaactgaagaacatttttaattctttaggaatctgcaatgagtgattacatgcttgtaataggtaggcaattccttgattacaggaagcttttatattacttgagtatttctgtcttttcacagaaaaacattgggtttctctctgggtttggacatgaaatgtaagaaaagatttttcactggagcagctctcttaaggagaaacaaatctatttagagaaacagctggccctgcaaatgtttacagaaatgaaattcttcctacttatataagaaatctcacactgagatagaattgtgatttcataataacacttgaaaagtgctggagtaacaaaatatctcagttggaccatccttaacttgattgaactgtctaggaactttacagattgttctgcagttctctcttcttttcctcaggtaggacagctctagcattttcttaatcaggaatattgtggtaagctgggagtatcactctggaagaaagtaacatctccagatgagaatttgaaacaagaaacagagtgttgtaaaaggacaccttcactgaagcaagtcggaaagtacaatgaaaataaatatttttggtatttatttatgaaatatttgaacattttttcaataattcctttttacttctaggaagtctcaaaagaccatcttaaattattatatgtttggacaattagcaacaagtcagatagttagaatcgaagtttttcaaatccattgcttagctaactttttcattctgtcacttggcttcgatttttatattttcctattatatgaaatgtatcttttggttgtttgatttttctttctttctttgtaaatagttctgagttctgtcaaatgccgtgaaagtatttgctataataaagaaaattcttgtgactttactaccaggacttttctcttccccatgtcaaaatacaatcaataattgatggtaaaagtttggaaattcaagc

SEQ ID NO: 6978 - protein, 104 aa, Homo sapiens; identical to SEQ ID NO: 6976

SEQ ID NO: 6979 - DNA, 495 bp, Homo sapiens
ctcatctataagcaaggacacctctggaagacgcaaggcctggatgtcacagccagccttatcaataaacaatcttctgccttgacagacggaagaggaagggccaattcaatgaatactcagatcaagtgtctgtctggaaagctggcagtcttccagaaatacaattagggcccattccagtggaacagaagtgctactttgggggtggactgaaacaagttgctgggcttccattggccattgccacttgcttgtcgttgtgaggaggggccgtgcctccacaggcccatacctgtaacctgacgatactgttgtgagcgggaatggaggaagtgcatggaagcccctcagcacgatgcatagtgaacagacaagctgtgaaccttgggagttatcaccatgtgtgatgatgctggtgaagaaagcctgcactgaggaggctgtcagcctgggtttgaatcccctcatttggaatataatcttggcaaagtc

SEQ ID NO: 6980 - protein, 44 aa, Homo sapiens
MHSEQTSCEPWELSPCVMMLVKKACTEEAVSLGLNPLIWNIILA

SEQ ID NO: 6981 - DNA, 744 bp, Homo sapiens
tttgcttcttgatccccgacatgctggctggctgcggcggagcccgggtcccgggagcagagaccgaaggacgcagggacggcggcggcggcggcggcagcagcagcagcagcagcagcagcggctgccggactcccgggaaggagatgctcgtgtcaaagagaagagctacaagactgtttctgcccccaaggtgctccagtccattggagaagcaaacacataactgagaatgactcaccttgtgatggctgctatgatgaggttcatacctggtgctacaggacacagagaggcataataatgtggtcacactaatgcaagaagtagattcccatggtcttgggcactctgcccctgtggctttgcagggtacagcctcccttctgtctgatttcacaggccggcattgaatgtctgtgacttttccaggtggagtcttgctctgtcacccaggttggagtgcagtggcacgatcttggctcactgcaacctccacctccttggttcaagtgattctactgcctcagcctcccaagtagctgggattacaggcatgcaccaccaggcctggctaatttttgtatttttagtagagatggggtttcaccatgttggccaggctgctcttgaactcctgacctcaggtgatctgcctgcctctgcctcccaaagtattgggattacaggcgtgagccactgtggccaggccgaactacctttttcatattacataagatacag

SEQ ID NO: 6982 - protein, 69 aa, Homo sapiens
MLAGCGGARVPGAETEGRRDGGGGGGSSSSSSSSGCRTPGKEMLVSKRRATRLFLPPRCSSPLEKQTHN

SEQ ID NO: 6983 - DNA, 3013 bp, Homo sapiens
tcccaagagttacaggcagtttgaaagctctgctttctgcttgacctttggaagtcctatgagggaccatttacggtttcctcagtaatttccaccaggatgaatttccttctcatcactctgcctcaggtagtgctctgaaggtcgtcctttctgaacaaacgcagcaaagcaagccacaccatgggtgagatcaaccaagttgccgtggagaaatacctggaggagaaccctcagtttgccaaggagtactttgacaggaagttgcgggtggaggtgctgggagaaatcttcaagaacagccaggtgccagtccagtccagcatgtccttctctgagctgacccaggtggaggagtcagccctgtgcttggagctgctgtggaccgtgcaggaggaggggggcaccccagagcagggggttcacagggccctgcagaggctggcccacctgctccaggctgaccgctgcagcatgttcctgtgccggtcccggaacggcatacctgaggtggcctctaggttgctggatgtcacccccacctccaagtttgaggacaacctggtgggccctgacaaagaagttgtgtttccattggacattgggatagtgggttgggctgctcacacgaagaaaactcataatgtcccagatgtgaaaaagaacagccatttttctgacttcatggacaagcaaactgggtatgtcactaagaacctgctggcaaccccgatcgtggtgggcaaggaggttcttgctgtgatcatggcagttaacaaagtaaatgcatctgaattttccaaacaggatgaagaggtcttttccaaatacctcaactttgtgtctatcatcctaaggcttcatcacaccagctacatgtacaatattgaatcccgaagaagccagatccttatgtggtcagccaataaagtatttgaagaactcacagatgttgagcgacagtttcacaaagcgctctacacggttagatcatatctgaactgtgaacgatactccattggactgctggacatgaccaaggagaaggaattctacgatgaatggccaatcaagcttggagaagtagagccttataaaggtccaaagacacctgatggcagggaagtcaacttttataaaatcattgattacattttacatggaaaagaagagatcaaagtgattccgacgcctcctgcagaccactggacactcattagtgggttgccaacatatgttgctgaaaatggatttatctgtaacatgatgaatgcccctgcggatgaatacttcacatttcagaaaggacctgtagacgaaactggttgggtcattaagaatgttttgtccctgcctattgtcaacaagaaagaagatattgtgggagtggctacattttacaacaggaaggatggaaaacctttcgatgagcatgatgaatacattaccgagactctcacacaatttcttggatggtctcttttaaatactgacacctacgataagatgaataagctagaaaacagaaaggacattgctcaggaaatgctcatgaaccaaaccaaagccactcctgaagaaattaagtccattttgaaatttcaagagaagttaaatgttgatgtaattgacgactgtgaagaaaaacaacttgttgcaattttgaaagaggacttgccagacccacgctcagcagaactgtacgaattccgcttcagtgacttcccccttacagagcacggattgattaaatgtggaatacgactgttttttgaaataaatgtggtggagaaattcaaagtacctgtagaggttcttaccagatggatgtacactgtgaggaaagggtaccgagctgtcacttaccacaattggcggcatgggttcaacgtggggcagaccatgtttactttgctgatgacaggaagattaaagaagtactacacagatctcgaagcctttgccatgcttgctgctgctttctgccatgatattgaccacagaggcaccaataatttgtaccagatgaaatccacgtctccattagcaagacttcatggttcttctattttggagaggcaccacctggagtacagtaagactctgttgcaggatgagagtttaaacatcttccagaacctaaataagcggcagtttgaaacagttattcatttgttcgaggtcgcaataatagcaactgacctggctttatatttcaagaagaggaccatgtttcaaaaaattgttgatgcctgtgaacaaatgcaaacggaagaagaagccatcaaatatgtaactgttgatccaaccaagaaagagattatcatggcaatgatgatgacggcatgtgacttgtctgctattaccaagccctgggaggtgcaaagtcaggtagcacttatggttgcaaatgaattttgggaacaaggagatctggagagaacagtgttgcagcaacaacccattcctatgatggacagaaacaaaagagatgaattacctaaacttcaagttggatttattgattttgtttgtacttttgtatataaggagttctcacggtttcacaaagaaatcacacctatgctgagtggtcttcagaataacagagtagaatggaaatcactagctgatgagtatgatgcaaagatgaaggtcattgaagaggaggcaaaaaagcaagaaggaggagccgaaaaagctgctgaagattcaggaggtggtgatgacaaaaagtccaaaacatgtttaatgttgtaatattatctaactggtctaaacttcaaatatcattttacctttgaagaaaaccagaaaacattcaaaagaacttcaacaaatcatcacgtaacaggatcttcagaaaaactaccctgtgactatgaagaaaatatatattgctagcccaaaaatcccaggggcaaaataaagttcaacaaaagtgcaaaatatgacaaaaataggtacatttttggtgccaatttattttaaattaaaaaatatgcaatcctga

SEQ ID NO: 6984 - protein, 858 aa, Homo sapiens; identical to SEQ ID NO: 964

SEQ ID NO: 6985 - DNA, 473 bp, Homo sapiens
caggtagcacttatggttgcaaatgaattttgggaacaaggagatctggagagaacagtgttgcagcaacaacccattcctatgatggacagaaacaaaagagatgaattacctaaacttcaagttggatttattgattttgtttgtacttttgtatataagctgctgaagattcaggaggtggtgatgacaaaaagtccaaaacatgtttaatgttgtaatattatctaactggtctaaacttcaaatatcattttacctttgaagaaaaccagaaaacattcaaaagaacttcaacaaatcatcacgtaacaggatcttcagaaaaactaccctgtgactatgaagaaaatatatattgctagcccaaaaatcccaggggcaaaataaagttcaacaaaagtgcaaaatatgacaaaaataggtacatttttggtgccaatttattttaaattaaaaaatatgcaatcctg

SEQ ID NO: 6986 - protein, 66 aa, Homo sapiens
MVANEFWEQGDLERTVLQQQPIPMMDRNKRDELPKLQVGFIDFVCTFVYKLLKIQEVVMTKSPKHV

SEQ ID NO: 6987 - DNA, 2193 bp, Homo sapiens
agactaataatcattattggagaggagttgtctgctaatgtaactactttgtaattcatgctcattgtttaaaatacaaacaatttgaaaatgtttaaaatagaaagtaaaagtattccaggcccacaggaaactctgatgaggaagaaagtgcttcagaatctgaactttggaagggtccactaccagagacagatgaaaaatcacaggaagaagaatttgatgagtattttcaggatttgtttctatgagacgagagagagaagcctccgctccttaatgtgaaacttcatgaagttttaaacttcatgcaatttgaaattccatataagtttttatctgcaagttacagcttgtgtggtttgtctttggaaataaaaatccaggttctctcagaatgtcagaggctttggaagttcattagttcaattaaagactttcctgtcctttaaatatcttttcaattgcttatctacaattctgttttatttgtagctcctagaggatagagctggacagattccattgttcctacattttgtaggttttttttcactgccttcattatgtatcttctcttgccttcattattttattttattatttcttctttttctcttttttagagccaccaatactggatttgtttgtttttcatttttttcttttgtggaaacggagtcctcctgtgttgcccaggctggtattcaaactcctggccttatgcattcctcccaccctggcctcccagagtgctgggattacaggtgtgagccaccatgctctgccaattattttaaattactaggattaaagtatattatgtatgtctttaacttctttctttcccattgataaactggcacccttcttttaagtacctgctctcccattaccacctatttccagctgctttttgaggttttttgcttgcctgtctcttgcttccttcttaacctctaccacttaagagagtttgttataatcaaatttgacttcctagcctgtggataatttactattaagtaaattattaccacagggagccagtgaggtcccagtagtctaaaacagttcatgtgttcacaaaaattgcctccccggcagagattatgcagtaagataatttaactgaataatactatgtgcatgtatcttgcctcagatatactcatgcaaatatgaatatacctctgatatggtttggctctgtgtccccacccaaatctcatcttgaatgtgtactcccataattcccacattttataggagggatccagtgagagataatttgaatcaagggggcggtttcccccatattgttcttgtggtagtgaataagtctcacaagatctgatggttttatcaggggcttctgcttttgcatccttctcattttcttttgctgctgccatgtaagaagtgccttttgcctcccaccatgattctgaggctttcccagccatgtggaactgtaagtccaattaaacctctttttcttccccagtctctggtatgtctttatcagcagtgtgaaaatggactaatagaacttctatgcagaaatataaaatgtaacttcttaacataaggtcctagtcgcaagggtctatggaggtgcttcaggagatccaagcctttttagaatctgtgcaaacttctgtgtatgttttttggaggaaaagtccataaatttcaaattttcaaaaatcagattttcaaaaggatttattgatttctgaaaactagcaaagatctgcttttataaagagcaaatagatggatagatataggagaagatgcttgacttgatgaataagagaaaggacatatagaaaatgaactgaacataagcaagtattttattgaagatatactattttaaataacatttaaacacggaatgattggcaataaactgcaaaatgagtaatttggtatcattttaaaatggttattatcagagattttccttttattaaacagttattcattaattccacaaatatttatcaggcttctattatatgtgaggcactgagctgggcatggctgtaaaggaaccatctaggaagtaattatgcaatcatttctgaacctgtttcagaaaagtaaatcagtgttgggtttatcagtgtttaacattgtttgatagtcccctcacttcttgaataaattgttttttttcacctc

SEQ ID NO: 6988 - protein, 64 aa, Homo sapiens
MFKIESKSIPGPQETLMRKKVLQNLNFGRVHYQRQMKNHRKKNLMSIFRICFYETRERSLRSLM

SEQ ID NO: 6989 - DNA, 2856 bp, Homo sapiens
agggaaccaggatactatagattcatagggttataagggaccttaaaggtcatttagtccagtcttgtagacttgattctctagggatatctggccacttttttagtgggtattttttaagacagttagtttataatgttactctaaactgacttgattttttagtaaaattgactggtatcagaaaactggtgtaagaaagctggcatgtgggaagtactcttggaagggaacaagataacagctgtccacttctaaaggccttgtaggtttcgttctctggcatcattaacattagcagagtaatacaatagtaataaccttgctaggcctaattaatttttctctgctttctttatctcatattaatgagttttcataaaaataagagaagattttaattctttttttccctcacattatcaatttgggacactggccattccagtgatggctgtcattgagtcaggaatcttgttttcaagattaaaattttatcatttgtatgtagatcattagaatacaaaatgccctcccccacttttgccatttttgctagaattggtgtcagaatagattcagttaggagcaaagttcagacacacatgttgattcagggatcagagtccaacaggtaaaaggctagaactaccgtaacaaatcaatgctgttttatttttatgttgtgtttaactaaaggacattctgtattgacaggccacatttgtgccatttcttttttagactaataatcattattggagaggagttgtctgctaatgtaactactttgaaactctgatgaggaagaaagtgcttcagaatctgaactttggaagggtccactaccagagacagatgaaaaatcacaggaagaagaatttgatgagtattttcaggatttgtttctatgagacgagagagagaagcctccgctccttaatgtgaaacttcatgaagttttaaacttcatgcaatttgaaattccatataagtttttatctgcaagttacagcttgtgtggtttgtctttggaaataaaaatccaggttctctcagaatgtcagaggctttggaagttcattagttcaattaaagactttcctgtcctttaaatatcttttcaattgcttatctacaattctgttttatttgtagctcctagaggatagagctggacagattccattgttcctacattttgtaggttttttttcactgccttcattatgtatcttctcttgccttcattattttattttattatttcttctttttctcttttttagagccaccaatactggatttgtttgtttttcatttttttcttttgtggaaacggagtcctcctgtgttgcccaggctggtattcaaactcctggccttatgcattcctcccaccctggcctcccagagtgctgggattacaggtgtgagccaccatgctctgccaattattttaaattactaggattaaagtatattatgtatgtctttaacttctttctttcccattgataaactggcacccttcttttaagtacctgctctcccattaccacctatttccagctgctttttgaggttttttgcttgcctgtctcttgcttccttcttaacctctaccacttaagagagtttgttataatcaaatttgacttcctagcctgtggataatttactattaagtaaattattaccacagggagccagtgaggtcccagtagtctaaaacagttcatgtgttcacaaaaattgcctccccggcagagattatgcagtaagataatttaactgaataatactatgtgcatgtatcttgcctcagatatactcatgcaaatatgaatatacctctgatatggtttggctctgtgtccccacccaaatctcatcttgaatgtgtactcccataattcccacattttataggagggatccagtgagagataatttgaatcaagggggcggtttcccccatattgttcttgtggtagtgaataagtctcacaagatctgatggttttatcaggggcttctgcttttgcatccttctcattttcttttgctgctgccatgtaagaagtgccttttgcctcccaccatgattctgaggctttcccagccatgtggaactgtaagtccaattaaacctctttttcttccccagtctctggtatgtctttatcagcagtgtgaaaatggactaatagaacttctatgcagaaatataaaatgtaacttcttaacataaggtcctagtcgcaagggtctatggaggtgcttcaggagatccaagcctttttagaatctgtgcaaacttctgtgtatgttttttggaggaaaagtccataaatttcaaattttcaaaaatcagattttcaaaaggatttattgatttctgaaaactagcaaagatctgcttttataaagagcaaatagatggatagatataggagaagatgcttgacttgatgaataagagaaaggacatatagaaaatgaactgaacataagcaagtattttattgaagatatactattttaaataacatttaaacacggaatgattggcaataaactgcaaaatgagtaatttggtatcattttaaaatggttattatcagagattttccttttattaaacagttattcattaattccacaaatatttatcaggcttctattatatgtgaggcactgagctgggcatggctgtaaaggaaccatctaggaagtaattatgcaatcatttctgaacctgtttcagaaaagtaaatcagtgttgggtttatcagtgtttaacattgtttgatagtcccctcacttcttgaataaattgttttttttcacctc

SEQ ID NO: 6990 - protein, 48 aa, Homo sapiens
MRKKVLQNLNFGRVHYQRQMKNHRKKNLMSIFRICFYETRERSLRSLM

SEQ ID NO: 6991 - DNA, 4247 bp, Homo sapiens
ggttcccctttcaactcagaaagtcagtgacttaaattctgatccctacttaccaataatcactgaatagatttgacagtgatgcattcttttgtgttgcctgttcttccaattgttatttccttagtaacactcctcccgcccctggcaggttgtaacagttatgatagcaatgatttgtagtgactgccaaccctcagggaaccaggatactatagattcatagggttataagggaccttaaaggtcatttagtccagtcttgtagacttgattctctagggatatctggccacttttttagtgggtattttttaagacagttagtttataatgttactctaaactgacttgattttttagtaaaattgactggtatcagaaaactggtgtaagaaagctggcatgtgggaagtactcttggaagggaacaagataacagctgtccacttctaaaggccttgtaggtttcgttctctggcatcattaacattagcagagtaatacaatagtaataaccttgctaggcctaattaatttttctctgctttctttatctcatattaatgagttttcataaaaataagagaagattttaattctttttttccctcacattatcaatttgggacactggccattccagtgatggctgtcattgagtcaggaatcttgttttcaagattaaaattttatcatttgtatgtagatcattagaatacaaaatgccctcccccacttttgccatttttgctagaattggtgtcagaatagattcagttaggagcaaagttcagacacacatgttgattcagggatcagagtccaacaggtaaaaggctagaactaccgtaacaaatcaatgctgttttatttttatgttgtgtttaactaaaggacattctgtattgacaggccacatttgtgccatttcttttttagactaataatcattattggagaggagttgtctgctaatgtaactactttgtgagttatagtgttattgtctgataattttgcagtatttttaaatttttagttgactaatacaggtgatttatttgaaacatatctattttgtcatctttaataaaatgtctttattgtttttactgattttgaaggtaattcatgctcattgtttaaaatacaaacaatttgaaaatgtttaaaatagaaagtaaaagtattccaggcccacaggtaatataatcagttaaatttggttggcttttgcaaacttacaatacgtacataaaattacatgtatgtatataatgtgcatatgtttttaacatatctattatactatgcatactttttgtaactttttaaaaatttgatatagaatggacatttttctattgcagtacatacagatatgctaatgtttttaaacagctgtatagtatttatttaaccagtccttaatccctaattggtggggaattaggttttttgttgttgttgttacacagtgtgcatctttgtacatatgtatcagaggtgcttatttatgtatgtaagtaatcaaattcctaaaagcagcattgctggtcaaagggtatgcgttttaaactgatctatattgccagatttttctccagaaaaaggtttacagaattttcactcccagcaatgtgtgagaatgccagtttcttccctgaaacaggcttcttctcattatgtaatcagcattggttttttaaaatgtctgacaattttttttaaaataatttaactagctggtcttacatactagctcagttcttaaggtactaatcctaatgtaaacatgttctctacaaatgtaaatcttaacttgcgtgtcttctgtgtaaccaagaaaaagaagaaactagatcagagacaactatattgcaagagataattgacttacaagagttaatattggaattgctactttaactcagtgtaacttagagaagtttcgatgagacttaaaatccttggcctttttgctgagattctttggtaacccttggcttatttatatatgttttaaaagaatttattgtacctgtgagagtgaattaaatttctagagagtcataaaagttgaagctgagttaaataaaaagttaattgtattggcgaataattcaaaatgtgctttaagtataataggtttttaaaaatcatcttttttaaatgaacaggaaactctgatgaggaagaaagtgcttcagaatctgaactttggaagggtccactaccagagacagatgaaaaatcacaggaagaagaatttgatgagtattttcaggatttgtttctatgagacgagagagagaagcctccgctccttaatgtgaaacttcatgaagttttaaacttcatgcaatttgaaattccatataagtttttatctgcaagttacagcttgtgtggtttgtctttggaaataaaaatccaggttctctcagaatgtcagaggctttggaagttcattagttcaattaaagactttcctgtcctttaaatatcttttcaattgcttatctacaattctgttttatttgtagctcctagaggatagagctggacagattccattgttcctacattttgtaggttttttttcactgccttcattatgtatcttctcttgccttcattattttattttattatttcttctttttctcttttttagagccaccaatactggatttgtttgtttttcatttttttcttttgtggaaacggagtcctcctgtgttgcccaggctggtattcaaactcctggccttatgcattcctcccaccctggcctcccagagtgctgggattacaggtgtgagccaccatgctctgccaattattttaaattactaggattaaagtatattatgtatgtctttaacttctttctttcccattgataaactggcacccttcttttaagtacctgctctcccattaccacctatttccagctgctttttgaggttttttgcttgcctgtctcttgcttccttcttaacctctaccacttaagagagtttgttataatcaaatttgacttcctagcctgtggataatttactattaagtaaattattaccacagggagccagtgaggtcccagtagtctaaaacagttcatgtgttcacaaaaattgcctccccggcagagattatgcagtaagataatttaactgaataatactatgtgcatgtatcttgcctcagatatactcatgcaaatatgaatatacctctgatatggtttggctctgtgtccccacccaaatctcatcttgaatgtgtactcccataattcccacattttataggagggatccagtgagagataatttgaatcaagggggcggtttcccccatattgttcttgtggtagtgaataagtctcacaagatctgatggttttatcaggggcttctgcttttgcatccttctcattttcttttgctgctgccatgtaagaagtgccttttgcctcccaccatgattctgaggctttcccagccatgtggaactgtaagtccaattaaacctctttttcttccccagtctctggtatgtctttatcagcagtgtgaaaatggactaatagaacttctatgcagaaatataaaatgtaacttcttaacataaggtcctagtcgcaagggtctatggaggtgcttcaggagatccaagcctttttagaatctgtgcaaacttctgtgtatgttttttggaggaaaagtccataaatttcaaattttcaaaaatcagattttcaaaaggatttattgatttctgaaaactagcaaagatctgcttttataaagagcaaatagatggatagatataggagaagatgcttgacttgatgaataagagaaaggacatatagaaaatgaactgaacataagcaagtattttattgaagatatactattttaaataacatttaaacacggaatgattggcaataaactgcaaaatgagtaatttggtatcattttaaaatggttattatcagagattttccttttattaaacagttattcattaattccacaaatatttatcaggcttctattatatgtgaggcactgagctgggcatggctgtaaaggaaccatctaggaagtaattatgcaatcatttctgaacctgtttcagaaaagtaaatcagtgttgggtttatcagtgtttaacattgtttgatagtcccctcacttcttgaataaattgttttttttcacctc

SEQ ID NO: 6992 - protein, 48 aa, Homo sapiens; identical to SEQ ID NO: 6990

SEQ ID NO: 6993 - DNA, 3217 bp, Homo sapiens
ccagtcgggacccgtagggagaggcgggttgcgggcggcggcggcggcggcggcggcggtggtggttgtggcgaggctgtgcggcagggcgcacgggacctgtgctgcagcggctctctcaggccgtgggtcgtcgctgcagctgccgggaaagaaggaaacgacgactccgggggcgaacttggcacacagggaggaagggaaaggatgcatggtcatggaggctatgattctgattttagtgatgatgaacgctgtggagaatccagcaaaaggaaaaaaaggacagttgaagatgacttactgctccaaaaaccatttcagaaagaaaaacatggaaaggtggcccataaacaagttgcagcagaattgctggatagggaagaagcaagaaatagaaggtttcatctcatagctatggatgcttatcaaagacatacaaagttcgtaaatgactatattttatactatggtggcaaaaaagaagacttcaagcgtttgggggaaaatgacaagacagacttggatgttatacgagaaaatcatagattcctatggaatgaggaggacgaaatggacatgacttgggagaagagacttgctaagaaatactatgataaattatttaaggaatactgcatagcagatctcagtaaatataaagaaaataagtttggatttaggtggcgagtagaaaaagaagtaatttcaggaaaaggtcaatttttctgtggaaataaatattgtgataaaaaagaaggcttaaagagttgggaagttaattttggttatattgagcatggtgagaagagaaatgcacttgttaaattaaggttatgccaagaatgttccattaaattaaatttccatcacaggagaaaagaaatcaagtcaaaaaaaagaaaagataaaaccaaaaaagactgtgaagagtcatcacataaaaaatccagattatcttctgcagaagaggcctccaagaaaaaagataaaggacattcatcttcaaagaaatctgaagattctctacttaagacctacttcgttggattattatcagaatcaaatgagaaaacatacatgtaaagtatgtgcctgacgcaaaactaataatcattattggagaggagttgtctgctaatgtaactactttgaaactctgatgaggaagaaagtgcttcagaatctgaactttggaagggtccactaccagagacagatgaaaaatcacaggaagaagaatttgatgagtattttcaggatttgtttctatgagacgagagagagaagcctccgctccttaatgtgaaacttcatgaagttttaaacttcatgcaatttgaaattccatataagtttttatctgcaagttacagcttgtgtggtttgtctttggaaataaaaatccaggttctctcagaatgtcagaggctttggaagttcattagttcaattaaagactttcctgtcctttaaatatcttttcaattgcttatctacaattctgttttatttgtagctcctagaggatagagctggacagattccattgttcctacattttgtaggttttttttcactgccttcattatgtatcttctcttgccttcattattttattttattatttcttctttttctcttttttagagccaccaatactggatttgtttgtttttcatttttttcttttgtggaaacggagtcctcctgtgttgcccaggctggtattcaaactcctggccttatgcattcctcccaccctggcctcccagagtgctgggattacaggtgtgagccaccatgctctgccaattattttaaattactaggattaaagtatattatgtatgtctttaacttctttctttcccattgataaactggcacccttcttttaagtacctgctctcccattaccacctatttccagctgctttttgaggttttttgcttgcctgtctcttgcttccttcttaacctctaccacttaagagagtttgttataatcaaatttgacttcctagcctgtggataatttactattaagtaaattattaccacagggagccagtgaggtcccagtagtctaaaacagttcatgtgttcacaaaaattgcctccccggcagagattatgcagtaagataatttaactgaataatactatgtgcatgtatcttgcctcagatatactcatgcaaatatgaatatacctctgatatggtttggctctgtgtccccacccaaatctcatcttgaatgtgtactcccataattcccacattttataggagggatccagtgagagataatttgaatcaagggggcggtttcccccatattgttcttgtggtagtgaataagtctcacaagatctgatggttttatcaggggcttctgcttttgcatccttctcattttcttttgctgctgccatgtaagaagtgccttttgcctcccaccatgattctgaggctttcccagccatgtggaactgtaagtccaattaaacctctttttcttccccagtctctggtatgtctttatcagcagtgtgaaaatggactaatagaacttctatgcagaaatataaaatgtaacttcttaacataaggtcctagtcgcaagggtctatggaggtgcttcaggagatccaagcctttttagaatctgtgcaaacttctgtgtatgttttttggaggaaaagtccataaatttcaaattttcaaaaatcagattttcaaaaggatttattgatttctgaaaactagcaaagatctgcttttataaagagcaaatagatggatagatataggagaagatgcttgacttgatgaataagagaaaggacatatagaaaatgaactgaacataagcaagtattttattgaagatatactattttaaataacatttaaacacggaatgattggcaataaactgcaaaatgagtaatttggtatcattttaaaatggttattatcagagattttccttttattaaacagttattcattaattccacaaatatttatcaggcttctattatatgtgaggcactgagctgggcatggctgtaaaggaaccatctaggaagtaattatgcaatcatttctgaacctgtttcagaaaagtaaatcagtgttgggtttatcagtgtttaacattgtttgatagtcccctcacttcttgaataaattgttttttttcacctc

SEQ ID NO: 6994 - protein, 292 aa, Homo sapiens
MHGHGGYDSDFSDDERCGESSKRKKRTVEDDLLLQKPFQKEKHGKVAHKQVAAELLDREEARNRRFHLIAMDAYQRHTKFVNDYILYYGGKKEDFKRLGENDKTDLDVIRENHRFLWNEEDEMDMTWEKRLAKKYYDKLFKEYCIADLSKYKENKFGFRWRVEKEVISGKGQFFCGNKYCDKKEGLKSWEVNFGYIEHGEKRNALVKLRLCQECSIKLNFHHRRKEIKSKKRKDKTKKDCEESSHKKSRLSSAEEASKKKDKGHSSSKKSEDSLLKTYFVGLLSESNEKTYM

SEQ ID NO: 6995 - DNA, 3209 bp, Homo sapiens
ccagtcgggacccgtagggagaggcgggttgcgggcggcggcggcggcggcggcggcggtggtggttgtggcgaggctgtgcggcagggcgcacgggacctgtgctgcagcggctctctcaggccgtgggtcgtcgctgcagctgccgggaaagaaggaaacgacgactccgggggcgaacttggcacacagggaggaagggaaaggatgcatggtcatggaggctatgattctgattttagtgatgatgaacgctgtggagaatccagcaaaaggaaaaaaaggacagttgaagatgacttactgctccaaaaaccatttcagaaagaaaaacatggaaaggtggcccataaacaagttgcagcagaattgctggatagggaagaagcaagaaatagaaggtttcatctcatagctatggatgcttatcaaagacatacaaagttcgtaaatgactatattttatactatggtggcaaaaaagaagacttcaagcgtttgggggaaaatgacaagacagacttggatgttatacgagaaaatcatagattcctatggaatgaggaggacgaaatggacatgacttgggagaagagacttgctaagaaatactatgataaattatttaaggaatactgcatagcagatctcagtaaatataaagaaaataagtttggatttaggtggcgagtagaaaaagaagtaatttcaggaaaaggtcaatttttctgtggaaataaatattgtgataaaaaagaaggcttaaagagttgggaagttaattttggttatattgagcatggtgagaagagaaatgcacttgttaaattaaggttatgccaagaatgttccattaaattaaatttccatcacaggagaaaagaaatcaagtcaaaaaaaagaaaagataaaaccaaaaaagactgtgaagagtcatcacataaaaaatccagattatcttctgcagaagaggcctccaagaaaaaagataaaggacattcatcttcaaagaaatctgaagattctctacttagaagaatgttggaggaactgcagatgtttacctgggagaagagtgaaaggatgggagggaagagactaataatcattattggagaggagttgtctgctaatgtaactactttgaaactctgatgaggaagaaagtgcttcagaatctgaactttggaagggtccactaccagagacagatgaaaaatcacaggaagaagaatttgatgagtattttcaggatttgtttctatgagacgagagagagaagcctccgctccttaatgtgaaacttcatgaagttttaaacttcatgcaatttgaaattccatataagtttttatctgcaagttacagcttgtgtggtttgtctttggaaataaaaatccaggttctctcagaatgtcagaggctttggaagttcattagttcaattaaagactttcctgtcctttaaatatcttttcaattgcttatctacaattctgttttatttgtagctcctagaggatagagctggacagattccattgttcctacattttgtaggttttttttcactgccttcattatgtatcttctcttgccttcattattttattttattatttcttctttttctcttttttagagccaccaatactggatttgtttgtttttcatttttttcttttgtggaaacggagtcctcctgtgttgcccaggctggtattcaaactcctggccttatgcattcctcccaccctggcctcccagagtgctgggattacaggtgtgagccaccatgctctgccaattattttaaattactaggattaaagtatattatgtatgtctttaacttctttctttcccattgataaactggcacccttcttttaagtacctgctctcccattaccacctatttccagctgctttttgaggttttttgcttgcctgtctcttgcttccttcttaacctctaccacttaagagagtttgttataatcaaatttgacttcctagcctgtggataatttactattaagtaaattattaccacagggagccagtgaggtcccagtagtctaaaacagttcatgtgttcacaaaaattgcctccccggcagagattatgcagtaagataatttaactgaataatactatgtgcatgtatcttgcctcagatatactcatgcaaatatgaatatacctctgatatggtttggctctgtgtccccacccaaatctcatcttgaatgtgtactcccataattcccacattttataggagggatccagtgagagataatttgaatcaagggggcggtttcccccatattgttcttgtggtagtgaataagtctcacaagatctgatggttttatcaggggcttctgcttttgcatccttctcattttcttttgctgctgccatgtaagaagtgccttttgcctcccaccatgattctgaggctttcccagccatgtggaactgtaagtccaattaaacctctttttcttccccagtctctggtatgtctttatcagcagtgtgaaaatggactaatagaacttctatgcagaaatataaaatgtaacttcttaacataaggtcctagtcgcaagggtctatggaggtgcttcaggagatccaagcctttttagaatctgtgcaaacttctgtgtatgttttttggaggaaaagtccataaatttcaaattttcaaaaatcagattttcaaaaggatttattgatttctgaaaactagcaaagatctgcttttataaagagcaaatagatggatagatataggagaagatgcttgacttgatgaataagagaaaggacatatagaaaatgaactgaacataagcaagtattttattgaagatatactattttaaataacatttaaacacggaatgattggcaataaactgcaaaatgagtaatttggtatcattttaaaatggttattatcagagattttccttttattaaacagttattcattaattccacaaatatttatcaggcttctattatatgtgaggcactgagctgggcatggctgtaaaggaaccatctaggaagtaattatgcaatcatttctgaacctgtttcagaaaagtaaatcagtgttgggtttatcagtgtttaacattgtttgatagtcccctcacttcttgaataaattgttttttttcacctc

SEQ ID NO: 6996 - protein, 315 aa, Homo sapiens
MHGHGGYDSDFSDDERCGESSKRKKRTVEDDLLLQKPFQKEKHGKVAHKQVAAELLDREEARNRRFHLIAMDAYQRHTKFVNDYILYYGGKKEDFKRLGENDKTDLDVIRENHRFLWNEEDEMDMTWEKRLAKKYYDKLFKEYCIADLSKYKENKFGFRWRVEKEVISGKGQFFCGNKYCDKKEGLKSWEVNFGYIEHGEKRNALVKLRLCQECSIKLNFHHRRKEIKSKKRKDKTKKDCEESSHKKSRLSSAEEASKKKDKGHSSSKKSEDSLLRRMLEELQMFTWEKSERMGGKRLIIIIGEELSANVTTLKL

SEQ ID NO: 6997 - DNA, 3097 bp, Homo sapiens
ccagtcgggacccgtagggagaggcgggttgcgggcggcggcggcggcggcggcggcggtggtggttgtggcgaggctgtgcggcagggcgcacgggacctgtgctgcagcggctctctcaggccgtgggtcgtcgctgcagctgccgggaaagaaggaaacgacgactccgggggcgaacttggcacacagggaggaagggaaaggatgcatggtcatggaggctatgattctgattttagtgatgatgaacgctgtggagaatccagcaaaaggaaaaaaaggacagttgaagatgacttactgctccaaaaaccatttcagaaagaaaaacatggaaaggtggcccataaacaagttgcagcagaattgctggatagggaagaagcaagaaatagaaggtttcatctcatagctatggatgcttatcaaagacatacaaagttcgtaaatgactatattttatactatggtggcaaaaaagaagacttcaagcgtttgggggaaaatgacaagacagacttggatgttatacgagaaaatcatagattcctatggaatgaggaggacgaaatggacatgacttgggagaagagacttgctaagaaatactatgataaattatttaaggaatactgcatagcagatctcagtaaatataaagaaaataagtttggatttaggtggcgagtagaaaaagaagtaatttcaggaaaaggtcaatttttctgtggaaataaatattgtgataaaaaagaaggcttaaagagttgggaagttaattttggttatattgagcatggtgagaagagaaatgcacttgttaaattaaggttatgccaagaatgttccattaaattaaatttccatcacaggagaaaagaaatcaagtcaaaaaaaagaaaagataaaaccaaaaaagactgtgaagagtcatcacataaaaaatccagattatcttctgcagaagaggcctccaagaaaaaagataaaggacattcatcttcaaagaaatctgaagattctctacttagaaactctgatgaggaagaaagtgcttcagaatctgaactttggaagggtccactaccagagacagatgaaaaatcacaggaagaagaatttgatgagtattttcaggatttgtttctatgagacgagagagagaagcctccgctccttaatgtgaaacttcatgaagttttaaacttcatgcaatttgaaattccatataagtttttatctgcaagttacagcttgtgtggtttgtctttggaaataaaaatccaggttctctcagaatgtcagaggctttggaagttcattagttcaattaaagactttcctgtcctttaaatatcttttcaattgcttatctacaattctgttttatttgtagctcctagaggatagagctggacagattccattgttcctacattttgtaggttttttttcactgccttcattatgtatcttctcttgccttcattattttattttattatttcttctttttctcttttttagagccaccaatactggatttgtttgtttttcatttttttcttttgtggaaacggagtcctcctgtgttgcccaggctggtattcaaactcctggccttatgcattcctcccaccctggcctcccagagtgctgggattacaggtgtgagccaccatgctctgccaattattttaaattactaggattaaagtatattatgtatgtctttaacttctttctttcccattgataaactggcacccttcttttaagtacctgctctcccattaccacctatttccagctgctttttgaggttttttgcttgcctgtctcttgcttccttcttaacctctaccacttaagagagtttgttataatcaaatttgacttcctagcctgtggataatttactattaagtaaattattaccacagggagccagtgaggtcccagtagtctaaaacagttcatgtgttcacaaaaattgcctccccggcagagattatgcagtaagataatttaactgaataatactatgtgcatgtatcttgcctcagatatactcatgcaaatatgaatatacctctgatatggtttggctctgtgtccccacccaaatctcatcttgaatgtgtactcccataattcccacattttataggagggatccagtgagagataatttgaatcaagggggcggtttcccccatattgttcttgtggtagtgaataagtctcacaagatctgatggttttatcaggggcttctgcttttgcatccttctcattttcttttgctgctgccatgtaagaagtgccttttgcctcccaccatgattctgaggctttcccagccatgtggaactgtaagtccaattaaacctctttttcttccccagtctctggtatgtctttatcagcagtgtgaaaatggactaatagaacttctatgcagaaatataaaatgtaacttcttaacataaggtcctagtcgcaagggtctatggaggtgcttcaggagatccaagcctttttagaatctgtgcaaacttctgtgtatgttttttggaggaaaagtccataaatttcaaattttcaaaaatcagattttcaaaaggatttattgatttctgaaaactagcaaagatctgcttttataaagagcaaatagatggatagatataggagaagatgcttgacttgatgaataagagaaaggacatatagaaaatgaactgaacataagcaagtattttattgaagatatactattttaaataacatttaaacacggaatgattggcaataaactgcaaaatgagtaatttggtatcattttaaaatggttattatcagagattttccttttattaaacagttattcattaattccacaaatatttatcaggcttctattatatgtgaggcactgagctgggcatggctgtaaaggaaccatctaggaagtaattatgcaatcatttctgaacctgtttcagaaaagtaaatcagtgttgggtttatcagtgtttaacattgtttgatagtcccctcacttcttgaataaattgttttttttcacctc

SEQ ID NO: 6998 - protein, 315 aa, Homo sapiens; identical to SEQ ID NO: 966

SEQ ID NO: 6999 - DNA, 3225 bp, Homo sapiens
ccagtcgggacccgtagggagaggcgggttgcgggcggcggcggcggcggcggcggcggtggtggttgtggcgaggctgtgcggcagggcgcacgggacctgtgctgcagcggctctctcaggccgtgggtcgtcgctgcagctgccgggaaagaaggaaacgacgactccgggggcgaacttggcacacagggaggaagggaaaggatgcatggtcatggaggctatgattctgattttagtgatgatgaacgctgtggagaatccagcaaaaggaaaaaaaggacagttgaagatgacttactgctccaaaaaccatttcagaaagaaaaacatggaaaggtggcccataaacaagttgcagcagaattgctggatagggaagaagcaagaaatagaaggtttcatctcatagctatggatgcttatcaaagacatacaaagttcgtaaatgactatattttatactatggtggcaaaaaagaagacttcaagcgtttgggggaaaatgacaagacagacttggatgttatacgagaaaatcatagattcctatggaatgaggaggacgaaatggacatgacttgggagaagagacttgctaagaaatactatgataaattatttaaggaatactgcatagcagatctcagtaaatataaagaaaataagtttggatttaggtggcgagtagaaaaagaagtaatttcaggaaaaggtcaatttttctgtggaaataaatattgtgataaaaaagaaggcttaaagagttgggaagttaattttggttatattgagcatggtgagaagagaaatgcacttgttaaattaaggttatgccaagaatgttccattaaattaaatttccatcacaggagaaaagaaatcaagtcaaaaaaaagaaaagataaaaccaaaaaagactgtgaagagtcatcacataaaaaatccagattatcttctgcagaagaggcctccaagaaaaaagataaaggacattcatcttcaaagaaatctgaagattctctacttaatggagtcatgctctttcacccaggttggagtgcagtggcgcgatctcagctgactgcagcccctgcttcccaggttcaaactaataatcattattggagaggagttgtctgctaatgtaactactttgaaactctgatgaggaagaaagtgcttcagaatctgaactttggaagggtccactaccagagacagatgaaaaatcacaggaagaagaatttgatgagtattttcaggatttgtttctatgagacgagagagagaagcctccgctccttaatgtgaaacttcatgaagttttaaacttcatgcaatttgaaattccatataagtttttatctgcaagttacagcttgtgtggtttgtctttggaaataaaaatccaggttctctcagaatgtcagaggctttggaagttcattagttcaattaaagactttcctgtcctttaaatatcttttcaattgcttatctacaattctgttttatttgtagctcctagaggatagagctggacagattccattgttcctacattttgtaggttttttttcactgccttcattatgtatcttctcttgccttcattattttattttattatttcttctttttctcttttttagagccaccaatactggatttgtttgtttttcatttttttcttttgtggaaacggagtcctcctgtgttgcccaggctggtattcaaactcctggccttatgcattcctcccaccctggcctcccagagtgctgggattacaggtgtgagccaccatgctctgccaattattttaaattactaggattaaagtatattatgtatgtctttaacttctttctttcccattgataaactggcacccttcttttaagtacctgctctcccattaccacctatttccagctgctttttgaggttttttgcttgcctgtctcttgcttccttcttaacctctaccacttaagagagtttgttataatcaaatttgacttcctagcctgtggataatttactattaagtaaattattaccacagggagccagtgaggtcccagtagtctaaaacagttcatgtgttcacaaaaattgcctccccggcagagattatgcagtaagataatttaactgaataatactatgtgcatgtatcttgcctcagatatactcatgcaaatatgaatatacctctgatatggtttggctctgtgtccccacccaaatctcatcttgaatgtgtactcccataattcccacattttataggagggatccagtgagagataatttgaatcaagggggcggtttcccccatattgttcttgtggtagtgaataagtctcacaagatctgatggttttatcaggggcttctgcttttgcatccttctcattttcttttgctgctgccatgtaagaagtgccttttgcctcccaccatgattctgaggctttcccagccatgtggaactgtaagtccaattaaacctctttttcttccccagtctctggtatgtctttatcagcagtgtgaaaatggactaatagaacttctatgcagaaatataaaatgtaacttcttaacataaggtcctagtcgcaagggtctatggaggtgcttcaggagatccaagcctttttagaatctgtgcaaacttctgtgtatgttttttggaggaaaagtccataaatttcaaattttcaaaaatcagattttcaaaaggatttattgatttctgaaaactagcaaagatctgcttttataaagagcaaatagatggatagatataggagaagatgcttgacttgatgaataagagaaaggacatatagaaaatgaactgaacataagcaagtattttattgaagatatactattttaaataacatttaaacacggaatgattggcaataaactgcaaaatgagtaatttggtatcattttaaaatggttattatcagagattttccttttattaaacagttattcattaattccacaaatatttatcaggcttctattatatgtgaggcactgagctgggcatggctgtaaaggaaccatctaggaagtaattatgcaatcatttctgaacctgtttcagaaaagtaaatcagtgttgggtttatcagtgtttaacattgtttgatagtcccctcacttcttgaataaattgttttttttcacctc

SEQ ID NO: 7000 - protein, 313 aa, Homo sapiens
MHGHGGYDSDFSDDERCGESSKRKKRTVEDDLLLQKPFQKEKHGKVAHKQVAAELLDREEARNRRFHLIAMDAYQRHTKFVNDYILYYGGKKEDFKRLGENDKTDLDVIRENHRFLWNEEDEMDMTWEKRLAKKYYDKLFKEYCIADLSKYKENKFGFRWRVEKEVISGKGQFFCGNKYCDKKEGLKSWEVNFGYIEHGEKRNALVKLRLCQECSIKLNFHHRRKEIKSKKRKDKTKKDCEESSHKKSRLSSAEEASKKKDKGHSSSKKSEDSLLNGVMLFHPGWSAVARSQLTAAPASQVQTNNHYWRGVVC

SEQ ID NO: 7001 - DNA, 3145 bp, Homo sapiens
ccagtcgggacccgtagggagaggcgggttgcgggcggcggcggcggcggcggcggcggtggtggttgtggcgaggctgtgcggcagggcgcacgggacctgtgctgcagcggctctctcaggccgtgggtcgtcgctgcagctgccgggaaagaaggaaacgacgactccgggggcgaacttggcacacagggaggaagggaaaggatgcatggtcatggaggctatgattctgattttagtgatgatgaacgctgtggagaatccagcaaaaggaaaaaaaggacagttgaagatgacttactgctccaaaaaccatttcagaaagaaaaacatggaaaggtggcccataaacaagttgcagcagaattgctggatagggaagaagcaagaaatagaaggtttcatctcatagctatggatgcttatcaaagacatacaaagttcgtaaatgactatattttatactatggtggcaaaaaagaagacttcaagcgtttgggggaaaatgacaagacagacttggatgttatacgagaaaatcatagattcctatggaatgaggaggacgaaatggacatgacttgggagaagagacttgctaagaaatactatgataaattatttaaggaatactgcatagcagatctcagtaaatataaagaaaataagtttggatttaggtggcgagtagaaaaagaagtaatttcaggaaaaggtcaatttttctgtggaaataaatattgtgataaaaaagaaggcttaaagagttgggaagttaattttggttatattgagcatggtgagaagagaaatgcacttgttaaattaaggttatgccaagaatgttccattaaattaaatttccatcacaggagaaaagaaatcaagtcaaaaaaaagaaaagataaaaccaaaaaagactgtgaagagtcatcacataaaaaatccagattatcttctgcagaagaggcctccaagaaaaaagataaaggacattcatcttcaaagaaatctgaagattctctacttaactaataatcattattggagaggagttgtctgctaatgtaactactttgaaactctgatgaggaagaaagtgcttcagaatctgaactttggaagggtccactaccagagacagatgaaaaatcacaggaagaagaatttgatgagtattttcaggatttgtttctatgagacgagagagagaagcctccgctccttaatgtgaaacttcatgaagttttaaacttcatgcaatttgaaattccatataagtttttatctgcaagttacagcttgtgtggtttgtctttggaaataaaaatccaggttctctcagaatgtcagaggctttggaagttcattagttcaattaaagactttcctgtcctttaaatatcttttcaattgcttatctacaattctgttttatttgtagctcctagaggatagagctggacagattccattgttcctacattttgtaggttttttttcactgccttcattatgtatcttctcttgccttcattattttattttattatttcttctttttctcttttttagagccaccaatactggatttgtttgtttttcatttttttcttttgtggaaacggagtcctcctgtgttgcccaggctggtattcaaactcctggccttatgcattcctcccaccctggcctcccagagtgctgggattacaggtgtgagccaccatgctctgccaattattttaaattactaggattaaagtatattatgtatgtctttaacttctttctttcccattgataaactggcacccttcttttaagtacctgctctcccattaccacctatttccagctgctttttgaggttttttgcttgcctgtctcttgcttccttcttaacctctaccacttaagagagtttgttataatcaaatttgacttcctagcctgtggataatttactattaagtaaattattaccacagggagccagtgaggtcccagtagtctaaaacagttcatgtgttcacaaaaattgcctccccggcagagattatgcagtaagataatttaactgaataatactatgtgcatgtatcttgcctcagatatactcatgcaaatatgaatatacctctgatatggtttggctctgtgtccccacccaaatctcatcttgaatgtgtactcccataattcccacattttataggagggatccagtgagagataatttgaatcaagggggcggtttcccccatattgttcttgtggtagtgaataagtctcacaagatctgatggttttatcaggggcttctgcttttgcatccttctcattttcttttgctgctgccatgtaagaagtgccttttgcctcccaccatgattctgaggctttcccagccatgtggaactgtaagtccaattaaacctctttttcttccccagtctctggtatgtctttatcagcagtgtgaaaatggactaatagaacttctatgcagaaatataaaatgtaacttcttaacataaggtcctagtcgcaagggtctatggaggtgcttcaggagatccaagcctttttagaatctgtgcaaacttctgtgtatgttttttggaggaaaagtccataaatttcaaattttcaaaaatcagattttcaaaaggatttattgatttctgaaaactagcaaagatctgcttttataaagagcaaatagatggatagatataggagaagatgcttgacttgatgaataagagaaaggacatatagaaaatgaactgaacataagcaagtattttattgaagatatactattttaaataacatttaaacacggaatgattggcaataaactgcaaaatgagtaatttggtatcattttaaaatggttattatcagagattttccttttattaaacagttattcattaattccacaaatatttatcaggcttctattatatgtgaggcactgagctgggcatggctgtaaaggaaccatctaggaagtaattatgcaatcatttctgaacctgtttcagaaaagtaaatcagtgttgggtttatcagtgtttaacattgtttgatagtcccctcacttcttgaataaattgttttttttcacctc

SEQ ID NO: 7002 - protein, 276 aa, Homo sapiens
MHGHGGYDSDFSDDERCGESSKRKKRTVEDDLLLQKPFQKEKHGKVAHKQVAAELLDREEARNRRFHLIAMDAYQRHTKFVNDYILYYGGKKEDFKRLGENDKTDLDVIRENHRFLWNEEDEMDMTWEKRLAKKYYDKLFKEYCIADLSKYKENKFGFRWRVEKEVISGKGQFFCGNKYCDKKEGLKSWEVNFGYIEHGEKRNALVKLRLCQECSIKLNFHHRRKEIKSKKRKDKTKKDCEESSHKKSRLSSAEEASKKKDKGHSSSKKSEDSLLN

SEQ ID NO: 7003 - DNA, 3304 bp, Homo sapiens
tggtgcccagtcgggacccgtagggagaggcgggttgcgggcggcggcggcggcggcggcggcggtggtggttgtggcgaggctgtgcggcagggcgcacgggacctgtgctgcagcggctctctcaggccgtgggtcgtcgctgcagctgccgggaaagaaggaaacgacgactccgggggcgaacttggcacacagggaggaagggaaagggtgtgtgaggagggctgtgggtatatttggcatcagggagaaggacctcaaaacttgtttttcatatagtactagctgatcgtcgggtttttttttgttttggtttggtttttttttttttggatgacagattctggagacacctggcatctccgtttttgagtttctccccgctcttgtcagttgattcgtaggcctgaaatgcatggtcatggaggctatgattctgattttagtgatgatgaacgctgtggagaatccagcaaaaggaaaaaaaggacagttgaagatgacttactgctccaaaaaccatttcagaaagaaaaacatggaaaggtggcccataaacaagttgcagcagaattgctggatagggaagaagcaagaaatagaaggtttcatctcatagctatggatgcttatcaaagacatacaaagttcgtaaatgactatattttatactatggtggcaaaaaagaagacttcaagcgtttgggggaaaatgacaagacagacttggatgttatacgagaaaatcatagattcctatggaatgaggaggacgaaatggacatgacttgggagaagagacttgctaagaaatactatgataaattatttaaggaatactgcatagcagatctcagtaaatataaagaaaataagtttggatttaggtggcgagtagaaaaagaagtaatttcaggaaaaggtcaatttttctgtggaaataaatattgtgataaaaaagaaggcttaaagagttgggaagttaattttggttatattgagcatggtgagaagagaaatgcacttgttaaattaaggttatgccaagaatgttccattaaattaaatttccatcacaggagaaaagaaatcaagtcaaaaaaaagaaaagataaaaccaaaaaagactgtgaagagtcatcacataaaaaatccagattatcttctgcagaagaggcctccaagaaaaaagataaaggacattcatcttcaaagaaatctgaagattctctacttagaaactctgatgaggaagaaagtgcttcagaatctgaactttggaagggtccactaccagagacagatgaaaaatcacaggaagaagaatttgatgagtattttcaggatttgtttctatgagacgagagagagaagcctccgctccttaatgtgaaacttcatgaagttttaaacttcatgcaatttgaaattccatataagtttttatctgcaagttacagcttgtgtggtttgtctttggaaataaaaatccaggttctctcagaatgtcagaggctttggaagttcattagttcaattaaagactttcctgtcctttaaatatcttttcaattgcttatctacaattctgttttatttgtagctcctagaggatagagctggacagattccattgttcctacattttgtaggttttttttcactgccttcattatgtatcttctcttgccttcattattttattttattatttcttctttttctcttttttagagccaccaatactggatttgtttgtttttcatttttttcttttgtggaaacggagtcctcctgtgttgcccaggctggtattcaaactcctggccttatgcattcctcccaccctggcctcccagagtgctgggattacaggtgtgagccaccatgctctgccaattattttaaattactaggattaaagtatattatgtatgtctttaacttctttctttcccattgataaactggcacccttcttttaagtacctgctctcccattaccacctatttccagctgctttttgaggttttttgcttgcctgtctcttgcttccttcttaacctctaccacttaagagagtttgttataatcaaatttgacttcctagcctgtggataatttactattaagtaaattattaccacagggagccagtgaggtcccagtagtctaaaacagttcatgtgttcacaaaaattgcctccccggcagagattatgcagtaagataatttaactgaataatactatgtgcatgtatcttgcctcagatatactcatgcaaatatgaatatacctctgatatggtttggctctgtgtccccacccaaatctcatcttgaatgtgtactcccataattcccacattttataggagggatccagtgagagataatttgaatcaagggggcggtttcccccatattgttcttgtggtagtgaataagtctcacaagatctgatggttttatcaggggcttctgcttttgcatccttctcattttcttttgctgctgccatgtaagaagtgccttttgcctcccaccatgattctgaggctttcccagccatgtggaactgtaagtccaattaaacctctttttcttccccagtctctggtatgtctttatcagcagtgtgaaaatggactaatagaacttctatgcagaaatataaaatgtaacttcttaacataaggtcctagtcgcaagggtctatggaggtgcttcaggagatccaagcctttttagaatctgtgcaaacttctgtgtatgttttttggaggaaaagtccataaatttcaaattttcaaaaatcagattttcaaaaggatttattgatttctgaaaactagcaaagatctgcttttataaagagcaaatagatggatagatataggagaagatgcttgacttgatgaataagagaaaggacatatagaaaatgaactgaacataagcaagtattttattgaagatatactattttaaataacatttaaacacggaatgattggcaataaactgcaaaatgagtaatttggtatcattttaaaatggttattatcagagattttccttttattaaacagttattcattaattccacaaatatttatcaggcttctattatatgtgaggcactgagctgggcatggctgtaaaggaaccatctaggaagtaattatgcaatcatttctgaacctgtttcagaaaagtaaatcagtgttgggtttatcagtgtttaacattgtttgatagtcccctcacttcttgaataaattgttttttttcacctc

SEQ ID NO: 7004 - protein, 315 aa, Homo sapiens; identical to SEQ ID NO: 966

SEQ ID NO: 7005 - DNA, 2504 bp, Homo sapiens
ggttcccctttcaactcagaaagtcagtgacttaaattctgatccctacttaccaataatcactgaatagatttgacagtgatgcattcttttgtgttgcctgttcttccaattgttatttccttagtaacactcctcccgcccctggcaggttgtaacagttatgatagcaatgatttgtagtgactgccaaccctcagggaaccaggatactatagattcatagggttataagggaccttaaaggtcatttagtccagtcttgtagacttgattctctagggatatctggccacttttttagtgggtattttttaagacagttagtttataatgttactctaaactgacttgattttttagtaaaattgactggtatcagaaaactggtgtaagaaagctggcatgtgggaagtactcttggaagggaacaagataacagctgtccacttctaaaggccttgtaggtttcgttctctggcatcattaacattagcagagtaatacaatagtaataaccttgctaggcctaattaatttttctctgctttctttatctcatattaatgagttttcataaaaataagagaagattttaattctttttttccctcacattatcaatttgggacactggccattccagtgatggctgtcattgagtcaggaatcttgttttcaagattaaaattttatcatttgtatgtagatcattagaatacaaaatgccctcccccacttttgccatttttgctagaattggtgtcagaatagattcagttaggagcaaagttcagacacacatgttgattcagggatcagagtccaacaggtaaaaggctagaactaccgtaacaaatcaatgctgttttatttttatgttgtgtttaactaaaggacattctgtattgacaggccacatttgtgccatttcttttttagactaataatcattattggagaggagttgtctgctaatgtaactactttgtgagttatagtgttattgtctgataattttgcagtatttttaaatttttagttgactaatacaggtgatttatttgaaacatatctattttgtcatctttaataaaatgtctttattgtttttactgattttgaaggtaattcatgctcattgtttaaaatacaaacaatttgaaaatgtttaaaatagaaagtaaaagtattccaggcccacaggtaatataatcagttaaatttggttggcttttgcaaacttacaatacgtacataaaattacatgtatgtatataatgtgcatatgtttttaacatatctattatactatgcatactttttgtaactttttaaaaatttgatatagaatggacatttttctattgcagtacatacagatatgctaatgtttttaaacagctgtatagtatttatttaaccagtccttaatccctaattggtggggaattaggttttttgttgttgttgttacacagtgtgcatctttgtacatatgtatcagaggtgcttatttatgtatgtaagtaatcaaattcctaaaagcagcattgctggtcaaagggtatgcgttttaaactgatctatattgccagatttttctccagaaaaaggtttacagaattttcactcccagcaatgtgtgagaatgccagtttcttccctgaaacaggcttcttctcattatgtaatcagcattggttttttaaaatgtctgacaattttttttaaaataatttaactagctggtcttacatactagctcagttcttaaggtactaatcctaatgtaaacatgttctctacaaatgtaaatcttaacttgcgtgtcttctgtgtaaccaagaaaaagaagaaactagatcagagacaactatattgcaagagataattgacttacaagagttaatattggaattgctactttaactcagtgtaacttagagaagtttcgatgagacttaaaatccttggcctttttgctgagattctttggtaacccttggcttatttatatatgttttaaaagaatttattgtacctgtgagagtgaattaaatttctagagagtcataaaagttgaagctgagttaaataaaaagttaattgtattggcgaataattcaaaatgtgctttaagtataataggtttttaaaaatcatcttttttaaatgaacaggaaactctgatgaggaagaaagtgcttcagaatctgaactttggaagggtccactaccagagacagatgaaaaatcacaggaagaagaatttgatgagtattttcaggatttgtttctatgagacgagagagagaagcctccgctccttaatgtgaaacttcatgaagttttaaacttcatgcaatttgaaattccatataagtttttatctgcaagttacagcttgtgtggtttgtctttggaaataaaaatccaggttctctcagaatgtcagaggctttggaagttcattagttcaattaaagactttcctgtccttt

SEQ ID NO: 7006 - protein, 48 aa, Homo sapiens; identical to SEQ ID NO: 6990

SEQ ID NO: 7007 - DNA, 1561 bp, Homo sapiens
tggtgcccagtcgggacccgtagggagaggcgggttgcgggcggcggcggcggcggcggcggcggtggtggttgtggcgaggctgtgcggcagggcgcacgggacctgtgctgcagcggctctctcaggccgtgggtcgtcgctgcagctgccgggaaagaaggaaacgacgactccgggggcgaacttggcacacagggaggaagggaaagggtgtgtgaggagggctgtgggtatatttggcatcagggagaaggacctcaaaacttgtttttcatatagtactagctgatcgtcgggtttttttttgttttggtttggtttttttttttttggatgacagattctggagacacctggcatctccgtttttgagtttctccccgctcttgtcagttgattcgtaggcctgaaatgcatggtcatggaggctatgattctgattttagtgatgatgaacgctgtggagaatccagcaaaaggaaaaaaaggacagttgaagatgacttactgctccaaaaaccatttcagaaagaaaaacatggaaaggtggcccataaacaagttgcagcagaattgctggatagggaagaagcaagaaatagaaggtttcatctcatagctatggatgcttatcaaagacatacaaagttcgtaaatgactatattttatactatggtggcaaaaaagaagacttcaagcgtttgggggaaaatgacaagacagacttggatgttatacgagaaaatcatagattcctatggaatgaggaggacgaaatggacatgacttgggagaagagacttgctaagaaatactatgataaattatttaaggaatactgcatagcagatctcagtaaatataaagaaaataagtttggatttaggtggcgagtagaaaaagaagtaatttcaggaaaaggtcaatttttctgtggaaataaatattgtgataaaaaagaaggcttaaagagttgggaagttaattttggttatattgagcatggtgagaagagaaatgcacttgttaaattaaggttatgccaagaatgttccattaaattaaatttccatcacaggagaaaagaaatcaagtcaaaaaaaagaaaagataaaaccaaaaaagactgtgaagagtcatcacataaaaaatccagattatcttctgcagaagaggcctccaagaaaaaagataaaggacattcatcttcaaagaaatctgaagattctctacttagaaactctgatgaggaagaaagtgcttcagaatctgaactttggaagggtccactaccagagacagatgaaaaatcacaggaagaagaatttgatgagtattttcaggatttgtttctatgagacgagagagagaagcctccgctccttaatgtgaaacttcatgaagttttaaacttcatgcaatttgaaattccatataagtttttatctgcaagttacagcttgtgtggtttgtctttggaaataaaaatccaggttctctcagaatgtcagaggctttggaagttcattagttcaattaaagactttcctgtccttt

SEQ ID NO: 7008 - protein, 315 aa, Homo sapiens; identical to SEQ ID NO: 966

SEQ ID NO: 7009 - DNA, 1306 bp, Homo sapiens
ccagtcgggacccgtagggagaggcgggttgcgggcggcggcggcggcggcggcggcggtggtggttgtggcgaggctgtgcggcagggcgcacgggacctgtgctgcagcggctctctcaggccgtgggtcgtcgctgcagctgccgggaaagaaggaaacgacgactccgggggcgaacttggcacacagggaggaagggaaaggatgcatggtcatggaggctatgattctgattttagtgatgatgaacgctgtggagaatccagcaaaaggaaaaaaaggacagttgaagatgacttactgctccaaaaaccatttcagaaagaaaaacatggaaaggtggcccataaacaagttgcagcagaattgctggatagggaagaagcaagaaatagaaggtttcatctcatagctatggatgcttatcaaagacatacaaagttcgtaaatgactatattttatactatggtggcaaaaaagaagacttcaagcgtttgggggaaaatgacaagacagacttggatgttatacgagaaaatcatagattcctatggaatgaggaggacgaaatggacatgacttgggagaagagacttgctaagaaatactatgataaattatttaaggaatactgcatagcagatctcagtaaatataaagaaaataagtttggatttaggtggcgagtagaaaaagaagtaatttcaggaaaaggtcaatttttctgtggaaataaatattgtgataaaaaagaaggcttaaagagttgggaagttaattttggttatattgagcatggtgagaagagaaatgcacttgttaaattaaggttatgccaagaatgttccattaaattaaatttccatcacaggagaaaagaaatcaagtcaaaaaaaagaaaagataaaaccaaaaaagactgtgaagagtcatcacataaaaaatccagattatcttctgcagaagaggcctccaagaaaaaagataaaggacattcatcttcaaagaaatctgaagattctctacttagaaactctgatgaggaagaaagtgcttcagaatctgaactttggaagggtccactaccagagacagatgaaaaatcacaggaagaagaatttgatgagtattttcaggatttgtttctatgagacgagagagagaagcctccgctccttaatgtgaaacttcatgaagttttaaacttcatgcaatttgaaattccatataagtttttatctgcaagttacagcttgtgtggtttgtctttggaaataaaaatccaggttctctcagaatgtc

SEQ ID NO: 7010 - protein, 315 aa, Homo sapiens; identical to SEQ ID NO: 966

SEQ ID NO: 7011 - DNA, 1513 bp, Homo sapiens
tggtgcccagtcgggacccgtagggagaggcgggttgcgggcggcggcggcggcggcggcggcggtggtggttgtggcgaggctgtgcggcagggcgcacgggacctgtgctgcagcggctctctcaggccgtgggtcgtcgctgcagctgccgggaaagaaggaaacgacgactccgggggcgaacttggcacacagggaggaagggaaagggtgtgtgaggagggctgtgggtatatttggcatcagggagaaggacctcaaaacttgtttttcatatagtactagctgatcgtcgggtttttttttgttttggtttggtttttttttttttggatgacagattctggagacacctggcatctccgtttttgagtttctccccgctcttgtcagttgattcgtaggcctgaaatgcatggtcatggaggctatgattctgattttagtgatgatgaacgctgtggagaatccagcaaaaggaaaaaaaggacagttgaagatgacttactgctccaaaaaccatttcagaaagaaaaacatggaaaggtggcccataaacaagttgcagcagaattgctggatagggaagaagcaagaaatagaaggtttcatctcatagctatggatgcttatcaaagacatacaaagttcgtaaatgactatattttatactatggtggcaaaaaagaagacttcaagcgtttgggggaaaatgacaagacagacttggatgttatacgagaaaatcatagattcctatggaatgaggaggacgaaatggacatgacttgggagaagagacttgctaagaaatactatgataaattatttaaggaatactgcatagcagatctcagtaaatataaagaaaataagtttggatttaggtggcgagtagaaaaagaagtaatttcaggaaaaggtcaatttttctgtggaaataaatattgtgataaaaaagaaggcttaaagagttgggaagttaattttggttatattgagcatggtgagaagagaaatgcacttgttaaattaaggttatgccaagaatgttccattaaattaaatttccatcacaggagaaaagaaatcaagtcaaaaaaaagaaaagataaaaccaaaaaagactgtgaagagtcatcacataaaaaatccagattatcttctgcagaagaggcctccaagaaaaaagataaaggacattcatcttcaaagaaatctgaagattctctacttagaaactctgatgaggaagaaagtgcttcagaatctgaactttggaagggtccactaccagagacagatgaaaaatcacaggaagaagaatttgatgagtattttcaggatttgtttctatgagacgagagagagaagcctccgctccttaatgtgaaacttcatgaagttttaaacttcatgcaatttgaaattccatataagtttttatctgcaagttacagcttgtgtggtttgtctttggaaataaaaatccaggttctctcagaatgtc

SEQ ID NO: 7012 - protein, 315 aa, Homo sapiens; identical to SEQ ID NO: 966

SEQ ID NO: 7013 - DNA, 398 bp, Homo sapiens
agactaataatcattattggagaggagttgtctgctaatgtaactactttgtaattcatgctcattgtttaaaatacaaacaatttgaaaatgtttaaaatagaaagtaaaagtattccaggcccacaggaaactctgatgaggaagaaagtgcttcagaatctgaactttggaagggtccactaccagagacagatgaaaaatcacaggaagaagaatttgatgagtattttcaggatttgtttctatgagacgagagagagaagcctccgctccttaatgtgaaacttcatgaagttttaaacttcatgcaatttgaaattccatataagtttttatctgcaagttacagcttgtgtggtttgtctttggaaataaaaatccaggttctctcagaa

SEQ ID NO: 7014 - protein, 64 aa, Homo sapiens; identical to SEQ ID NO: 6988

SEQ ID NO: 7015 - DNA, 1061 bp, Homo sapiens
agggaaccaggatactatagattcatagggttataagggaccttaaaggtcatttagtccagtcttgtagacttgattctctagggatatctggccacttttttagtgggtattttttaagacagttagtttataatgttactctaaactgacttgattttttagtaaaattgactggtatcagaaaactggtgtaagaaagctggcatgtgggaagtactcttggaagggaacaagataacagctgtccacttctaaaggccttgtaggtttcgttctctggcatcattaacattagcagagtaatacaatagtaataaccttgctaggcctaattaatttttctctgctttctttatctcatattaatgagttttcataaaaataagagaagattttaattctttttttccctcacattatcaatttgggacactggccattccagtgatggctgtcattgagtcaggaatcttgttttcaagattaaaattttatcatttgtatgtagatcattagaatacaaaatgccctcccccacttttgccatttttgctagaattggtgtcagaatagattcagttaggagcaaagttcagacacacatgttgattcagggatcagagtccaacaggtaaaaggctagaactaccgtaacaaatcaatgctgttttatttttatgttgtgtttaactaaaggacattctgtattgacaggccacatttgtgccatttcttttttagactaataatcattattggagaggagttgtctgctaatgtaactactttgaaactctgatgaggaagaaagtgcttcagaatctgaactttggaagggtccactaccagagacagatgaaaaatcacaggaagaagaatttgatgagtattttcaggatttgtttctatgagacgagagagagaagcctccgctccttaatgtgaaacttcatgaagttttaaacttcatgcaatttgaaattccatataagtttttatctgcaagttacagcttgtgtggtttgtctttggaaataaaaatccaggttctctcagaa

SEQ ID NO: 7016 - protein, 48 aa, Homo sapiens; identical to SEQ ID NO: 6990

SEQ ID NO: 7017 - DNA, 4725 bp, Homo sapiens
ataaacattatttgcatttagtataattcttaacaagaaattttaaatattcaatgatcagaaattttgcactgagaaaaatagaaatgttaagatatttgttgtttaaaaatttagcagagagggagatgttgatggaggtattcctctcttaggaatatagtatattccttataattattttgcttgtacgaactttgttttcaacatatttgaagtgtcttaaagcactgactctttctctccacgtaaattctaatttatcaggaggtcctttcctaaattaggtaaaatgtagtgacagtttcgaaaatacattcaagtataagaccagtggaccaatgttatctcaggatgaaatcatagatacatacttcaacaaaggtgtacacaggctaaagtgggagagtgtattttagttttcatccatttccaacagtgagaggtgtgaatgcttatgcaatatagaaaaaattcccctttttcagttctaattttttatccttaaaaagtcttttggggcaaattcttgaatcactgatttatattattcttttatttcttctgcctgccttctccttcccactgtctttcaccccctgccctttgaatccttccctgcttcctagaaatagcccttaatgctcttttacctctcctcagctaagtcaaatttttactagtagaagcagggtgaatactgtgaagactatatccaatctgagaaacccctagctaatttgatcttgaaaaaacaaactatccacttcaagctgacctgctgtttggcagccggtacgctatttaccatagcaagcatgaaacatatacattgttatggtatgccaaccccagatatcctctcaggtggtcagtcatctgtattacatggtcttggcaatttcagacctcacattttgctctttatttccatttggacaatactcagttaccttcttaacccatttgacacctggattattaaaaccaaatccatggagaaaaactcaatttctgttgggacagtaacaagtgctttagatatgttacctcatttaatcttaataatgtgcatataatatcctcgttttgtagatgagaaaaatcaagacctagagaatgtctttaaatgaatgaagaaactcaatttttaaaaatatatatatttaaagtatacaacttgatgatttgctgccctcttaacaaatttcaagtattgttatctttagtcaccttgcacatgagatcgcccaagaaccaaagaattgaagtaaagtgcccaaggtcaaatagttaatggcaaagctgggattaaacataagtttataattccaaagtctatgccctttacctgtatcatcaatcaataactgttcatcagtgaaatcaactgtatgtctattctttatacctcagttttggcatatgcattgtacagatccacattaaatgatttgatctatgtttcacttctgtctataaaatgggtataaagagacctacttcgttggattattatcagaatcaaatgagaaaacatacatgtaaagtatgtgcctgacgcaaagtaagtccttgataacctgtagctatcattgttatcagagaaaagaaaaatacagacatataaatcctgtgtttgttctctagaattgatgaaatcaaaagttaagtctataaaaatctgacctgtccatttgttaccatgattattggagacatttgccatttcttcagtggtgcaagttattagttaccatataatatccacaaaaaccaagatgatagacctactttcattattcaaaacatgtaggaaaaattgtatataattttaggcaccacactctaaagggaacattgaaaacttgaagcaggtcaagaagaaaaaaactgaggtatggagaaaacttgaaattatattgtaggaagaatgttggaggaactgcagatgtttacctgggagaagagtgaaaggatgggagggaagaggtgaggaagtagacatggaaattactgtatggatatttgcaaggctgctactatgtaggagacttattttttatgactctgggttggcagaactgcccaaaaacagatttttgccttaatttaaggaaaaacttgtcccttagaactgtctgacaaaaggaatggagaaatgggctgcctctggagtagcgagtgttccagcatggactggattggcacttattggaggtgttgcagtgaaagttcattcattggataagtgttggattaaatgacctccaggttcccctttcaactcagaaagtcagtgacttaaattctgatccctacttaccaataatcactgaatagatttgacagtgatgcattcttttgtgttgcctgttcttccaattgttatttccttagtaacactcctcccgcccctggcaggttgtaacagttatgatagcaatgatttgtagtgactgccaaccctcagggaaccaggatactatagattcatagggttataagggaccttaaaggtcatttagtccagtcttgtagacttgattctctagggatatctggccacttttttagtgggtattttttaagacagttagtttataatgttactctaaactgacttgattttttagtaaaattgactggtatcagaaaactggtgtaagaaagctggcatgtgggaagtactcttggaagggaacaagataacagctgtccacttctaaaggccttgtaggtttcgttctctggcatcattaacattagcagagtaatacaatagtaataaccttgctaggcctaattaatttttctctgctttctttatctcatattaatgagttttcataaaaataagagaagattttaattctttttttccctcacattatcaatttgggacactggccattccagtgatggctgtcattgagtcaggaatcttgttttcaagattaaaattttatcatttgtatgtagatcattagaatacaaaatgccctcccccacttttgccatttttgctagaattggtgtcagaatagattcagttaggagcaaagttcagacacacatgttgattcagggatcagagtccaacaggtaaaaggctagaactaccgtaacaaatcaatgctgttttatttttatgttgtgtttaactaaaggacattctgtattgacaggccacatttgtgccatttcttttttagactaataatcattattggagaggagttgtctgctaatgtaactactttgtgagttatagtgttattgtctgataattttgcagtatttttaaatttttagttgactaatacaggtgatttatttgaaacatatctattttgtcatctttaataaaatgtctttattgtttttactgattttgaaggtaattcatgctcattgtttaaaatacaaacaatttgaaaatgtttaaaatagaaagtaaaagtattccaggcccacaggtaatataatcagttaaatttggttggcttttgcaaacttacaatacgtacataaaattacatgtatgtatataatgtgcatatgtttttaacatatctattatactatgcatactttttgtaactttttaaaaatttgatatagaatggacatttttctattgcagtacatacagatatgctaatgtttttaaacagctgtatagtatttatttaaccagtccttaatccctaattggtggggaattaggttttttgttgttgttgttacacagtgtgcatctttgtacatatgtatcagaggtgcttatttatgtatgtaagtaatcaaattcctaaaagcagcattgctggtcaaagggtatgcgttttaaactgatctatattgccagatttttctccagaaaaaggtttacagaattttcactcccagcaatgtgtgagaatgccagtttcttccctgaaacaggcttcttctcattatgtaatcagcattggttttttaaaatgtctgacaattttttttaaaataatttaactagctggtcttacatactagctcagttcttaaggtactaatcctaatgtaaacatgttctctacaaatgtaaatcttaacttgcgtgtcttctgtgtaaccaagaaaaagaagaaactagatcagagacaactatattgcaagagataattgacttacaagagttaatattggaattgctactttaactcagtgtaacttagagaagtttcgatgagacttaaaatccttggcctttttgctgagattctttggtaacccttggcttatttatatatgttttaaaagaatttattgtacctgtgagagtgaattaaatttctagagagtcataaaagttgaagctgagttaaataaaaagttaattgtattggcgaataattcaaaatgtgctttaagtataataggtttttaaaaatcatcttttttaaatgaacaggaaactctgatgaggaagaaagtgcttcagaatctgaactttggaagggtccactaccagagacagatgaaaaatcacaggaagaagaatttgatgagtattttcaggatttgtttctatgagacgagagagagaagcctccgctccttaatgtgaaacttcatgaagttttaaacttcatgcaatttgaaattccatataagtttttatctgcaagttacagcttgtgtggtttgtctttggaaataaaaatccaggttctctcagaa

SEQ ID NO: 7018 - protein, 48 aa, Homo sapiens; identical to SEQ ID NO: 6990

SEQ ID NO: 7019 - DNA, 6441 bp, Homo sapiens
cagccaggaaaaaagcttaagcattttggccaaggttacacaacccgaaacaccgggacgcggcccggaggcggcttcggccttgcggtccaggctaggccactgcgccggggcccagcctgctcggcgcccgcccgagtgctcggcaggcccgtagcgccgcggctcccaggagccgaggggcagccggcgcgcaggcggcggttgccgggccctccctcggcccggcggcggtggcggccccgcgtcgcgaggcacttccggcgcgtgccggggtggccggatgacgtggctgagtcagaggaagaggctgaggaggcgcggggggcgggggaggctcaggagcgggcggtgacggcgacggcggcggcagaggaggcagcggctgggccgggccccgtgcgtctgtccgcgccccgtggatgcgaatcggccgcggcggaggcggcggcggcggaggaggcggcggcgggaggaggagtcggtgagccggctccgggccggaggggcgcggaggatgaggccgctgcctggcgctcttggcgtggcggcggccgccgcgctgtggctgctgctgctgctgctgccccggacccgggcggacgagcacgaacacacgtatcaagataaagaggaagttgtcttatggatgaatactgttgggccctaccataatcgtcaagaaacatataagtacttttcacttccattctgtgtggggtcaaaaaaaagtatcagtcattaccatgaaactctgggagaagcacttcaaggggttgaattggaatttagtggtctggatattaaatttaaagatgatgtgatgccagccacttactgtgaaattgatttagataaagaaaagagagatgcatttgtatatgccataaaaaatcattactggtaccagatgtacatagatgatttaccaatatggggtattgttggtgaggctgatgaaaatggagaagattactatctttggacctataaaaaacttgaaataggttttaatggaaatcgaattgttgatgttaatctaactagtgaaggaaaggtgaaactggttccaaatactaaaatccagatgtcatattcagtaaaatggaaaaagtcagatgtgaaatttgaagatcgatttgacaaatatcttgatccgtccttttttcaacatcggattcattggttttcaattttcaactccttcatgatggtgatcttcttggtgggcttagtttcaatgattttaatgagaacattaagaaaagattatgctcggtacagtaaagaggaagaaatggatgatatggatagagacctaggagatgaatatggatggaaacaggtgcatggagatgtatttagaccatcaagtcacccactgatattttcctctctgattggttctggatgtcagatatttgctgtgtctctcatcgttattattgttgcaatgatagaagatttatatactgagaggggatcaatgctcagtacagccatatttgtctatgctgctacgtctccagtgaatggttattttggaggaagtctgtatgctagacaaggaggaaggagatggataaagcagatgtttattggggcattccttatcccagctatggtgtgtggcactgccttcttcatcaatttcatagccatttattaccatgcttcaagagccattccttttggaacaatggtggccgtttgttgcatctgtttttttgttattcttcctctaaatcttgttggtacaatacttggccgaaatctgtcaggtcagcccaactttccttgtcgtgtcaatgctgtgcctcgtcctataccggagaaaaaatggttcatggagcctgcggttattgtttgcctgggtggaattttaccttttggttcaatctttattgaaatgtatttcatcttcacgtctttctgggcatataagatctattatgtctatggcttcatgatgctggtgctggttatcctgtgcattgtgactgtctgtgtgactattgtgtgcacatattttctactaaatgcagaagattaccggtggcaatggacaagttttctctctgctgcatcaactgcaatctatgtttacatgtattccttttactactattttttcaaaacaaagatgtatggcttatttcaaacatcattttactttggatatatggcggtatttagcacagccttggggataatgtgtggagcgattggttacatgggaacaagtgcctttgtccgaaaaatctatactaatgtgaaaattgactagagacccaagaaaacctggaactttggatcaatttctttttcataggggtggaacttgcacagcaaaaacaaacaaacgcaagaagagatttgggctttaacacactgggtactttgtgggtctctctttcgtcggtggcttaaagtaacatctatttccattgatcctaggttcttcctgactgctttctccaactgttcacagcaaatgcttggattttatgcagtaggcattactacagtacatggctaatcttcccaaaaactagctcattaaagatgaaatagaccagctctcttcagtgaagaggacaaatagtttatttaaagcatttgttccaataaaataaatagagggaaacttggatgctaaaattacatgaataggaatcttcctggcacttagtgtttctatgttattgaaaaatgatgttccagaaagattacttttttcctcttatttttactgccattgtcgacctattgtgggacatttttatatattgaatctgggttcttttttgactttttttttttcccaatccaacagcatccttttttttaaaagagagaattagaaaatattaaatcctgcatgtaatatatctgctgtcatcttagttggaccaacttcccatttatttatcttaaaactatacagttacatcttaattccatccaaagaagatacagtttgaagacagaagtgtactctctacaatgcaatttactgtacagttagaaagcaaagtgttaaatggagaagatacttgtttttattaaacattttgagatttagataaactacattttaactgaatgtctaaagtgattatcttttttccccccaagttagtcttaaatcttttgggtttgaatgaaggttttacataagaaattattaaaaacaaggggggtgggtaataaatgtatataacattaaataatgtaacgtaggtgtagattcccaaatgcatttggatgtacagatcgactacagagtacttttttcttatgatgattggtgtagaaatgtgtgatttgggtgggcttttacatcttgcctaccattgcatgaaacattggggtttcttcaaaatgtgtgtgtcatacttcttttgggaggggggttgttttcttctgtttattttctgagactcctacaggagccaaatttgtaatttagagacacttaattttgttaatcctgtctgggacacttaagtaacatctaaagcattattgctttagaatgttcaaataaaatttcctgaccaaattgttttgtggaaatagatgtgtttgcaatttgaagatatctttctgtccagaaggcaaaattaccgaatgccatttttaaaagtatgctataaactatgctactctcatacaggggacccgtattttaaaatctccagacttgcttacatctagattatccagcacaatcataaagtgaatgacaaaccctttgaatgaaattgtggcacaaaatctgttcaggttggtgtaccgtgtaaagtggggatggggtaaaagtggttaacgtactgttggatcaacaaataaaggttacagttttgtaagagaagtgatttgaatacatttttctggaactattcataatatgaagttttcctagaaccactgagtttctagtttaatagtttgctatgcaaatgaccacctaaaacaatactttatattgttatttttagaaagactcaaaacacctgtatttaaaccttaatatgaaaatcatgcaattaatagttacacaagatgttttcattacaaaatatgtacctatctattgatggactctacatcctatattgtgacatgtaagtcctttaaaaggtgaaaagtatgatttcttaccacttaagtatgattgatatgatccaacaaatttgatcagaagctgtaggtaaatcctcttctgaagccaaaatggtatattaaatataatttattggtacttccattttctcttccttcttacttgcctttaagatcttataaaaaagaaactaaaagttaatatttagttgcctatattatgtaaccttttaactatatataaagtacttttttggtttctttctcaccacttttattcaaaagtacttttaacataccaatacatagtctgtctgatgggagtataaattggacagtaaggttttgtcttaataaaatgaaatttgtttctcatgatatgaatcttgcaggtaagatgtagggtttattgaaaatgtgtgggttaaatgctttcaggtacaccaattctttctactaaattgagctctatttgaagttctttggaatctgtggtgaaaaataattttctgatttccaaatacattaagagcattaaatgaatattaatcacctttaaagtcttttagaaaaggacttgtattggtttttggctgcatagaggggttgaataagtgtatgtatgtgtgtgcgtgtgtgtgtgtcttcttaaagaagatgtaattcacaaatagtttagctccctagcgctcagttgtagaatagaaaatagaacattattcaagttaattgaaaggtgaggtttttatacccccactaatgctgtgtatctgtctttcgtttgttaacattatttgcttaatttctttcaactcacactttggataatactatcaaaaactaaggctaaacattccttgtgtatctttaagcatgcttctcctgaaatttaactacattagtagttgacatttgtatacatatatcctaatacaagagtaggataaggtggaaatgtaatggcctgagggatggtgaagcattcttttagtatttttcatcatgttgggctcctagattgtactggggttgcccataaatcaaaccccatactcttagaattcattatattatggtgatatccgaacctagtgaatggtatgcttgggtgttttccattgagagtggatggacctctttataaagttggttgctgcaaaatccagttcttccaaaagccactttatttagggtttattcacaagtcatatccattttggtacagtgtttgtttcctaatatttattaaccaccttataccaaatgtcttgcaaagaaatgttattaaaaccttgaatttttacaaatgtaaaaaacaaaaagtgtattaatgtatttgttcaggaaaagctacataccgaagggcttttgtatatgaattctgtggtggggagacccatttgtaatctatatggcagttccatctgggttttaagtttagatttcaccgtgtcttagtgcttcattctattggtttattggaacatgtaataaataggagtagtgatgtattaaaacacaagtattcattaatgttttatatcttcactaaaattctatagttatgaaactatcaatcaaggtgttatatttcagtcagaagtgaaaatttatgaagagtatttggaagtgtgtacagaaataaactagacttacaggtaggctagatcagaacgttaacatatgaacctgcagaaatctggtaagacttaaattcagtgtgaggaataactctagttctctcctatgagcatttcctaaaagccatctgatttggcattcttactggagctgcagacagaaatctacaaagacaaaagtaaacaaaattaagttattattccactgttaggaatggaaataaacttgtgaagtctgtttattttgaagtattggtgaactaggcttgctaattgataactgcagcagtttgtgtttactccagttcatcagcttaggtcatttgaaagatataagagcttaaggcaagaaagaaataacatggaattctatttgaaggacaacagaacattcttggaaaagcagctccagttggtttttcaactgtcaaacttgaatgtgtaagtccccacagagcatggacagtcggtgcagagttccaaggaaacaattattgcctgatgaccacttccattttgtatacactctttggttcgtataggccatattccaactggctttttagtaatagaaatccagtatataatgtatcaaatacaattgaggttctaacctagtgtgttaatttatctgaatttggatttttaaaaagtaataaaaagttaaatgtac

SEQ ID NO: 7020 - protein, 589 aa, Homo sapiens
MRPLPGALGVAAAAALWLLLLLLPRTRADEHEHTYQDKEEVVLWMNTVGPYHNRQETYKYFSLPFCVGSKKSISHYHETLGEALQGVELEFSGLDIKFKDDVMPATYCEIDLDKEKRDAFVYAIKNHYWYQMYIDDLPIWGIVGEADENGEDYYLWTYKKLEIGFNGNRIVDVNLTSEGKVKLVPNTKIQMSYSVKWKKSDVKFEDRFDKYLDPSFFQHRIHWFSIFNSFMMVIFLVGLVSMILMRTLRKDYARYSKEEEMDDMDRDLGDEYGWKQVHGDVFRPSSHPLIFSSLIGSGCQIFAVSLIVIIVAMIEDLYTERGSMLSTAIFVYAATSPVNGYFGGSLYARQGGRRWIKQMFIGAFLIPAMVCGTAFFINFIAIYYHASRAIPFGTMVAVCCICFFVILPLNLVGTILGRNLSGQPNFPCRVNAVPRPIPEKKWFMEPAVIVCLGGILPFGSIFIEMYFIFTSFWAYKIYYVYGFMMLVLVILCIVTVCVTIVCTYFLLNAEDYRWQWTSFLSAASTAIYVYMYSFYYYFFKTKMYGLFQTSFYFGYMAVFSTALGIMCGAIGYMGTSAFVRKIYTNVKID

SEQ ID NO: 7021 - DNA, 3885 bp, Homo sapiens
cagccaggaaaaaagcttaagcattttggccaaggttacacaacccgaaacaccgggacgcggcccggaggcggcttcggccttgcggtccaggctaggccactgcgccggggcccagcctgctcggcgcccgcccgagtgctcggcaggcccgtagcgccgcggctcccaggagccgaggggcagccggcgcgcaggcggcggttgccgggccctccctcggcccggcggcggtggcggccccgcgtcgcgaggcacttccggcgcgtgccggggtggccggatgacgtggctgagtcagaggaagaggctgaggaggcgcggggggcgggggaggctcaggagcgggcggtgacggcgacggcggcggcagaggaggcagcggctgggccgggccccgtgcgtctgtccgcgccccgtggatgcgaatcggccgcggcggaggcggcggcggcggaggaggcggcggcgggaggaggagtcggtgagccggctccgggccggaggggcgcggaggatgaggccgctgcctggcgctcttggcgtggcggcggccgccgcgctgtggctgctgctgctgctgctgccccggacccgggcggacgagcacgaacacacgtatcaagataaagaggaagttgtcttatggatgaatactgttgggccctaccataatcgtcaagaaacatataagtacttttcacttccattctgtgtggggtcaaaaaaaagtatcagtcattaccatgaaactctgggagaagcacttcaaggggttgaattggaatttagtggtctggatattaaatttaaagatgatgtgatgccagccacttactgtgaaattgatttagataaagaaaagagagatgcatttgtatatgccataaaaaatcattactggtaccagatgtacatagatgatttaccaatatggggtattgttggtgaggctgatgaaaatggagaagattactatctttggacctataaaaaacttgaaataggttttaatggaaatcgaattgttgatgttaatctaactagtgaaggaaaggtgaaactggttccaaatactaaaatccagatgtcatattcagtaaaatggaaaaagtcagatgtgaaatttgaagatcgatttgacaaatatcttgatccgtccttttttcaacatcggattcattggttttcaattttcaactccttcatgatggtgatcttcttggtgggcttagtttcaatgattttaatgagaacattaagaaaagattatgctcggtacagtaaagaggaagaaatggatgatatggatagagacctaggagatgaatatggatggaaacaggtgcatggagatgtatttagaccatcaagtcacccactgatattttcctctctgattggttctggatgtcagatatttgctgtgtctctcatcgttattattgttgcaatgatagaagatttatatactgagaggggatcaatgctcagtacagccatatttgtctatgctgctacgtctccagtgaatggttattttggaggaagtctgtatgctagacaaggaggaaggagatggataaagcagatgtttattggggcattccttatcccagctatggtgtgtggcactgccttcttcatcaatttcatagccatttattaccatgcttcaagagccattccttttggaacaatggtggccgtttgttgcatctgtttttttgttattcttcctctaaatcttgttggtacaatacttggccgaaatctgtcaggtcagcccaactttccttgtcgtgtcaatgctgtgcctcgtcctataccggagaaaaaatggttcatggagcctgcggttattgtttgcctgggtggaattttaccttttggttcaatctttattgaaatgtatttcatcttcacgtctttctgggcatataagatctattatgtctatggcttcatgatgctggtgctggttatcctgtgcattgtgactgtctgtgtgactattgtgtgcacatattttctactaaatgcagaagattaccggtggcaatggacaagttttctctctgctgcatcaactgcaatctatgtttacatgtattccttttactactattttttcaaaacaaagatgtatggcttatttcaaacatcattttactttggatatatggcggtatttagcacagccttggggataatgtgtggagcgattggttacatgggaacaagtgcctttgtccgaaaaatctatactaatgtgaaaattgactagagacccaagaaaacctggaactttggatcaatttctttttcataggggtggaacttgcacagcaaaaacaaacaaacgcaagaagagatttgggctttaacacactgggtactttgtgggtctctctttcgtcggtggcttaaagtaacatctatttccattgatcctaggttcttcctgactgctttctccaactgttcacagcaaatgcttggattttatgcagtaggcattactacagtacatggctaatcttcccaaaaactagctcattaaagatgaaatagaccagctctcttcagtgaagaggacaaatagtttatttaaagcatttgttccaataaaataaatagagggaaacttggatgctaaaattacatgaataggaatcttcctggcacttagtgtttctatgttattgaaaaatgatgttccagaaagattacttttttcctcttatttttactgccattgtcgacctattgtgggacatttttatatattgaatctgggttcttttttgactttttttttttcccaatccaacagcatccttttttttaaaagagagaattagaaaatattaaatcctgcatgtaatatatctgctgtcatcttagttggaccaacttcccatttatttatcttaaaactatacagttacatcttaattccatccaaagaagatacagtttgaagacagaagtgtactctctacaatgcaatttactgtacagttagaaagcaaagtgttaaatggagaagatacttgtttttattaaacattttgagatttagataaactacattttaactgaatgtctaaagtgattatcttttttccccccaagttagtcttaaatcttttgggtttgaatgaaggttttacataagaaattattaaaaacaaggggggtgggtaataaatgtatataacattaaataatgtaacgtaggtgtagattcccaaatgcatttggatgtacagatcgactacagagtacttttttcttatgatgattggtgtagaaatgtgtgatttgggtgggcttttacatcttgcctaccattgcatgaaacattggggtttcttcaaaatgtgtgtgtcatacttcttttgggaggggggttgttttcttctgtttattttctgagactcctacaggagccaaatttgtaatttagagacacttaattttgttaatcctgtctgggacacttaagtaacatctaaagcattattgctttagaatgttcaaataaaatttcctgaccaaattgttttgtggaaatagatgtgtttgcaatttgaagatatctttctgtccagaaggcaaaattaccgaatgccatttttaaaagtatgctataaactatgctactctcatacaggggacccgtattttaaaatctccagacttgcttacatctagattatccagcacaatcataaagtgaatgacaaaccctttgaatgaaattgtggcacaaaatctgttcaggttggtgtaccgtgtaaagtggggatggggtaaaagtggttaacgtactgttggatcaacaaataaaggttacagttttgtaagagaagtgatttg

SEQ ID NO: 7022 - protein, 589 aa, Homo sapiens; identical to SEQ ID NO: 7020

SEQ ID NO: 7023 - DNA, 3576 bp, Homo sapiens
cagccaggaaaaaagcttaagcattttggccaaggttacacaacccgaaacaccgggacgcggcccggaggcggcttcggccttgcggtccaggctaggccactgcgccggggcccagcctgctcggcgcccgcccgagtgctcggcaggcccgtagcgccgcggctcccaggagccgaggggcagccggcgcgcaggcggcggttgccgggccctccctcggcccggcggcggtggcggccccgcgtcgcgaggcacttccggcgcgtgccggggtggccggatgacgtggctgagtcagaggaagaggctgaggaggcgcggggggcgggggaggctcaggagcgggcggtgacggcgacggcggcggcagaggaggcagcggctgggccgggccccgtgcgtctgtccgcgccccgtggatgcgaatcggccgcggcggaggcggcggcggcggaggaggcggcggcgggaggaggagtcggtgagccggctccgggccggaggggcgcggaggatgaggccgctgcctggcgctcttggcgtggcggcggccgccgcgctgtggctgctgctgctgctgctgccccggacccgggcggacgagcacgaacacacgtatcaagataaagaggaagttgtcttatggatgaatactgttgggccctaccataatcgtcaagaaacatataagtacttttcacttccattctgtgtggggtcaaaaaaaagtatcagtcattaccatgaaactctgggagaagcacttcaaggggttgaattggaatttagtggtctggatattaaatttaaagatgatgtgatgccagccacttactgtgaaattgatttagataaagaaaagagagatgcatttgtatatgccataaaaaatcattactggtaccagatgtacatagatgatttaccaatatggggtattgttggtgaggctgatgaaaatggagaagattactatctttggacctataaaaaacttgaaataggttttaatggaaatcgaattgttgatgttaatctaactagtgaaggaaaggtgaaactggttccaaatactaaaatccagatgtcatattcagtaaaatggaaaaagtcagatgtgaaatttgaagatcgatttgacaaatatcttgatccgtccttttttcaacatcggattcattggttttcaattttcaactccttcatgatggtgatcttcttggtgggcttagtttcaatgattttaatgagaacattaagaaaagattatgctcggtacagtaaagaggaagaaatggatgatatggatagagacctaggagatgaatatggatggaaacaggtgcatggagatgtatttagaccatcaagtcacccactgatattttcctctctgattggttctggatgtcagatatttgctgtgtctctcatcgttattattgttgcaatgatagaagatttatatactgagaggggatcaatgctcagtacagccatatttgtctatgctgctacgtctccagtgaatggttattttggaggaagtctgtatgctagacaaggaggaaggagatggataaagcagatgtttattggggcattccttatcccagctatggtgtgtggcactgccttcttcatcaatttcatagccatttattaccatgcttcaagagccattccttttggaacaatggtggccgtttgttgcatctgtttttttgttattcttcctctaaatcttgttggtacaatacttggccgaaatctgtcaggtcagcccaactttccttgtcgtgtcaatgctgtgcctcgtcctataccggagaaaaaatggttcatggagcctgcggttattgtttgcctgggtggaattttaccttttggttcaatctttattgaaatgtatttcatcttcacgtctttctgggcatataagatctattatgtctatggcttcatgatgctggtgctggttatcctgtgcattgtgactgtctgtgtgactattgtgtgcacatattttctactaaatgcagaagattaccggtggcaatggacaagttttctctctgctgcatcaactgcaatctatgtttacatgtattccttttactactattttttcaaaacaaagatgtatggcttatttcaaacatcattttactttggatatatggcggtatttagcacagccttggggataatgtgtggagcgattggttacatgggaacaagtgcctttgtccgaaaaatctatactaatgtgaaaattgactagagacccaagaaaacctggaactttggatcaatttctttttcataggggtggaacttgcacagcaaaaacaaacaaacgcaagaagagatttgggctttaacacactgggtactttgtgggtctctctttcgtcggtggcttaaagtaacatctatttccattgatcctaggttcttcctgactgctttctccaactgttcacagcaaatgcttggattttatgcagtaggcattactacagtacatggctaatcttcccaaaaactagctcattaaagatgaaatagaccagctctcttcagtgaagaggacaaatagtttatttaaagcatttgttccaataaaataaatagagggaaacttggatgctaaaattacatgaataggaatcttcctggcacttagtgtttctatgttattgaaaaatgatgttccagaaagattacttttttcctcttatttttactgccattgtcgacctattgtgggacatttttatatattgaatctgggttcttttttgactttttttttttcccaatccaacagcatccttttttttaaaagagagaattagaaaatattaaatcctgcatgtaatatatctgctgtcatcttagttggaccaacttcccatttatttatcttaaaactatacagttacatcttaattccatccaaagaagatacagtttgaagacagaagtgtactctctacaatgcaatttactgtacagttagaaagcaaagtgttaaatggagaagatacttgtttttattaaacattttgagatttagataaactacattttaactgaatgtctaaagtgattatcttttttccccccaagttagtcttaaatcttttgggtttgaatgaaggttttacataagaaattattaaaaacaaggggggtgggtaataaatgtatataacattaaataatgtaacgtaggtgtagattcccaaatgcatttggatgtacagatcgactacagagtacttttttcttatgatgattggtgtagaaatgtgtgatttgggtgggcttttacatcttgcctaccattgcatgaaacattggggtttcttcaaaatgtgtgtgtcatacttcttttgggaggggggttgttttcttctgtttattttctgagactcctacaggagccaaatttgtaatttagagacacttaattttgttaatcctgtctgggacacttaagtaacatctaaagcattattgctttagaatgttcaaataaaatttcctgaccaaattgttttgtgg

SEQ ID NO: 7024 - protein, 589 aa, Homo sapiens; identical to SEQ ID NO: 7020

SEQ ID NO: 7025 - DNA, 3104 bp, Homo sapiens
cagccaggaaaaaagcttaagcattttggccaaggttacacaacccgaaacaccgggacgcggcccggaggcggcttcggccttgcggtccaggctaggccactgcgccggggcccagcctgctcggcgcccgcccgagtgctcggcaggcccgtagcgccgcggctcccaggagccgaggggcagccggcgcgcaggcggcggttgccgggccctccctcggcccggcggcggtggcggccccgcgtcgcgaggcacttccggcgcgtgccggggtggccggatgacgtggctgagtcagaggaagaggctgaggaggcgcggggggcgggggaggctcaggagcgggcggtgacggcgacggcggcggcagaggaggcagcggctgggccgggccccgtgcgtctgtccgcgccccgtggatgcgaatcggccgcggcggaggcggcggcggcggaggaggcggcggcgggaggaggagtcggtgagccggctccgggccggaggggcgcggaggatgaggccgctgcctggcgctcttggcgtggcggcggccgccgcgctgtggctgctgctgctgctgctgccccggacccgggcggacgagcacgaacacacgtatcaagataaagaggaagttgtcttatggatgaatactgttgggccctaccataatcgtcaagaaacatataagtacttttcacttccattctgtgtggggtcaaaaaaaagtatcagtcattaccatgaaactctgggagaagcacttcaaggggttgaattggaatttagtggtctggatattaaatttaaagatgatgtgatgccagccacttactgtgaaattgatttagataaagaaaagagagatgcatttgtatatgccataaaaaatcattactggtaccagatgtacatagatgatttaccaatatggggtattgttggtgaggctgatgaaaatggagaagattactatctttggacctataaaaaacttgaaataggttttaatggaaatcgaattgttgatgttaatctaactagtgaaggaaaggtgaaactggttccaaatactaaaatccagatgtcatattcagtaaaatggaaaaagtcagatgtgaaatttgaagatcgatttgacaaatatcttgatccgtccttttttcaacatcggattcattggttttcaattttcaactccttcatgatggtgatcttcttggtgggcttagtttcaatgattttaatgagaacattaagaaaagattatgctcggtacagtaaagaggaagaaatggatgatatggatagagacctaggagatgaatatggatggaaacaggtgcatggagatgtatttagaccatcaagtcacccactgatattttcctctctgattggttctggatgtcagatatttgctgtgtctctcatcgttattattgttgcaatgatagaagatttatatactgagaggggatcaatgctcagtacagccatatttgtctatgctgctacgtctccagtgaatggttattttggaggaagtctgtatgctagacaaggaggaaggagatggataaagcagatgtttattggggcattccttatcccagctatggtgtgtggcactgccttcttcatcaatttcatagccatttattaccatgcttcaagagccattccttttggaacaatggtggccgtttgttgcatctgtttttttgttattcttcctctaaatcttgttggtacaatacttggccgaaatctgtcaggtcagcccaactttccttgtcgtgtcaatgctgtgcctcgtcctataccggagaaaaaatggttcatggagcctgcggttattgtttgcctgggtggaattttaccttttggttcaatctttattgaaatgtatttcatcttcacgtctttctgggcatataagatctattatgtctatggcttcatgatgctggtgctggttatcctgtgcattgtgactgtctgtgtgactattgtgtgcacatattttctactaaatgcagaagattaccggtggcaatggacaagttttctctctgctgcatcaactgcaatctatgtttacatgtattccttttactactattttttcaaaacaaagatgtatggcttatttcaaacatcattttactttggatatatggcggtatttagcacagccttggggataatgtgtggagcgattggttacatgggaacaagtgcctttgtccgaaaaatctatactaatgtgaaaattgactagagacccaagaaaacctggaactttggatcaatttctttttcataggggtggaacttgcacagcaaaaacaaacaaacgcaagaagagatttgggctttaacacactgggtactttgtgggtctctctttcgtcggtggcttaaagtaacatctatttccattgatcctaggttcttcctgactgctttctccaactgttcacagcaaatgcttggattttatgcagtaggcattactacagtacatggctaatcttcccaaaaactagctcattaaagatgaaatagaccagctctcttcagtgaagaggacaaatagtttatttaaagcatttgttccaataaaataaatagagggaaacttggatgctaaaattacatgaataggaatcttcctggcacttagtgtttctatgttattgaaaaatgatgttccagaaagattacttttttcctcttatttttactgccattgtcgacctattgtgggacatttttatatattgaatctgggttcttttttgactttttttttttcccaatccaacagcatccttttttttaaaagagagaattagaaaatattaaatcctgcatgtaatatatctgctgtcatcttagttggaccaacttcccatttatttatcttaaaactatacagttacatcttaattccatccaaagaagatacagtttgaagacagaagtgtactctctacaatgcaatttactgtacagttagaaagcaaagtgttaaatggagaagatacttgtttttattaaacattttgagatttagataaactacattttaactg

SEQ ID NO: 7026 - protein, 589 aa, Homo sapiens; identical to SEQ ID NO: 7020

SEQ ID NO: 7027 - DNA, 764 bp, Homo sapiens
aggagcgggcggtgacggcgacggcggcggcagaggaggcagcggctgggccgggccccgtgcgtctgtccgcgccccgtggatgcgaatcggccgcggcggaggcggcggcggcggaggaggcggcggcgggaggaggagtcggtgagccggctccgggccggaggggcgcggaggatgaggccgctgcctggcgctcttggcgtggcggcggccgccgcgctgtggctgctgctgctgctgctgccccggacccgggcggacgagcacgaacacacgtatcaagataaagaggaagttgtcttatggatgaatactgttgggccctaccataatcgtcaagaaacatataagtacttttcacttccattctgtgtggggtcaaaaaaaagtatcagtcattaccatgaaactctgggagaagcacttcaaggggttgaattggaatttagtggtctggatattaaatttaaaggtaagtaaaccttaatagtccttacaatgcaatttggattgtagacaagggtttcatattttggcactattgacactggtgttggataattctttgttgtatggagctgttatgtacatgttaggatgtctagcagagtccctggcctgtaccccccagatgccagtagcaccttccagttgtgaaaaccaaaaaagtcaccagacattgctaattgctgtcagttgagaaccactactttagactctaaaatgtgttttagtctgtaaatgaggtgtattgcatttag

SEQ ID NO: 7028 - protein, 101 aa, Homo sapiens
MRPLPGALGVAAAAALWLLLLLLPRTRADEHEHTYQDKEEVVLWMNTVGPYHNRQETYKYFSLPFCVGSKKSISHYHETLGEALQGVELEFSGLDIKFKGK

SEQ ID NO: 7029 - DNA, 3144 bp, Homo sapiens
agttaagaacagccagggctctagagctggcagcctgaatttacatctttattctgctatttgatgaccttgaccttgctgtgcctcatatgaaaggggaggactaggtgatataagctactgtaagcagcataactggaaaatcttaaacggctaagagacagcatcacccgaagacagagagagaagcaaaaatcaggaaagcagacagacttggagatcacggtcccaattcggcactcacagcacctgcctgcaaaagtggagtttggagtctatgagagtggccccaggaaaagtgtcattccccctaggacggagctgagacgaggagactggaaaacagacagcacctccagcacagcaagtagcacaagtaaccgctccagcacccggagcctcctcagtgtgagcagcgggatggaaggggacaacgaggataatgaagtccctgaggttaccagaagtcgcagtccaggccccccacaagtggatgggacacccaccatgtccctcgagagaccccccagggtgcctccgagagctgcctcacagaggcctccgaccagggagaccttccatcctcctccacctgttccacccagaggacgctgattccacctcctaaaacctgcctacttcaggactttaagactcacagtcttcagcctgttaatgatgtcttcatgttgagttttatagcatgactgttgaccttaagatccattctcattgctgataatgctgcagccctgctggtttgggcttgcctcgaagattttattaaggcacgaagaagtgaaaaactaagggcttcattcaccatcaccaagtatatcgaaccatatacttgtttgccaaaaggatgaagacttaatcgaaatacttacctctaatttgccatatcagaagcctaaaaagaatgatcataaatgtacttcaccagtgattttactgaaatgcacttatattagtctttatgtatttgctagttcagcctgatttctagaagaggttatagtgtgagacttgtagtattcaagtaagataagtgacctaattttaaaataattcttctacttttctgtatattcagcagggtatttaagtgctagggctggtcacacacaaccaactgaaaaagactagagggattagtacaaactcctcttatacagaaggcaaatctgaggttccacagaagtctggaaccaagactattcagttggttaaataaagaggttagtctagactgggcctgctcattctaggtcaccacattttccatctccaaatagccaggccctctctccctcaagaaatgcccagatgtagaaattcatcagtgcctattggtcttccagaattttccatcttccgtatctcccaggcatgagactaccaagtttgtttgttttctttccaatttgggaatttatacttcagtatggtttcaacgcagttatgtttccagagaacatctagaagtggctggaaaccagaagctggggattccagggaccccacttagtgctctatttcctttataggttttatttctggtcatagagagagaaggacctttgactttttcttcgttgaggcttctgaggaggaaaaacaaacctaaaatagaaatacagtcagcctttcaaatccatgggttctgtgtccgtggattcaaccaaccttggatcaaaaatatttgaaaaaaaatctacaaagtttcaaaaagcaaaacttgaatttgctgcatgccaagaagtatgttgaattcatgtaaatgaagtgatgtgtaggcattgtattagatattataagaaatctagaaatgatttaaagcatacaggaggatgtgcataggttatatgcaaatactatgctattttatatatgggacttgagcatttgtggattttgatactgggggatcctggaaccaatcccccatggataccaaagtacgactgtagttatctattttttacatacttattattaccaccatgctcagtaagtccatttttgcatggaatatggagccttaaaacatgtcatgaatttggagtccctggcacataaatctaccttcaaatcagaggtccttaatgatgcctaaacatacagtaaaattagaatcagaaatacttctttaaaaaatattcaaaatgtgtttgtttcccatgggattattctctatcccacacgaatgtaaaaaaatccacattaatgatccatttaagtatagttttattgggtccttttctaatgattaaaggttctttctcaatttcattcctcagtcctgcaagtaaggactcatactgaagagtactgaaacaaggacttcttgtcagaaacagcttctggaatcttgggttttgtttttgttttttgacaaaatacactattggccatgtccatcacgagagtgtttgtagtaattaattaccttgtacaggacctggcacttagtagcattcttcaaatgttccctcagtgatccttttactctccttgtcacttatttgggagaaataggggcacgtgagataagaagaagaataattttgatgttggtatgcttgccctgttacttatagacagtctttgtcataggcaaacttgaatttgatttaaaatagggctgggaaaaatattcaataactgtaagcccccttttggatgccaaacttagaattttgtacattctctgatgaacaagcatttagatcgtaacatggtaaagcctattaccagccaatgttgttagcatctttgtatgcacatcactgtttgtgcaatatatgaatattttgttgcattgtattcttatataaaaataagtagaaaacataaaattgaaattgctgatgagaagccttgtctcgtgaatgtgatacacttgagacacggatggaactgatcaggagtgccaagtcaaaagcagcagatcttaagccctcactggttgttcctttaacatccaaaatggttggttatatgtaaaagaagaaaatgaaataatctggatgaaacactgggactgtgttatcaaagaatgtctgtagtgatgaggtgaaaattttcattttccagaaacagaactgctcatttataacataaatatattcaacttccaca

SEQ ID NO: 7030 - protein, 64 aa, Homo sapiens
MEGDNEDNEVPEVTRSRSPGPPQVDGTPTMSLERPPRVPPRAASQRPPTRETFHPPPPVPPRGR

SEQ ID NO: 7031 - DNA, 5904 bp, Homo sapiens
ctctaaaattaaataaattaattaattagataaaaattaaataaattatttaattaattagagagatccaaggatactttagtgtggcactgtctgagagtcttgtactgatggtaaagggggagggaaagagatcagggtcccctacaatgctgtgcaaattggtcgtacaaaggaccttaattagtggaaagtgtccataaagcacataaaagtacaatctaaaaatggaggttgatgccaacaggatgaaagtaggtggcccagcactcagtctttacctaatgataacagcctttctgggctatttacttaccttatctatactagctaaactatactttgattcaacttttatttaaaaggtattttgcttgccattggggaacaacttggaagtcttatttttctaaacagttttaaaggaagtttgaggagctaagtgctcttttctcttgattaatttccttgtgctaaacagaaacactcagtattatcccattgaggattcttttgaaaagtagccatgacaccatctaagcatttgaaggcatcccccaaagggctctggtagtaggaaactggaactggttggcttgtgcattttgttttttcctccactgtgtctcccaataccattaaagagagccttgacaagggcagacctgggagaaggatgtgtgggtgtgtgcggacagataagtgaatggttgggcagaatgatagataaacgtctctgaggctttttcagtactcaccggtgcagccatttctcttttttcttcatgttatgtccctgagtcacaatgcccaaatggagtcctgctggagaaatttagatccaaatagccttgtatgaattgagtgaaacgtcaagttgcctcagtggccccatggtcgctgcgagtagctcattccccacagaactgaagtcacagcctgtagagagatgagggttggcttcatatttctccagaagctccaaagcagagaactgtgaatttgtaatgtagaagagaggttggcacaggaacaacccaagggtagccagctggaagccagcacctactttatacctgatgctgttgggcctgtgtcaggattccactgatgttccagtctcctggggcatttcatgcccatgggtccacaatcactgtgcctcatgctgcttagagacagtgagggatgagagtggggctaagagaagcatcctggctaaactcttccagtgtattctcttctgggtatggatttaagtctaaagcagtggttctcaattggaagtgattttgtaccccctccctaaagaacatttggcaatataagggaattttggttgtcacaactcaagaagggggtgctgctagcatttaatgggtagaagccagggatgctgctgaacatcctacaatacacaggacacacccacacagtaaggaattacctggcccaaaatgtcaatagtgccaaggttgagaaatacttgtctaaaggcgtctcaataattaaggcttggctgcttcttcaagaaaacaccaaatggtggatgatgctgatgcagtgggagggcctgggggtcctggaatggcaggctgcgatggcctccctggaggctttggcagtgacatcaggccaaggttgtggctgtggctggggccaaggctctggagctcatagaggtaagtctgagaacaaggagtcgacgcctatcactaagttaaaccatctggccaaagatgtgaagatcaagtcctgggagagctgtcttctctctgcccatcaaggtgtctgagatcattgaccttttcctggagtcgtctctcaagaatggggttctgaagattatgctggcacagaagttgacccatgctggccatttcaccaggttcaaggtgtttgttgcctttgaggactacaatggccatgttgtctgggtattaagcactccaagggggtagccactaccatccaacgggccatcatcccagccaagctctccattggacccgcacagagaggctacagggggaacaagatcagcaagccccacaccagcctttgcaacgtgacaggccactggctctgtgctggtgtgtgtgcctcatccctgcccccaggggcactaagcatcatcttggcctctgtgcccaagaagctgctgctgatggctgctacgccttggccagggaccgcactgccaccctgggccacctttgatgccatctctaagactgctagcaactggatccctgacctctggaaagagactgtattcaccaagtttccctaccaggaattcactgaccatctctcaagacccacaccagagtctctaagcagaagacgcaggttccagctgtggctacaacgtacggttttcttaccagaaaaatgaaatgaatgaagcctgttaaaaataataataatagttaagacttgggagagtcagcagatttcacgcctcccttaaatgttgcagccttgtctacttcagtgtgataggccttggaattattagctgcattcttctcccctgattttatgttgtatctcccccttcttggccacatgtaattgttcttttgagaagagtcctcttgagcctgtgaccagcctcattaaccgtacacttctggtgagtggtccccagtgggggagctgtcaagctgagttttgccatcctttccagggccgcccgtcagaccatggagggacaggccccagtcgagtatatatgacccttttgcgggaatgaaaacgccaggccagcggcagcttatcaccctccaggagcaggtgaagctgggcattgtcaacgtggatgaggctgtgctccacttcaaagagtggcagctcaaccagaagaaacgatcggagtcctttcgtttccagcaggaaaatcttaaacggctaagagacagcatcacccgaagacagagagagaagcaaaaatcaggaaagcagacagacttggagatcacggtcccaattcggcactcacagcacctgcctgcaaaagtggagtttggagtctatgagagtggccccaggaaaagtgtcattccccctaggacggagctgagacgaggagactggaaaacagacagcacctccagcacagcaagtagcacaagtaaccgctccagcacccggagcctcctcagtgtgagcagcgggatggaaggggacaacgaggataatgaagtccctgaggttaccagaagtcgcagtccaggccccccacaagtggatgggacacccaccatgtccctcgagagaccccccagggtgcctccgagagctgcctcacagaggcctccgaccagggagaccttccatcctcctccacctgttccacccagaggacgctgattccacctcctaaaacctgcctacttcaggactttaagactcacagtcttcagcctgttaatgatgtcttcatgttgagttttatagcatgactgttgaccttaagatccattctcattgctgataatgctgcagccctgctggtttgggcttgcctcgaagattttattaaggcacgaagaagtgaaaaactaagggcttcattcaccatcaccaagtatatcgaaccatatacttgtttgccaaaaggatgaagacttaatcgaaatacttacctctaatttgccatatcagaagcctaaaaagaatgatcataaatgtacttcaccagtgattttactgaaatgcacttatattagtctttatgtatttgctagttcagcctgatttctagaagaggttatagtgtgagacttgtagtattcaagtaagataagtgacctaattttaaaataattcttctacttttctgtatattcagcagggtatttaagtgctagggctggtcacacacaaccaactgaaaaagactagagggattagtacaaactcctcttatacagaaggcaaatctgaggttccacagaagtctggaaccaagactattcagttggttaaataaagaggttagtctagactgggcctgctcattctaggtcaccacattttccatctccaaatagccaggccctctctccctcaagaaatgcccagatgtagaaattcatcagtgcctattggtcttccagaattttccatcttccgtatctcccaggcatgagactaccaagtttgtttgttttctttccaatttgggaatttatacttcagtatggtttcaacgcagttatgtttccagagaacatctagaagtggctggaaaccagaagctggggattccagggaccccacttagtgctctatttcctttataggttttatttctggtcatagagagagaaggacctttgactttttcttcgttgaggcttctgaggaggaaaaacaaacctaaaatagaaatacagtcagcctttcaaatccatgggttctgtgtccgtggattcaaccaaccttggatcaaaaatatttgaaaaaaaatctacaaagtttcaaaaagcaaaacttgaatttgctgcatgccaagaagtatgttgaattcatgtaaatgaagtgatgtgtaggcattgtattagatattataagaaatctagaaatgatttaaagcatacaggaggatgtgcataggttatatgcaaatactatgctattttatatatgggacttgagcatttgtggattttgatactgggggatcctggaaccaatcccccatggataccaaagtacgactgtagttatctattttttacatacttattattaccaccatgctcagtaagtccatttttgcatggaatatggagccttaaaacatgtcatgaatttggagtccctggcacataaatctaccttcaaatcagaggtccttaatgatgcctaaacatacagtaaaattagaatcagaaatacttctttaaaaaatattcaaaatgtgtttgtttcccatgggattattctctatcccacacgaatgtaaaaaaatccacattaatgatccatttaagtatagttttattgggtccttttctaatgattaaaggttctttctcaatttcattcctcagtcctgcaagtaaggactcatactgaagagtactgaaacaaggacttcttgtcagaaacagcttctggaatcttgggttttgtttttgttttttgacaaaatacactattggccatgtccatcacgagagtgtttgtagtaattaattaccttgtacaggacctggcacttagtagcattcttcaaatgttccctcagtgatccttttactctccttgtcacttatttgggagaaataggggcacgtgagataagaagaagaataattttgatgttggtatgcttgccctgttacttatagacagtctttgtcataggcaaacttgaatttgatttaaaatagggctgggaaaaatattcaataactgtaagcccccttttggatgccaaacttagaattttgtacattctctgatgaacaagcatttagatcgtaacatggtaaagcctattaccagccaatgttgttagcatctttgtatgcacatcactgtttgtgcaatatatgaatattttgttgcattgtattcttatataaaaataagtagaaaacataaaattgaaattgctgatgagaagccttgtctcgtgaatgtgatacacttgagacacggatggaactgatcaggagtgccaagtcaaaagcagcagatcttaagccctcactggttgttcctttaacatccaaaatggttggttatatgtaaaagaagaaaatgaaataatctggatgaaacactgggactgtgttatcaaagaatgtctgtagtgatgaggtgaaaattttcattttccagaaacagaactgctcatttataacataaatatattcaacttccaca

SEQ ID NO: 7032 - protein, 206 aa, Homo sapiens [sequence omitted]

SEQ ID NO: 7033 - DNA, 4926 bp, Homo sapiens
agagcggcggccggtcccgcgcggagcccggcgcccctccagcccgagccaggacgccgccggccccggtcccggccccgggcacgcagcgagccagggatgtgagcggcgccccgcggcatggcagcctcaggggtgcccagaggatgcgacatcctcatcgtctacagcccggatgccgaggaatggtgccagtacctgcagaccctgttcctgtccagtcggcaggtccgcagccagaagatactgactcacaggctgggccccgaggcctccttctcggcagaggacctaagccttttcctcagcacccgctgtgtcgtggtgctgctgtccgcggagctggtgcagcacttccacaagcccgccttgctgcccctgctgcagagagctttccatcctccgcaccgcgtggtcaggctgctctgcggcgtgcgggacagcgaggagttcctagacttctttccagattgggcccattggcaggagctcacctgtgacgatgagccagagacctacgtggcagctgtgaaaaaagccatttccgaagattctggctgtgactcagtcactgacactgagcctgaggacgagaaggttgtttcctactcgaagcagcagaacctgccgacggtgacttcacctgggaacctgatggtggtgcagccggaccgcattcgctgtggggcagaaaccactgtctatgttattgtgagatgtaagctggatgacagggtggcgacagaagcagagttttctcctgaggattctccctctgtaaggatggaagccaaggtggagaatgagtacaccatttcagtgaaggctcccaacctttcatctgggaacgtttctctgaagatatattctggagacttagtggtgtgtgaaaccgttatcagctattatactgacatggaagaaattgggaatttattgtccaatgccgcgaatcctgtggaattcatgtgtcaggcctttaaaattgtgccctacaacacagagacccttgataaactgctaaccgaatccctgaagaacaatatccctgcaagcggactgcacctctttggaatcaaccagctggaagaagaagatatgatgacaaatcagagggatgaagagctgcccaccctgttgcattttgctgcgaagtatggactgaagaacctcactgccttgttgctcacctgcccaggagccctgcaggcgtacagcgtggccaacaagcatggccactaccccaacaccatcgctgagaaacacggcttcagggacctgcggcagttcatcgacgagtatgtggaaacggtggacatgctcaagagtcacattaaagaggaactgatgcacggggaggaggctgatgctgtgtacgagtccatggcccacctttccacagacctgcttatgaaatgctcgctcaaccccggctgtgacgaggatctctatgagtccatggctgcctttgtcccagctgccactgaagacctctatgttgaaatgcttcaggccagtacatctaacccaatccctggagatggtttctctcgggccactaaggactctatgatccgcaagtttttagaaggcaacagcatgggaatgaccaatctggagagagatcagtgccatcttggtcaggaagaagatgtttatcacacggtggatgacgatgaggccttttctgtggacctggccagcaggccccctgtcccagtgcccagaccagagaccactgctcctggtgctcaccagctgcctgacaacgaaccatacatttttaaagtttttgcagaaaaaagtcaagagcggcctgggaatttctacgtttcctcagagagcatcaggaaagggccgcccgtcagaccatggagggacaggccccagtcgagtatatatgacccttttgcgggaatgaaaacgccaggccagcggcagcttatcaccctccaggagcaggtgaagctgggcattgtcaacgtggatgaggctgtgctccacttcaaagagtggcagctcaaccagaagaaacgatcggagtcctttcgtttccagcaggaaaatcttaaacggctaagagacagcatcacccgaagacagagagagaagcaaaaatcaggaaagcagacagacttggagatcacggtcccaattcggcactcacagcacctgcctgcaaaagtggagtttggagtctatgagagtggccccaggaaaagtgtcattccccctaggacggagctgagacgaggagactggaaaacagacagcacctccagcacagcaagtagcacaagtaaccgctccagcacccggagcctcctcagtgtgagcagcgggatggaaggggacaacgaggataatgaagtccctgaggttaccagaagtcgcagtccaggccccccacaagtggatgggacacccaccatgtccctcgagagaccccccagggtgcctccgagagctgcctcacagaggcctccgaccagggagaccttccatcctcctccacctgttccacccagaggacgctgattccacctcctaaaacctgcctacttcaggactttaagactcacagtcttcagcctgttaatgatgtcttcatgttgagttttatagcatgactgttgaccttaagatccattctcattgctgataatgctgcagccctgctggtttgggcttgcctcgaagattttattaaggcacgaagaagtgaaaaactaagggcttcattcaccatcaccaagtatatcgaaccatatacttgtttgccaaaaggatgaagacttaatcgaaatacttacctctaatttgccatatcagaagcctaaaaagaatgatcataaatgtacttcaccagtgattttactgaaatgcacttatattagtctttatgtatttgctagttcagcctgatttctagaagaggttatagtgtgagacttgtagtattcaagtaagataagtgacctaattttaaaataattcttctacttttctgtatattcagcagggtatttaagtgctagggctggtcacacacaaccaccacattttccatctccaaatagccaggccctctctccctcaagaaatgcccagatgtagaaattcatcagtgcctattggtcttccagaattttccatcttccgtatctcccaggcatgagactaccaagtttgtttgttttctttccaatttgggaatttatacttcagtatggtttcaacgcagttatgtttccagagaacatctagaagtggctggaaaccagaagctggggattccagggaccccacttagtgctctatttcctttataggttttatttctggtcatagagagagaaggacctttgactttttcttcgttgaggcttctgaggaggaaaaacaaacctaaaatagaaatacagtcagcctttcaaatccatgggttctgtgtccgtggattcaaccaaccttggatcaaaaatatttgaaaaaaaatctacaaagtttcaaaaagcaaaacttgaatttgctgcatgccaagaagtatgttgaattcatgtaaatgaagtgatgtgtaggcattgtattagatattataagaaatctagaaatgatttaaagcatacaggaggatgtgcataggttatatgcaaatactatgctattttatatatgggacttgagcatttgtggattttgatactgggggatcctggaaccaatcccccatggataccaaagtacgactgtagttatctattttttacatacttattattaccaccatgctcagtaagtccatttttgcatggaatatggagccttaaaacatgtcatgaatttggagtccctggcacataaatctaccttcaaatcagaggtccttaatgatgcctaaacatacagtaaaattagaatcagaaatacttctttaaaaaatattcaaaatgtgtttgtttcccatgggattattctctatcccacacgaatgtaaaaaaatccacattaatgatccatttaagtatagttttattgggtccttttctaatgattaaaggttctttctcaatttcattcctcagtcctgcaagtaaggactcatactgaagagtactgaaacaaggacttcttgtcagaaacagcttctggaatcttgggttttgtttttgttttttgacaaaatacactattggccatgtccatcacgagagtgtttgtagtaattaattaccttgtacaggacctggcacttagtagcattcttcaaatgttccctcagtgatccttttactctccttgtcacttatttgggagaaataggggcacgtgagataagaagaagaataattttgatgttggtatgcttgccctgttacttatagacagtctttgtcataggcaaacttgaatttgatttaaaatagggctgggaaaaatattcaataactgtaagcccccttttggatgccaaacttagaattttgtacattctctgatgaacaagcatttagatcgtaacatggtaaagcctattaccagccaatgttgttagcatctttgtatgcacatcactgtttgtgcaatatatgaatattttgttgcattgtattcttatataaaaataagtagaaaacataaaattgaaattgctgatgagaagccttgtctcgtgaatgtgatacacttgagacacggatggaactgatcaggagtgccaagtcaaaagcagcagatcttaagccctcactggttgttcctttaacatccaaaatggttggttatatgtaaaagaagaaaatgaaataatctggatgaaacactgggactgtgttatcaaagaatgtctgtagtgatgaggtgaaaattttcattttccagaaacagaactgctcatttataacataaatatattcaacttccaca

SEQ ID NO: 7034 - protein, 805 aa, Homo sapiens; identical to SEQ ID NO: 970

SEQ ID NO: 7035 - DNA, 2878 bp, Homo sapiens
agttaagaacagccagggctctagagctggcagcctgaatttacatctttattctgctatttgatgaccttgaccttgctgtgcctcatatgaaaggggaggactaggtgatataagctactgtaagcagcataactggaaaatcttaaacggctaagagacagcatcacccgaagacagagagagaagcaaaaatcaggaaagcagacagacttggagatcacggtcccaattcggcactcacagcacctgcctgcaaaagtggagtttggagtctatgagagtggccccaggaaaagtgtcattccccctaggacggagctgagacgaggagactggaaaacagacagcacctccagcacagcaagtagcacaagtaaccgctccagcacccggagcctcctcagtgtgagcagcgggatggaaggggacaacgaggataatgaagtccctgaggttaccagaagtcgcagtccaggccccccacaagtggatgggacacccaccatgtccctcgagagaccccccagggtgcctccgagagctgcctcacagaggcctccgaccagggagaccttccatcctcctccacctgttccacccagaggacgctgattccacctcctaaaacctgcctacttcaggactttaagactcacagtcttcagcctgttaatgatgtcttcatgttgagttttatagcatgactgttgaccttaagatccattctcattgctgataatgctgcagccctgctggtttgggcttgcctcgaagattttattaaggcacgaagaagtgaaaaactaagggcttcattcaccatcaccaagtatatcgaaccatatacttgtttgccaaaaggatgaagacttaatcgaaatacttacctctaatttgccatatcagaagcctaaaaagaatgatcataaatgtacttcaccagtgattttactgaaatgcacttatattagtctttatgtatttgctagttcagcctgatttctagaagaggttatagtgtgagacttgtagtattcaagtaagataagtgacctaattttaaaataattcttctacttttctgtatattcagcagggtatttaagtgctagggctggtcacacacaaccaactgaaaaagactagagggattagtacaaactcctcttatacagaaggcaaatctgaggttccacagaagtctggaaccaagactattcagttggttaaataaagaggttagtctagactgggcctgctcattctaggtcaccacattttccatctccaaatagccaggccctctctccctcaagaaatgcccagatgtagaaattcatcagtgcctattggtcttccagaattttccatcttccgtatctcccaggcatgagactaccaagtttgtttgttttctttccaatttgggaatttatacttcagtatggtttcaacgcagttatgtttccagagaacatctagaagtggctggaaaccagaagctggggattccagggaccccacttagtgctctatttcctttataggttttatttctggtcatagagagagaaggacctttgactttttcttcgttgaggcttctgaggaggaaaaacaaacctaaaatagaaatacagtcagcctttcaaatccatgggttctgtgtccgtggattcaaccaaccttggatcaaaaatatttgaaaaaaaatctacaaagtttcaaaaagcaaaacttgaatttgctgcatgccaagaagtatgttgaattcatgtaaatgaagtgatgtgtaggcattgtattagatattataagaaatctagaaatgatttaaagcatacaggaggatgtgcataggttatatgcaaatactatgctattttatatatgggacttgagcatttgtggattttgatactgggggatcctggaaccaatcccccatggataccaaagtacgactgtagttatctattttttacatacttattattaccaccatgctcagtaagtccatttttgcatggaatatggagccttaaaacatgtcatgaatttggagtccctggcacataaatctaccttcaaatcagaggtccttaatgatgcctaaacatacagtaaaattagaatcagaaatacttctttaaaaaatattcaaaatgtgtttgtttcccatgggattattctctatcccacacgaatgtaaaaaaatccacattaatgatccatttaagtatagttttattgggtccttttctaatgattaaaggttctttctcaatttcattcctcagtcctgcaagtaaggactcatactgaagagtactgaaacaaggacttcttgtcagaaacagcttctggaatcttgggttttgtttttgttttttgacaaaatacactattggccatgtccatcacgagagtgtttgtagtaattaattaccttgtacaggacctggcacttagtagcattcttcaaatgttccctcagtgatccttttactctccttgtcacttatttgggagaaataggggcacgtgagataagaagaagaataattttgatgttggtatgcttgccctgttacttatagacagtctttgtcataggcaaacttgaatttgatttaaaatagggctgggaaaaatattcaataactgtaagcccccttttggatgccaaacttagaattttgtacattctctgatgaacaagcatttagatcgtaacatggtaaagcctattaccagccaatgttgttagcatctttgtatgcacatcactgtttgtgcaatatatgaatattttgttgcattgtattcttatataaaaataagtagaaaacataaaattgaaattgctgatgag

SEQ ID NO: 7036 - protein, 64 aa, Homo sapiens; identical to SEQ ID NO: 7030

SEQ ID NO: 7037 - DNA, 5638 bp, Homo sapiens
ctctaaaattaaataaattaattaattagataaaaattaaataaattatttaattaattagagagatccaaggatactttagtgtggcactgtctgagagtcttgtactgatggtaaagggggagggaaagagatcagggtcccctacaatgctgtgcaaattggtcgtacaaaggaccttaattagtggaaagtgtccataaagcacataaaagtacaatctaaaaatggaggttgatgccaacaggatgaaagtaggtggcccagcactcagtctttacctaatgataacagcctttctgggctatttacttaccttatctatactagctaaactatactttgattcaacttttatttaaaaggtattttgcttgccattggggaacaacttggaagtcttatttttctaaacagttttaaaggaagtttgaggagctaagtgctcttttctcttgattaatttccttgtgctaaacagaaacactcagtattatcccattgaggattcttttgaaaagtagccatgacaccatctaagcatttgaaggcatcccccaaagggctctggtagtaggaaactggaactggttggcttgtgcattttgttttttcctccactgtgtctcccaataccattaaagagagccttgacaagggcagacctgggagaaggatgtgtgggtgtgtgcggacagataagtgaatggttgggcagaatgatagataaacgtctctgaggctttttcagtactcaccggtgcagccatttctcttttttcttcatgttatgtccctgagtcacaatgcccaaatggagtcctgctggagaaatttagatccaaatagccttgtatgaattgagtgaaacgtcaagttgcctcagtggccccatggtcgctgcgagtagctcattccccacagaactgaagtcacagcctgtagagagatgagggttggcttcatatttctccagaagctccaaagcagagaactgtgaatttgtaatgtagaagagaggttggcacaggaacaacccaagggtagccagctggaagccagcacctactttatacctgatgctgttgggcctgtgtcaggattccactgatgttccagtctcctggggcatttcatgcccatgggtccacaatcactgtgcctcatgctgcttagagacagtgagggatgagagtggggctaagagaagcatcctggctaaactcttccagtgtattctcttctgggtatggatttaagtctaaagcagtggttctcaattggaagtgattttgtaccccctccctaaagaacatttggcaatataagggaattttggttgtcacaactcaagaagggggtgctgctagcatttaatgggtagaagccagggatgctgctgaacatcctacaatacacaggacacacccacacagtaaggaattacctggcccaaaatgtcaatagtgccaaggttgagaaatacttgtctaaaggcgtctcaataattaaggcttggctgcttcttcaagaaaacaccaaatggtggatgatgctgatgcagtgggagggcctgggggtcctggaatggcaggctgcgatggcctccctggaggctttggcagtgacatcaggccaaggttgtggctgtggctggggccaaggctctggagctcatagaggtaagtctgagaacaaggagtcgacgcctatcactaagttaaaccatctggccaaagatgtgaagatcaagtcctgggagagctgtcttctctctgcccatcaaggtgtctgagatcattgaccttttcctggagtcgtctctcaagaatggggttctgaagattatgctggcacagaagttgacccatgctggccatttcaccaggttcaaggtgtttgttgcctttgaggactacaatggccatgttgtctgggtattaagcactccaagggggtagccactaccatccaacgggccatcatcccagccaagctctccattggacccgcacagagaggctacagggggaacaagatcagcaagccccacaccagcctttgcaacgtgacaggccactggctctgtgctggtgtgtgtgcctcatccctgcccccaggggcactaagcatcatcttggcctctgtgcccaagaagctgctgctgatggctgctacgccttggccagggaccgcactgccaccctgggccacctttgatgccatctctaagactgctagcaactggatccctgacctctggaaagagactgtattcaccaagtttccctaccaggaattcactgaccatctctcaagacccacaccagagtctctaagcagaagacgcaggttccagctgtggctacaacgtacggttttcttaccagaaaaatgaaatgaatgaagcctgttaaaaataataataatagttaagacttgggagagtcagcagatttcacgcctcccttaaatgttgcagccttgtctacttcagtgtgataggccttggaattattagctgcattcttctcccctgattttatgttgtatctcccccttcttggccacatgtaattgttcttttgagaagagtcctcttgagcctgtgaccagcctcattaaccgtacacttctggtgagtggtccccagtgggggagctgtcaagctgagttttgccatcctttccagggccgcccgtcagaccatggagggacaggccccagtcgagtatatatgacccttttgcgggaatgaaaacgccaggccagcggcagcttatcaccctccaggagcaggtgaagctgggcattgtcaacgtggatgaggctgtgctccacttcaaagagtggcagctcaaccagaagaaacgatcggagtcctttcgtttccagcaggaaaatcttaaacggctaagagacagcatcacccgaagacagagagagaagcaaaaatcaggaaagcagacagacttggagatcacggtcccaattcggcactcacagcacctgcctgcaaaagtggagtttggagtctatgagagtggccccaggaaaagtgtcattccccctaggacggagctgagacgaggagactggaaaacagacagcacctccagcacagcaagtagcacaagtaaccgctccagcacccggagcctcctcagtgtgagcagcgggatggaaggggacaacgaggataatgaagtccctgaggttaccagaagtcgcagtccaggccccccacaagtggatgggacacccaccatgtccctcgagagaccccccagggtgcctccgagagctgcctcacagaggcctccgaccagggagaccttccatcctcctccacctgttccacccagaggacgctgattccacctcctaaaacctgcctacttcaggactttaagactcacagtcttcagcctgttaatgatgtcttcatgttgagttttatagcatgactgttgaccttaagatccattctcattgctgataatgctgcagccctgctggtttgggcttgcctcgaagattttattaaggcacgaagaagtgaaaaactaagggcttcattcaccatcaccaagtatatcgaaccatatacttgtttgccaaaaggatgaagacttaatcgaaatacttacctctaatttgccatatcagaagcctaaaaagaatgatcataaatgtacttcaccagtgattttactgaaatgcacttatattagtctttatgtatttgctagttcagcctgatttctagaagaggttatagtgtgagacttgtagtattcaagtaagataagtgacctaattttaaaataattcttctacttttctgtatattcagcagggtatttaagtgctagggctggtcacacacaaccaactgaaaaagactagagggattagtacaaactcctcttatacagaaggcaaatctgaggttccacagaagtctggaaccaagactattcagttggttaaataaagaggttagtctagactgggcctgctcattctaggtcaccacattttccatctccaaatagccaggccctctctccctcaagaaatgcccagatgtagaaattcatcagtgcctattggtcttccagaattttccatcttccgtatctcccaggcatgagactaccaagtttgtttgttttctttccaatttgggaatttatacttcagtatggtttcaacgcagttatgtttccagagaacatctagaagtggctggaaaccagaagctggggattccagggaccccacttagtgctctatttcctttataggttttatttctggtcatagagagagaaggacctttgactttttcttcgttgaggcttctgaggaggaaaaacaaacctaaaatagaaatacagtcagcctttcaaatccatgggttctgtgtccgtggattcaaccaaccttggatcaaaaatatttgaaaaaaaatctacaaagtttcaaaaagcaaaacttgaatttgctgcatgccaagaagtatgttgaattcatgtaaatgaagtgatgtgtaggcattgtattagatattataagaaatctagaaatgatttaaagcatacaggaggatgtgcataggttatatgcaaatactatgctattttatatatgggacttgagcatttgtggattttgatactgggggatcctggaaccaatcccccatggataccaaagtacgactgtagttatctattttttacatacttattattaccaccatgctcagtaagtccatttttgcatggaatatggagccttaaaacatgtcatgaatttggagtccctggcacataaatctaccttcaaatcagaggtccttaatgatgcctaaacatacagtaaaattagaatcagaaatacttctttaaaaaatattcaaaatgtgtttgtttcccatgggattattctctatcccacacgaatgtaaaaaaatccacattaatgatccatttaagtatagttttattgggtccttttctaatgattaaaggttctttctcaatttcattcctcagtcctgcaagtaaggactcatactgaagagtactgaaacaaggacttcttgtcagaaacagcttctggaatcttgggttttgtttttgttttttgacaaaatacactattggccatgtccatcacgagagtgtttgtagtaattaattaccttgtacaggacctggcacttagtagcattcttcaaatgttccctcagtgatccttttactctccttgtcacttatttgggagaaataggggcacgtgagataagaagaagaataattttgatgttggtatgcttgccctgttacttatagacagtctttgtcataggcaaacttgaatttgatttaaaatagggctgggaaaaatattcaataactgtaagcccccttttggatgccaaacttagaattttgtacattctctgatgaacaagcatttagatcgtaacatggtaaagcctattaccagccaatgttgttagcatctttgtatgcacatcactgtttgtgcaatatatgaatattttgttgcattgtattcttatataaaaataagtagaaaacataaaattgaaattgctgatgag

SEQ ID NO: 7038 - protein, 206 aa, Homo sapiens [sequence omitted]

SEQ ID NO: 7039 - DNA, 4660 bp, Homo sapiens
agagcggcggccggtcccgcgcggagcccggcgcccctccagcccgagccaggacgccgccggccccggtcccggccccgggcacgcagcgagccagggatgtgagcggcgccccgcggcatggcagcctcaggggtgcccagaggatgcgacatcctcatcgtctacagcccggatgccgaggaatggtgccagtacctgcagaccctgttcctgtccagtcggcaggtccgcagccagaagatactgactcacaggctgggccccgaggcctccttctcggcagaggacctaagccttttcctcagcacccgctgtgtcgtggtgctgctgtccgcggagctggtgcagcacttccacaagcccgccttgctgcccctgctgcagagagctttccatcctccgcaccgcgtggtcaggctgctctgcggcgtgcgggacagcgaggagttcctagacttctttccagattgggcccattggcaggagctcacctgtgacgatgagccagagacctacgtggcagctgtgaaaaaagccatttccgaagattctggctgtgactcagtcactgacactgagcctgaggacgagaaggttgtttcctactcgaagcagcagaacctgccgacggtgacttcacctgggaacctgatggtggtgcagccggaccgcattcgctgtggggcagaaaccactgtctatgttattgtgagatgtaagctggatgacagggtggcgacagaagcagagttttctcctgaggattctccctctgtaaggatggaagccaaggtggagaatgagtacaccatttcagtgaaggctcccaacctttcatctgggaacgtttctctgaagatatattctggagacttagtggtgtgtgaaaccgttatcagctattatactgacatggaagaaattgggaatttattgtccaatgccgcgaatcctgtggaattcatgtgtcaggcctttaaaattgtgccctacaacacagagacccttgataaactgctaaccgaatccctgaagaacaatatccctgcaagcggactgcacctctttggaatcaaccagctggaagaagaagatatgatgacaaatcagagggatgaagagctgcccaccctgttgcattttgctgcgaagtatggactgaagaacctcactgccttgttgctcacctgcccaggagccctgcaggcgtacagcgtggccaacaagcatggccactaccccaacaccatcgctgagaaacacggcttcagggacctgcggcagttcatcgacgagtatgtggaaacggtggacatgctcaagagtcacattaaagaggaactgatgcacggggaggaggctgatgctgtgtacgagtccatggcccacctttccacagacctgcttatgaaatgctcgctcaaccccggctgtgacgaggatctctatgagtccatggctgcctttgtcccagctgccactgaagacctctatgttgaaatgcttcaggccagtacatctaacccaatccctggagatggtttctctcgggccactaaggactctatgatccgcaagtttttagaaggcaacagcatgggaatgaccaatctggagagagatcagtgccatcttggtcaggaagaagatgtttatcacacggtggatgacgatgaggccttttctgtggacctggccagcaggccccctgtcccagtgcccagaccagagaccactgctcctggtgctcaccagctgcctgacaacgaaccatacatttttaaagtttttgcagaaaaaagtcaagagcggcctgggaatttctacgtttcctcagagagcatcaggaaagggccgcccgtcagaccatggagggacaggccccagtcgagtatatatgacccttttgcgggaatgaaaacgccaggccagcggcagcttatcaccctccaggagcaggtgaagctgggcattgtcaacgtggatgaggctgtgctccacttcaaagagtggcagctcaaccagaagaaacgatcggagtcctttcgtttccagcaggaaaatcttaaacggctaagagacagcatcacccgaagacagagagagaagcaaaaatcaggaaagcagacagacttggagatcacggtcccaattcggcactcacagcacctgcctgcaaaagtggagtttggagtctatgagagtggccccaggaaaagtgtcattccccctaggacggagctgagacgaggagactggaaaacagacagcacctccagcacagcaagtagcacaagtaaccgctccagcacccggagcctcctcagtgtgagcagcgggatggaaggggacaacgaggataatgaagtccctgaggttaccagaagtcgcagtccaggccccccacaagtggatgggacacccaccatgtccctcgagagaccccccagggtgcctccgagagctgcctcacagaggcctccgaccagggagaccttccatcctcctccacctgttccacccagaggacgctgattccacctcctaaaacctgcctacttcaggactttaagactcacagtcttcagcctgttaatgatgtcttcatgttgagttttatagcatgactgttgaccttaagatccattctcattgctgataatgctgcagccctgctggtttgggcttgcctcgaagattttattaaggcacgaagaagtgaaaaactaagggcttcattcaccatcaccaagtatatcgaaccatatacttgtttgccaaaaggatgaagacttaatcgaaatacttacctctaatttgccatatcagaagcctaaaaagaatgatcataaatgtacttcaccagtgattttactgaaatgcacttatattagtctttatgtatttgctagttcagcctgatttctagaagaggttatagtgtgagacttgtagtattcaagtaagataagtgacctaattttaaaataattcttctacttttctgtatattcagcagggtatttaagtgctagggctggtcacacacaaccaccacattttccatctccaaatagccaggccctctctccctcaagaaatgcccagatgtagaaattcatcagtgcctattggtcttccagaattttccatcttccgtatctcccaggcatgagactaccaagtttgtttgttttctttccaatttgggaatttatacttcagtatggtttcaacgcagttatgtttccagagaacatctagaagtggctggaaaccagaagctggggattccagggaccccacttagtgctctatttcctttataggttttatttctggtcatagagagagaaggacctttgactttttcttcgttgaggcttctgaggaggaaaaacaaacctaaaatagaaatacagtcagcctttcaaatccatgggttctgtgtccgtggattcaaccaaccttggatcaaaaatatttgaaaaaaaatctacaaagtttcaaaaagcaaaacttgaatttgctgcatgccaagaagtatgttgaattcatgtaaatgaagtgatgtgtaggcattgtattagatattataagaaatctagaaatgatttaaagcatacaggaggatgtgcataggttatatgcaaatactatgctattttatatatgggacttgagcatttgtggattttgatactgggggatcctggaaccaatcccccatggataccaaagtacgactgtagttatctattttttacatacttattattaccaccatgctcagtaagtccatttttgcatggaatatggagccttaaaacatgtcatgaatttggagtccctggcacataaatctaccttcaaatcagaggtccttaatgatgcctaaacatacagtaaaattagaatcagaaatacttctttaaaaaatattcaaaatgtgtttgtttcccatgggattattctctatcccacacgaatgtaaaaaaatccacattaatgatccatttaagtatagttttattgggtccttttctaatgattaaaggttctttctcaatttcattcctcagtcctgcaagtaaggactcatactgaagagtactgaaacaaggacttcttgtcagaaacagcttctggaatcttgggttttgtttttgttttttgacaaaatacactattggccatgtccatcacgagagtgtttgtagtaattaattaccttgtacaggacctggcacttagtagcattcttcaaatgttccctcagtgatccttttactctccttgtcacttatttgggagaaataggggcacgtgagataagaagaagaataattttgatgttggtatgcttgccctgttacttatagacagtctttgtcataggcaaacttgaatttgatttaaaatagggctgggaaaaatattcaataactgtaagcccccttttggatgccaaacttagaattttgtacattctctgatgaacaagcatttagatcgtaacatggtaaagcctattaccagccaatgttgttagcatctttgtatgcacatcactgtttgtgcaatatatgaatattttgttgcattgtattcttatataaaaataagtagaaaacataaaattgaaattgctgatgag

SEQ ID NO: 7040 - protein, 805 aa, Homo sapiens; identical to SEQ ID NO: 970

SEQ ID NO: 7041 - DNA, 4809 bp, Homo sapiens
gaagcgccagagcggcggccggtcccgcgcggagcccggcgcccctccagcccgagccaggacgccgccggccccggtcccggccccgggcacgcagcgagccagggatgtgagcggcgccccgcggcatggcagcctcaggggtgcccagaggatgcgacatcctcatcgtctacagcccggatgccgaggaatggtgccagtacctgcagaccctgttcctgtccagtcggcaggtccgcagccagaagatactgactcacaggctgggccccgaggcctccttctcggcagaggacctaagccttttcctcagcacccgctgtgtcgtggtgctgctgtccgcggagctggtgcagcacttccacaagcccgccttgctgcccctgctgcagagagctttccatcctccgcaccgcgtggtcaggctgctctgcggcgtgcgggacagcgaggagttcctagacttctttccagattgggcccattggcaggagctcacctgtgacgatgagccagagacctacgtggcagctgtgaaaaaagccatttccgaagattctggctgtgactcagtcactgacactgagcctgaggacgagaaggttgtttcctactcgaagcagcagaacctgccgacggtgacttcacctgggaacctgatggtggtgcagccggaccgcattcgctgtggggcagaaaccactgtctatgttattgtgagatgtaagctggatgacagggtggcgacagaagcagagttttctcctgaggattctccctctgtaaggatggaagccaaggtggagaatgagtacaccatttcagtgaaggctcccaacctttcatctgggaacgtttctctgaagatatattctggagacttagtggtgtgtgaaaccgttatcagctattatactgacatggaagaaattgggaatttattgtccaatgccgcgaatcctgtggaattcatgtgtcaggcctttaaaattgtgccctacaacacagagacccttgataaactgctaaccgaatccctgaagaacaatatccctgcaagcggactgcacctctttggaatcaaccagctggaagaagaagatatgatgacaaatcagagggatgaagagctgcccaccctgttgcattttgctgcgaagtatggactgaagaacctcactgccttgttgctcacctgcccaggagccctgcaggcgtacagcgtggccaacaagcatggccactaccccaacaccatcgctgagaaacacggcttcagggacctgcggcagttcatcgacgagtatgtggaaacggtggacatgctcaagagtcacattaaagaggaactgatgcacggggaggaggctgatgctgtgtacgagtccatggcccacctttccacagacctgcttatgaaatgctcgctcaaccccggctgtgacgaggatctctatgagtccatggctgcctttgtcccagctgccactgaagacctctatgttgaaatgcttcaggccagtacatctaacccaatccctggagatggtttctctcgggccactaaggactctatgatccgcaagtttttagaaggcaacagcatgggaatgaccaatctggagagagatcagtgccatcttggtcaggaagaagatgtttatcacacggtggatgacgatgaggccttttctgtggacctggccagcaggccccctgtcccagtgcccagaccagagaccactgctcctggtgctcaccagctgcctgacaacgaaccatacatttttaaagtttttgcagaaaaaagtcaagagcggcctgggaatttctacgtttcctcagagagcatcaggaaagggccgcccgtcagaccatggagggacaggccccagtcgagtatatatgacccttttgcgggaatgaaaacgccaggccagcggcagcttatcaccctccaggagcaggtgaagctgggcattgtcaacgtggatgaggctgtgctccacttcaaagagtggcagctcaaccagaagaaacgatcggagtcctttcgtttccagcaggaaaatcttaaacggctaagagacagcatcacccgaagacagagagagaagcaaaaatcaggaaagcagacagacttggagatcacggtcccaattcggcactcacagcacctgcctgcaaaagtggagtttggagtctatgagagtggccccaggaaaagtgtcattccccctaggacggagctgagacgaggagactggaaaacagacagcacctccagcacagcaagtagcacaagtaaccgctccagcacccggagcctcctcagtgtgagcagcgggatggaaggggacaacgaggataatgaagtccctgaggttaccagaagtcgcagtccaggccccccacaagtggatgggacacccaccatgtccctcgagagaccccccagggtgcctccgagagctgcctcacagaggcctccgaccagggagaccttccatcctcctccacctgttccacccagaggacgctgattccacctcctaaaacctgcctacttcaggactttaagactcacagtcttcagcctgttaatgatgtcttcatgttgagttttatagcatgactgttgaccttaagatccattctcattgctgataatgctgcagccctgctggtttgggcttgcctcgaagattttattaaggcacgaagaagtgaaaaactaagggcttcattcaccatcaccaagtatatcgaaccatatacttgtttgccaaaaggatgaagacttaatcgaaatacttacctctaatttgccatatcagaagcctaaaaagaatgatcataaatgtacttcaccagtgattttactgaaatgcacttatattagtctttatgtatttgctagttcagcctgatttctagaagaggttatagtgtgagacttgtagtattcaagtaagataagtgacctaattttaaaataattcttctacttttctgtatattcagcagggtatttaagtgctagggctggtcacacacaaccaactgaaaaagactagagggattagtacaaactcctcttatacagaaggcaaatctgaggttccacagaagtctggaaccaagactattcagttggttaaataaagaggttagtctagactgggcctgctcattctaggtcaccacattttccatctccaaatagccaggccctctctccctcaagaaatgcccagatgtagaaattcatcagtgcctattggtcttccagaattttccatcttccgtatctcccaggcatgagactaccaagtttgtttgttttctttccaatttgggaatttatacttcagtatggtttcaacgcagttatgtttccagagaacatctagaagtggctggaaaccagaagctggggattccagggaccccacttagtgctctatttcctttataggttttatttctggtcatagagagagaaggacctttgactttttcttcgttgaggcttctgaggaggaaaaacaaacctaaaatagaaatacagtcagcctttcaaatccatgggttctgtgtccgtggattcaaccaaccttggatcaaaaatatttgaaaaaaaatctacaaagtttcaaaaagcaaaacttgaatttgctgcatgccaagaagtatgttgaattcatgtaaatgaagtgatgtgtaggcattgtattagatattataagaaatctagaaatgatttaaagcatacaggaggatgtgcataggttatatgcaaatactatgctattttatatatgggacttgagcatttgtggattttgatactgggggatcctggaaccaatcccccatggataccaaagtacgactgtagttatctattttttacatacttattattaccaccatgctcagtaagtccatttttgcatggaatatggagccttaaaacatgtcatgaatttggagtccctggcacataaatctaccttcaaatcagaggtccttaatgatgcctaaacatacagtaaaattagaatcagaaatacttctttaaaaaatattcaaaatgtgtttgtttcccatgggattattctctatcccacacgaatgtaaaaaaatccacattaatgatccatttaagtatagttttattgggtccttttctaatgattaaaggttctttctcaatttcattcctcagtcctgcaagtaaggactcatactgaagagtactgaaacaaggacttcttgtcagaaacagcttctggaatcttgggttttgtttttgttttttgacaaaatacactattggccatgtccatcacgagagtgtttgtagtaattaattaccttgtacaggacctggcacttagtagcattcttcaaatgttccctcagtgatccttttactctccttgtcacttatttgggagaaataggggcacgtgagataagaagaagaataattttgatgttggtatgcttgccctgttacttatagacagtctttgtcataggcaaacttgaatttgatttaaaatagggctgggaaaaatattcaataactgtaagcccccttttggatgccaaacttagaattttgtacattctctgatgaacaagcatttagatcgtaacatggtaaagcctattaccagccaatgttgttagcatctttgtatgcacatcactgtttgtgcaatatatgaatattttgttgcattgtattcttatataaaaataagtagaaaacataaaattgaaattgctgatgag

SEQ ID NO: 7042 - protein, 805 aa, Homo sapiens; identical to SEQ ID NO: 970

SEQ ID NO: 7043 - DNA, 1765 bp, Homo sapiens
aaatggctcctgattggtaaattgcatctggaactgggaggatctgtacaggaactagaaatacttgaaagggacagcattctttgggctttcctgagggcattgactctggcatacctctcatggtgaccctggaagctccgcctctggagttgctatgagagaaattgctcttgtaggacatgaggtttttcaccagcgtggcctgctatggatcttgtctctttgcatctgagttgctgatcagatgcaaggactggctcaaaggaagaccagctctcttcactgccctgctagcttgtgtcctttatctttgtgagtggactggtgccaagcatgtcccagggtcatcttatgttgaaatgcttcaggccagtacatctaacccaatccctggagatggtttctctcgggccactaaggactctatgatccgcaagtttttagaaggcaacagcatgggaatgaccaatctggagagagatcagtgccatcttggtcaggaagaagatgtttatcacacggtggatgacgatgaggccttttctgtggacctggccagcaggccccctgtcccagtgcccagaccagagaccactgctcctggtgctcaccagctgcctgacaacgaaccatacatttttaaagtttttgcagaaaaaagtcaagagcggcctgggaatttctacgtttcctcagagagcatcaggaaagggccgcccgtcagaccatggagggacaggccccagtcgagtatatatgacccttttgcgggaatgaaaacgccaggccagcggcagcttatcaccctccaggagcaggtgaagctgggcattgtcaacgtggatgaggctgtgctccacttcaaagagtggcagctcaaccagaagaaacgatcggagtcctttcgtttccagcaggaaaatcttaaacggctaagagacagcatcacccgaagacagagagagaagcaaaaatcaggaaagcagacagacttggagatcacggtcccaattcggcactcacagcacctgcctgcaaaagtggagtttggagtctatgagagtggccccaggaaaagtgtcattccccctaggacggagctgagacgaggagactggaaaacagacagcacctccagcacagcaagtagcacaagtaaccgctccagcacccggagcctcctcagtgtgagcagcgggatggaaggggacaacgaggataatgaagtccctgaggttaccagaagtcgcagtccaggccccccacaagtggatgggacacccaccatgtccctcgagagaccccccagggtgcctccgagagctgcctcacagaggcctccgaccagggagaccttccatcctcctccacctgttccacccagaggacgctgattccacctcctaaaacctgcctacttcaggactttaagactcacagtcttcagcctgttaatgatgtcttcatgttgagttttatagcatgactgttgaccttaagatccattctcattgctgataatgctgcagccctgctggtttgggcttgcctcgaagattttattaaggcacgaagaagtgaaaaactaagggcttcattcaccatcaccaagtatatcgaaccatatacttgtttgccaaaaggatgaagacttaatcgaaatacttacctctaatttgccatatcagaagcctaaaaagaatgatcataaatgtacttcaccagtgattttactgaaatgcacttatattagtctttatgt

SEQ ID NO: 7044 - protein, 404 aa, Homo sapiens
MRFFTSVACYGSCLFASELLIRCKDWLKGRPALFTALLACVLYLCEWTGAKHVPGSSYVEMLQASTSNPIPGDGFSRATKDSMIRKFLEGNSMGMTNLERDQCHLGQEEDVYHTVDDDEAFSVDLASRPPVPVPRPETTAPGAHQLPDNEPYIFKVFAEKSQERPGNFYVSSESIRKGPPVRPWRDRPQSSIYDPFAGMKTPGQRQLITLQEQVKLGIVNVDEAVLHFKEWQLNQKKRSESFRFQQENLKRLRDSITRRQREKQKSGKQTDLEITVPIRHSQHLPAKVEFGVYESGPRKSVIPPRTELRRGDWKTDSTSSTASSTSNRSSTRSLLSVSSGMEGDNEDNEVPEVTRSRSPGPPQVDGTPTMSLERPPRVPPRAASQRPPTRETFHPPPPVPPRGR

SEQ ID NO: 7045 - DNA, 591 bp, Homo sapiens
tatagaacagagctgagaaccagaggggaggaaagacactttcttgtggaagagatgtcttctcttcaggcacagattctgtgagtatttggatttctctgggggctgactgtgaatgcgctgagcctcatttgcatgttgtaaatgtgactgcaatgtgatataccctgcaaacagcatacaatctgaaagaaactctcatgtccagagggtatcatcctgttgtacacttaaaaaataaaccaaatttttttccaggaaaatcttaaacggctaagagacagcatcacccgaagacagagagagaagcaaaaatcaggaaagcagacagacttggagatcacggtcccaattcggcactcacagcacctgcctgcaaaagtggagtttggagtctatgagagtggccccaggaaaagtgtcattccccctaggacggagctgagacgaggagactggaaaacagacagcacctccagcacagcaagtagcacaagtaaccgctccagcacccggagcctcctcagtgtgagcagcgggatggaaggggacaacgaggtgagagctgggactccaccccacctatcctgt

SEQ ID NO: 7046 - protein, 43 aa, Homo sapiens
TAKRQHHPKTEREAKIRKADRLGDHGPNSALTAPACKSGVWSL

SEQ ID NO: 7047 - DNA, 572 bp, Homo sapiens
gctgcgctctgctcggtgtcgtggcctcgcagatgattctggctgtgactcagtcactgacactgagcctgaggacgagaaggttgtttcctactcgaagcagcagaacctgccgacggtgacttcacctgggaacctgatggtggtgcagccggaccgcattcgctgtggggtaggcactgctgggggcctggtagctggatgtcagcacttgggcttttcaaatgcatgcatttgttgcagtaaagagagtggtttcttgtattgcacctcagtataattgcagccttcctttgggatttcttttgagtaccctgttacccgggccctggagacacccagctcccctgagtaagagagagactagcccagggagatgtgtgtcatcagtctaagacttctgttctatggatcagtaataacgtagagcacctaggagaccagcagacaggagcattccagacactaacgctaaccctaaagttagaggcctgtgtctcttcctggtagcctagtgctgggaggaaggaaatgcatcttgggcatctgacagcttgcttctccatcactgg

SEQ ID NO: 7048 - protein, 56 aa, Homo sapiens
MHAFVAVKRVVSCIAPQYNCSLPLGFLLSTLLPGPWRHPAPLSKRETSPGRCVSSV

SEQ ID NO: 7049 - DNA, 719 bp, Homo sapiens
gtcttatgcccatgtctggaactggagtgggatcggccacattgaaagaacacagcctgagggcagggaagctattgagccccagagagaagttaaagtacttttcatgaaagatcattgtctgttaagaccccatcgcagagaagttaaagagcttcaatcaccatgctttcagggtcaatttgtctccgaaaaggaacagatggggaagaattattccattcacagttgacttgtcagaaattccaagatcttggactggctgaaagcaatgatgttgccattcatcctttcacgtattcattatggtctacagctgagaagggctatttggggtttgctttgcctgatggtagcagaagaaaaccaagaggcctctctacgaaagcttgcagtaaggagaaagttctggagactgggaagagcaacacaaagatattcagttgcttggtgagagctgctctctgcttccaaggcggcaccttgttgctgcattctccaatgggaaggaacgctgggtcctcacatgacagaaggtggaaaggcagagatctgggaacctgatgtgggaagaaatctcatctgtgaccacgattttgtcaggagtcacgggattctatagctgcagcaaacctggagcaaactggtccccaccaatctgggtgagacaaaccaatgatgactgaaaatcacaataaaattgtaatactcgagatctc

SEQ ID NO: 7050 - protein, 132 aa, Homo sapiens
MLSGSICLRKGTDGEELFHSQLTCQKFQDLGLAESNDVAIHPFTYSLWSTAEKGYLGFALPDGSRRKPRGLSTKACSKEKVLETGKSNTKIFSCLVRAALCFQGGTLLLHSPMGRNAGSSHDRRWKGRDLGT

SEQ ID NO: 7051 - DNA, 576 bp, Homo sapiens
ctcacctcaccctctttcctgttctgcccccaagcctcagtctgggattttgaagctgttgtgttgcctccattccagaaagcttggcccaccagccccaagatagcaagcttggttgaatcttcctcaaggagaaacacttcccctccatgttctgatctgcagagtggtggatgctgcttttctgcaggcacaatggacagaaatgtaggatacttgatgagcacctcttgataaaagtgagagctccacttggaaaacagagtgatgaggaggattcagatctgcttactctgatccaattccactgaggaagctgttgtggcagggagatagcctgcaactgaggtgcccaggtaagattctagccagattccaaactcagaaatattcagtcctcctacattctgggggaagaattggctgaaacttcaagaaaattctttcatttgacgatttgacacttggagtctcttggttttgggtagagcttgaaatctctgactcaataaactggaagcctgaaaagaggaaaacgtaccattcttctatacttattagaagttgacccaaagt

SEQ ID NO: 7052 - protein, 45 aa, Homo sapiens
MLLFCRHNGQKCRILDEHLLIKVRAPLGKQSDEEDSDLLTLIQFH

SEQ ID NO: 7053 - DNA, 466 bp, Homo sapiens
ccaccagccccaagatagcaagcttggttgaatcttcctcaaggagaaacacttcccctccatgttctgatctgcagagtggtggatgctgcttttctgcaggcacaatggacagaaatgtaggatacttgatgagcacctcttgataaaagtgagagctccacttggaaaacagagtgatgaggaggattcagatctgcttactctgatccaaacagaggaagattccaatgacagaaggaagaggacatctctatacttctgcccattcaagctgtgttcggaatgttgtcttcatctcattttatagttgtaaagaggaaaagtagcctcaggctatacaactcaaggtctctgccccaacctggtctcaacctgtaccaccaaatcagacaccttttttatatgtgatcatgatttttttttgccagtcatatctacttatcattcccatcaacatgctggt

SEQ ID NO: 7054 - protein, 74 aa, Homo sapiens [sequence omitted]

SEQ ID NO: 7055 - DNA, 858 bp, Homo sapiens
cgccggcgtcggttgggacgcggagctgaggagcagggccgggcgccatggcaccgtggggcaagcggctggctggcgtgcgcggggtgctgcttgacatctcgggcgtgctgtacgacagcggcgcgggcggcggcacggccatcgccggctcggtggaggcggtggccagactgaagcgttcccggctgaaggtgaggttctgcaccaacgagtcgcagaagtcccgggcagagctggtggggcagcttcagaggctgggatttgacatctctgagcaggaggtgaccgccccggcaccagctgcctgccagatcctgaaggagcaaggcctgcgaccatacctgctcatccatgacggagtccgctcagaatttgatcagatcgacacatccaacccaaactgtgtggtaattgcagacgcaggagaaagcttttcttatcaaaacatgaataacgccttccaggtgctcatggagctggaaaaacctgtgctcatatcactgggaaaagggcgttactacaaggagacctctggcctgatgctggacgttggtccctacatgaaggcgcttgagtatgcctgtggcatcaaagccgaggtggtggggaagccttctcctgagtttttcaagtctgccctgcaagcgataggagtggaagcccaccagttactttcagtatgaaagcaagaagcagaaatgcctgcggcttttcctgagtttttgctgcttctctgaaaggataagaattgacaagtcctatcagtgtgttaatatatctcactggcaagacagtgtaacagcaagattacaacaatatggaggaaataataaagtcactcattttgcgaccttt

SEQ ID NO: 7056 - protein, 212 aa, Homo sapiens
MAPWGKRLAGVRGVLLDISGVLYDSGAGGGTAIAGSVEAVARLKRSRLKVRFCTNESQKSRAELVGQLQRLGFDISEQEVTAPAPAACQILKEQGLRPYLLIHDGVRSEFDQIDTSNPNCVVIADAGESFSYQNMNNAFQVLMELEKPVLISLGKGRYYKETSGLMLDVGPYMKALEYACGIKAEVVGKPSPEFFKSALQAIGVEAHQLLSV

SEQ ID NO: 7057 - DNA, 1549 bp, Homo sapiens
cgccggcgtcggttgggacgcggagctgaggagcagggccgggcgccatggcaccgtggggcaagcggctggctggcgtgcgcggggtgctgcttgacatctcgggcgtgctgtacgacagcggcgcgggcggcggcacggccatcgccggctcggtggaggcggtggccagactgaagcgttcccggctgaaggtgaggttctgcaccaacgagtcgcagaagtcccgggcagagctggtggggcagcttcagaggctgggatttgacatctctgagcaggaggtgaccgccccggcaccagctgcctgccagatcctgaaggagcaaggcctgcgaccatacctgctcatccatgacggagtccgctcagaatttgatcagatcgacacatccaacccaaactgtgtggtaattgcagacgcaggagaaagcttttcttatcaaaacatgaataacgccttccaggtgctcatggagctggaaaaacctgtgctcatatcactgggaaaagggcgttactacaaggagacctctggcctgatgctggacgttggtccctacatgaaggcgcttgagtatgcctgtggcatcaaagccgaggtggtggggaagccttctcctgagtttttcaagtctgccctgcaagcgataggagtggaagcccaccaggcccagtgacgagcaccatccggaagtgaaggctgatgggtacgtggacaacctcgcagaggcagtggacctgctgctgcagcacgccgacaagtgatggcctcctgggagagccccgcctcctccacccctgcctctcctccacccctgcctcccctccacccctgcctctcctccacccgcccaggagagccccacctcctccacccctgcctctcctccacccctgcctcccctccacctgccccagtgcccagaccaaccaaggccctgacagccctgccttctgccctctgccctgcatgggcaggcatttgttccctacctgggtggcctgctcccctgcctgggccctgacttcagctccctgtagtgaagtccaggagggtgggacaggcctgtcaggcctctgggaatctcccaaatcccagaactcaccactcaccatgggcctttaaatgcagtaaactccacctaaccagattcaggggcactatgcccactgcctcctcttcagactctttgcatttcagtgaagagcctggaagaaacccaggggcctcctatgcacagatcttgcagcccagaaccaagtcagcctccctgcgactgcccaggcacactgcccaccaccccacccccgaaacaatgccagcccgctgctttttctatcctcccagtcacctttgcagacaaagaccaggggcagctcccgagggcactgtgaaggctcccatgccacacagtgagaactgtagcctctgcgtccaaggcacacagggtactttctggacccactgctggacagacttgaaggtgtcatgcccggtgtgtgcaggaggaaactaacagttcagtaaactctgccttgaccagca

SEQ ID NO: 7058 - protein, 210 aa, Homo sapiens
MAPWGKRLAGVRGVLLDISGVLYDSGAGGGTAIAGSVEAVARLKRSRLKVRFCTNESQKSRAELVGQLQRLGFDISEQEVTAPAPAACQILKEQGLRPYLLIHDGVRSEFDQIDTSNPNCVVIADAGESFSYQNMNNAFQVLMELEKPVLISLGKGRYYKETSGLMLDVGPYMKALEYACGIKAEVVGKPSPEFFKSALQAIGVEAHQAQ

SEQ ID NO: 7059 - DNA, 1641 bp, Homo sapiens
cgccggcgtcggttgggacgcggagctgaggagcagggccgggcgccatggcaccgtggggcaagcggctggctggcgtgcgcggggtgctgcttgacatctcgggcgtgctgtacgacagcggcgcgggcggcggcacggccatcgccggctcggtggaggcggtggccagactgaagcgttcccggctgaaggtgaggttctgcaccaacgagtcgcagaagtcccgggcagagctggtggggcagcttcagaggctgggatttgacatctctgagcaggaggtgaccgccccggcaccagctgcctgccagatcctgaaggagcaaggcctgcgaccatacctgctcatccatgacggagtccgctcagaatttgatcagatcgacacatccaacccaaactgtgtggtaattgcagacgcaggagaaagcttttcttatcaaaacatgaataacgccttccaggtgctcatggagctggaaaaacctgtgctcatatcactgggaaaagggcgttactacaaggagacctctggcctgatgctggacgttggtccctacatgaaggcgcttgagtatgcctgtggcatcaaagccgaggtggtggggaagccttctcctgagtttttcaagtctgccctgcaagcgataggagtggaagcccaccaggccgtcatgattggggacgatatcgtgggcgacgtcggcggtgcccagcggtgtggaatgagagcgctgcaggtgcgcaccgggaagttcaggcccagtgacgagcaccatccggaagtgaaggctgatgggtacgtggacaacctcgcagaggcagtggacctgctgctgcagcacgccgacaagtgatggcctcctgggagagccccgcctcctccacccctgcctctcctccacccctgcctcccctccacccctgcctctcctccacccgcccaggagagccccacctcctccacccctgcctctcctccacccctgcctcccctccacctgccccagtgcccagaccaaccaaggccctgacagccctgccttctgccctctgccctgcatgggcaggcatttgttccctacctgggtggcctgctcccctgcctgggccctgacttcagctccctgtagtgaagtccaggagggtgggacaggcctgtcaggcctctgggaatctcccaaatcccagaactcaccactcaccatgggcctttaaatgcagtaaactccacctaaccagattcaggggcactatgcccactgcctcctcttcagactctttgcatttcagtgaagagcctggaagaaacccaggggcctcctatgcacagatcttgcagcccagaaccaagtcagcctccctgcgactgcccaggcacactgcccaccaccccacccccgaaacaatgccagcccgctgctttttctatcctcccagtcacctttgcagacaaagaccaggggcagctcccgagggcactgtgaaggctcccatgccacacagtgagaactgtagcctctgcgtccaaggcacacagggtactttctggacccactgctggacagacttgaaggtgtcatgcccggtgtgtgcaggaggaaactaacagttcagtaaactctgccttgaccagca

SEQ ID NO: 7060 - protein, 270 aa, Homo sapiens
MAPWGKRLAGVRGVLLDISGVLYDSGAGGGTAIAGSVEAVARLKRSRLKVRFCTNESQKSRAELVGQLQRLGFDISEQEVTAPAPAACQILKEQGLRPYLLIHDGVRSEFDQIDTSNPNCVVIADAGESFSYQNMNNAFQVLMELEKPVLISLGKGRYYKETSGLMLDVGPYMKALEYACGIKAEVVGKPSPEFFKSALQAIGVEAHQAVMIGDDIVGDVGGAQRCGMRALQVRTGKFRPSDEHHPEVKADGYVDNLAEAVDLLLQHADK

SEQ ID NO: 7061 - DNA, 1385 bp, Homo sapiens
gtcggttgggacgcggagctgaggagcagggccgggcgccatggcaccgtggggcaagcggctggctggcgtgcgcggggtgctgcttgacatctcgggcgtgctgtacgacagcggcgcgggcggcggcacggccatcgccggctcggtggaggcggtggccagactgaagcgttcccggctgaaggtgaggttctgcaccaacgagtcgcagaagtcccgggcagagctggtggggcagcttcagaggctgggatttgacatctctgagcaggaggtgaccgccccggcaccagctgcctgccagatcctgaaggagcaaggcctgcgaccatacctgctcatccatgacggagtccgctcagaatttgatcagatcgacacatccaacccaaactgtgtggtaattgcagacgcaggagaaagcttttcttatcaaaacatgaataacgccttccaggtgctcatggagctggaaaaacctgtgctcatatcactgggaaaagggcccagtgacgagcaccatccggaagtgaaggctgatgggtacgtggacaacctcgcagaggcagtggacctgctgctgcagcacgccgacaagtgatggcctcctgggagagccccgcctcctccacccctgcctctcctccacccctgcctcccctccacccctgcctctcctccacccgcccaggagagccccacctcctccacccctgcctctcctccacccctgcctcccctccacctgccccagtgcccagaccaaccaaggccctgacagccctgccttctgccctctgccctgcatgggcaggcatttgttccctacctgggtggcctgctcccctgcctgggccctgacttcagctccctgtagtgaagtccaggagggtgggacaggcctgtcaggcctctgggaatctcccaaatcccagaactcaccactcaccatgggcctttaaatgcagtaaactccacctaaccagattcaggggcactatgcccactgcctcctcttcagactctttgcatttcagtgaagagcctggaagaaacccaggggcctcctatgcacagatcttgcagcccagaaccaagtcagcctccctgcgactgcccaggcacactgcccaccaccccacccccgaaacaatgccagcccgctgctttttctatcctcccagtcacctttgcagacaaagaccaggggcagctcccgagggcactgtgaaggctcccatgccacacagtgagaactgtagcctctgcgtccaaggcacacagggtactttctggacccactgctggacagacttgaaggtgtcatgcccggtgtgtgcaggaggaaactaacagttcagtaaactctgccttgaccagca

SEQ ID NO: 7062 - protein, 187 aa, Homo sapiens
MAPWGKRLAGVRGVLLDISGVLYDSGAGGGTAIAGSVEAVARLKRSRLKVRFCTNESQKSRAELVGQLQRLGFDISEQEVTAPAPAACQILKEQGLRPYLLIHDGVRSEFDQIDTSNPNCVVIADAGESFSYQNMNNAFQVLMELEKPVLISLGKGPSDEHHPEVKADGYVDNLAEAVDLLLQHADK

SEQ ID NO: 7063 - DNA, 471 bp, Homo sapiens
aggaagagaaaaggggaaggagcgtctaggtgaaatgagctgtgtagtcctttagagcctctggacagaaggtctgatgaatacatgtaaagcttattgagcctcagaactctaactacagggtttcaatagcacagaaactctgagaagaaaaagaatgtcaaagttcctccctaaggagactgattagatgcaagtgtgtccggaattggtgggttcttggtctgacttcaagaatgaagccgcggaccctcacggtgctgctgttttactaagaggtatatgaataatggaaatgcctcctgtaatcctagcactttgggaggccgaggcgggcggatcacctgaggttgggagttcgagaccagcctgaccaacatggggaaaccccctctctactaaaaatacaaaattagctgggcgtggtggtccatgcctgtaatcccagctacttgggaggctgaggcagga

SEQ ID NO: 7064 - protein, 31 aa, Homo sapiens
MQVCPELVGSWSDFKNEAADPHGAAVLLRGI

SEQ ID NO: 7065 - DNA, 2263 bp, Homo sapiens
cttcccccctgagtctttcggcctgggtggaggacgcggctgcttcaagtccttggctctgatccaggccacagattccaggattctacaggcaggaaacatcttagaaatcagggttgggcaggcaggagccaggagagtagctacaatgacttcaccagtactggtggacatacgagaagaggtgacctgccctatctgcctggagctcctaacagaacccctgagcatagactgtggccacagcttctgccaagcctgcatcacaccaaatggcagggaatcagtgattggtcaagaaggggaaagaagctgccctgtgtgccagaccagctaccagccagggaacctgcggcctaatcggcatctggccaacatagtgaggcggctcagagaggtagtgttgggccctgggaagcagctgaaagcagttctttgtgcagaccatggagaaaaactgcagctcttctgtcaggaggatgggaaggtcatttgctggctttgtgagcggtctcaggagcaccgtggtcaccacacgttcctcgtggaggaggttgcccaggagtaccaggagaagtttcaggagtctctaaagaagctgaagaacgaggagcaggaagctgagaagctaacagcttttatcagagagaagaaaacatcctggaagaatcagatggagcctgagagatgcaggatccagacagagtttaatcagctgcgaaatatcctagacagagtggagcaacgggagctgaaaaagctggaacaggaagagaagaaggggctacgaattatagaagaggctgagaatgatctggtccaccagacccagtcgctgcgagagctcatctcggatctggagcgtcgatgtcaggggtcaacaatggagctgctgcaggatgtgagtgatgtcacagaaaggagtgagttctggaccctgaggaagccagaagctctccctacaaagctgagaagtatgttccgagccccagatctgaaaaggatgctgcgagtgtgtagagagctgacagatgtccaaagctactgggttgacgtgaccctgaatccacacacagctaatttaaatcttgtcctggctaaaaaccggagacaagtgaggtttgtgggagctaaagtatctggaccttcctgtctggaaaagcattatgactgtagtgtcctgggctcccagcacttctcctctggtaagcattactgggaggtagatgtggccaagaagactgcctggatcctgggggtatgcagcaattcactgggacctacattctctttcaaccattttgctcaaaatcacagtgcttactccaggtatcagcctcagagtggatactgggtgattgggttacagcataaccatgaatatagggcctatgaggattcttccccttccctgcttctctccatgacagtgccccctcgccgtgttggggttttcttagattatgaggctggtactgtctccttttataatgtcacaaaccatggcttccccatctacactttctctaaatattactttcccactactctttgtccatattttaatccttgcaactgtgtaattcctatgaccctgcgtcgtccaagctcttgaatattcttctgttcccacccacttctgataagtaccctgaggcttatcagcatgtgattctcccttctgatcttctgtttttctgtgttctcaaacagttctttcgttttaaacagttactcagtactaggatgcacccataaaatgcaataataagcaaataaattactttgtttttgtataagtatgtataggattgagctctaaaaccaaaccattataatgataatttgggtagcttcaaactcaaattgaagagagtcttcactacaatcttcactacaacctttggccttcctctctacatttaagagtagcaatagaacaataaaaaaaaatacgtctttcaaattaattgcagtaaaaacaaaagagtagtggggagagaaaaacaatccaatacatatttttctctcagaatagaaagaaaacacaaagagaaaatatgaacaatataaagcacttaaaggaagaggatgatttcttccagcttttccacactctctttatgcgcaggaacaaacagctgttgagtgagctgctatgactttggtagagaggtgcaatatgttttttgaaccagctataaaagaaattaagaggtacatgtgagggtagaaacaaatatcaaggatgagaatggcactg

SEQ ID NO: 7066 - protein, 488 aa, Homo sapiens; identical to SEQ ID NO: 976

SEQ ID NO: 7067 - DNA, 2488 bp, Homo sapiens
cttcccccctgagtctttcggcctgggtggaggacgcggctgcttcaagtccttggctctgatccaggccacagattccaggattctacaggcaggaaacatcttagaaatcagggttgggcaggcaggagccaggagagtagctacaatgacttcaccagtactggtggacatacgagaagaggtgacctgccctatctgcctggagctcctaacagaacccctgagcatagactgtggccacagcttctgccaagcctgcatcacaccaaatggcagggaatcagtgattggtcaagaaggggaaagaagctgccctgtgtgccagaccagctaccagccagggaacctgcggcctaatcggcatctggccaacatagtgaggcggctcagagaggtagtgttgggccctgggaagcagctgaaagcagttctttgtgcagaccatggagaaaaactgcagctcttctgtcaggaggatgggaaggtcatttgctggctttgtgagcggtctcaggagcaccgtggtcaccacacgttcctcgtggaggaggttgcccaggagtaccaggagaagtttcaggagtctctaaagaagctgaagaacgaggagcaggaagctgagaagctaacagcttttatcagagagaagaaaacatcctggaagaatcagatggagcctgagagatgcaggatccagacagagtttaatcagctgcgaaatatcctagacagagtggagcaacgggagctgaaaaagctggaacaggaagagaagaaggggctacgaattatagaagaggctgagaatgatctggtccaccagacccagtcgctgcgagagctcatctcggatctggagcgtcgatgtcaggggtcaacaatggagctgctgcaggatgtgagtgatgtcacagaaaggagtgagttctggaccctgaggaagccagaagctctccctacaaagctgagaagtatgttccgagccccagatctgaaaaggatgctgcgagtgtgtagagagctgacagatgtccaaagctactgggttgacgtgaccctgaatccacacacagctaatttaaatcttgtcctggctaaaaaccggagacaagtgaggtttgtgggagctaaagtatctggaccttcctgtctggaaaagcattatgactgtagtgtcctgggctcccagcacttctcctctggtaagcattactgggaggtagatgtggccaagaagactgcctggatcctgggggtatgcagcaattcactgggacctacattctctttcaaccattttgctcaaaatcacagtgcttactccaggtatcagcctcagagtggatactgggtgattgggttacagcataaccatgaatatagggcctatgaggattcttccccttccctgcttctctccatgacagtgccccctcgccgtgttggggttttcttagattatgaggctggtactgtctccttttataatgtcacaaaccatggcttccccatctacactttctctaaatattactttcccactactctttgtccatattttaatccttgcaactgtgtaattcctatgaccctgcgtcgtccaagctcttgaatattcttctgttcccacccacttctgataagtaccctgaggcttatcagcatgtgattctcccttctgatcttctgtttttctgtgttctcaaacagttctttcgttttaaacagttactcagtactaggatgcacccataaaatgcaataataagcaaataaattactttgtttttgtataagtatgtataggattgagctctaaaaccaaaccattataatgataatttgggtagcttcaaactcaaattgaagagagtcttcactacaatcttcactacaacctttggccttcctctctacatttaagagtagcaatagaacaataaaaaaaaatacgtctttcaaattaattgcagtaaaaacaaaagagtagtggggagagaaaaacaatccaatacatatttttctctcagaatagaaagaaaacacaaagagaaaatatgaacaatataaagcacttaaaggaagaggatgatttcttccagcttttccacactctctttatgcgcaggaacaaacagctgttgagtgagctgctatgactttggtagagaggtgcaatatgttttttgaaccagctataaaagaaattaagaggtacatgtgagggtagaaacaaatatcaaggatgagaatggcactggctgtcccatatggtatccaggagccaccaatgtctgttgagtacttcatacatgcctagtctgaattgagatgtgctcaatgtataaaatatataccagatttcaaatacctacttcaaaaaataatgtaaaatatctcactaataacttttcctttgtgtattgcaatgataatatgttggctctattggattaaataaagtatgttattcattttacctgtt

SEQ ID NO: 7068 - protein, 488 aa, Homo sapiens; identical to SEQ ID NO: 976

SEQ ID NO: 7069 - DNA, 2382 bp, Homo sapiens
ggaggacgcggctgcttcaagtccttggctctgatccaggccacagattccaggattctacaggcaggaaacatcttagaaatcagggttgggcaggcaggagccaggagagtagctacaatgacttcaccagtactggtggacatacgagaagaggtgacctgccctatctgcctggagctcctaacagaacccctgagcatagactgtggccacagcttctgccaagcctgcatcacaccaaatggcagggaatcagtgattggtcaagaaggggaaagaagctgccctgtgtgccagaccagctaccagccagggaacctgcggcctaatcggcatctggccaacatagtgaggcggctcagagaggaggatgggaaggtcatttgctggctttgtgagcggtctcaggagcaccgtggtcaccacacgttcctcgtggaggaggttgcccaggagtaccaggagaagtttcaggagtctctaaagaagctgaagaacgaggagcaggaagctgagaagctaacagcttttatcagagagaagaaaacatcctggaagaatcagatggagcctgagagatgcaggatccagacagagtttaatcagctgcgaaatatcctagacagagtggagcaacgggagctgaaaaagctggaacaggaagagaagaaggggctacgaattatagaagaggctgagaatgatctggtccaccagacccagtcgctgcgagagctcatctcggatctggagcgtcgatgtcaggggtcaacaatggagctgctgcaggatgtgagtgatgtcacagaaaggagtgagttctggaccctgaggaagccagaagctctccctacaaagctgagaagtatgttccgagccccagatctgaaaaggatgctgcgagtgtgtagagagctgacagatgtccaaagctactgggttgacgtgaccctgaatccacacacagctaatttaaatcttgtcctggctaaaaaccggagacaagtgaggtttgtgggagctaaagtatctggaccttcctgtctggaaaagcattatgactgtagtgtcctgggctcccagcacttctcctctggtaagcattactgggaggtagatgtggccaagaagactgcctggatcctgggggtatgcagcaattcactgggacctacattctctttcaaccattttgctcaaaatcacagtgcttactccaggtatcagcctcagagtggatactgggtgattgggttacagcataaccatgaatatagggcctatgaggattcttccccttccctgcttctctccatgacagtgccccctcgccgtgttggggttttcttagattatgaggctggtactgtctccttttataatgtcacaaaccatggcttccccatctacactttctctaaatattactttcccactactctttgtccatattttaatccttgcaactgtgtaattcctatgaccctgcgtcgtccaagctcttgaatattcttctgttcccacccacttctgataagtaccctgaggcttatcagcatgtgattctcccttctgatcttctgtttttctgtgttctcaaacagttctttcgttttaaacagttactcagtactaggatgcacccataaaatgcaataataagcaaataaattactttgtttttgtataagtatgtataggattgagctctaaaaccaaaccattataatgataatttgggtagcttcaaactcaaattgaagagagtcttcactacaatcttcactacaacctttggccttcctctctacatttaagagtagcaatagaacaataaaaaaaaatacgtctttcaaattaattgcagtaaaaacaaaagagtagtggggagagaaaaacaatccaatacatatttttctctcagaatagaaagaaaacacaaagagaaaatatgaacaatataaagcacttaaaggaagaggatgatttcttccagcttttccacactctctttatgcgcaggaacaaacagctgttgagtgagctgctatgactttggtagagaggtgcaatatgttttttgaaccagctataaaagaaattaagaggtacatgtgagggtagaaacaaatatcaaggatgagaatggcactggctgtcccatatggtatccaggagccaccaatgtctgttgagtacttcatacatgcctagtctgaattgagatgtgctcaatgtataaaatatataccagatttcaaatacctacttcaaaaaataatgtaaaatatctcactaataacttttcctttgtgtattgcaatgataatatgttggctctattggattaaataaagtatgttattcattttacctgtt

SEQ ID NO: 7070 - protein, 462 aa, Homo sapiens
MTSPVLVDIREEVTCPICLELLTEPLSIDCGHSFCQACITPNGRESVIGQEGERSCPVCQTSYQPGNLRPNRHLANIVRRLREEDGKVICWLCERSQEHRGHHTFLVEEVAQEYQEKFQESLKKLKNEEQEAEKLTAFIREKKTSWKNQMEPERCRIQTEFNQLRNILDRVEQRELKKLEQEEKKGLRIIEEAENDLVHQTQSLRELISDLERRCQGSTMELLQDVSDVTERSEFWTLRKPEALPTKLRSMFRAPDLKRMLRVCRELTDVQSYWVDVTLNPHTANLNLVLAKNRRQVRFVGAKVSGPSCLEKHYDCSVLGSQHFSSGKHYWEVDVAKKTAWILGVCSNSLGPTFSFNHFAQNHSAYSRYQPQSGYWVIGLQHNHEYRAYEDSSPSLLLSMTVPPRRVGVFLDYEAGTVSFYNVTNHGFPIYTFSKYYFPTTLCPYFNPCNCVIPMTLRRPSS

SEQ ID NO: 7071 - DNA, 2594 bp, Homo sapiens
gagccttccgcaaactcctgacctgtgggtccgtccgttcaacggccaaaggctggcggaggagggatcccctgcctttctcggaacggaacggagcagagtcgtgcgtggttgagtttagataaaagccgagtgagcgcgctctgttccttaagattagtttaaggtgccttggattgctctgaagagctttgaccacctgatattgcttacatctggaacttcttggcttctcattccccagatgtgcgggtcagagaggatgtgagtgatgtcacagaaaggagtgagttctggaccctgaggaagccagaagctctccctacaaagctgagaagtatgttccgagccccagatctgaaaaggatgctgcgagtgtgtagagagctgacagatgtccaaagctactgggttgacgtgaccctgaatccacacacagctaatttaaatcttgtcctggctaaaaaccggagacaagtgaggtttgtgggagctaaagtatctggaccttcctgtctggaaaagcattatgactgtagtgtcctgggctcccagcacttctcctctggtaagcattactgggaggtagatgtggccaagaagactgcctggatcctgggggtatgcagcaattcactgggacctacattctctttcaaccattttgctcaaaatcacagtgcttactccaggtatcagcctcagagtggatactgggtgattgggttacagcataaccatgaatatagggcctatgaggattcttccccttccctgcttctctccatgacagtgccccctcgccgtgttggggttttcttagattatgaggctggtactgtctccttttataatgtcacaaaccatggcttccccatctacactttctctaaatattactttcccactactctttgtccatattttaatccttgcaactgtgtaattcctatgaccctgcgtcgtccaagctcttgaatattcttctgttcccacccacttctgataagtaccctgaggcttatcagcatgtgattctcccttctgatcttctgtttttctgtgttctcaattcttttgttgttttttggtttttgaatcttttttgagatggaatctcgctctgtcgcccaggctggagtgcactggcgcaatctcggctcactgcaacctctgcctcctgggttcaagcgaacctcctgcctcagcatcccaagtagctgggattacaggcacccaccaccatgcccaactaatttttgtatttttatagagatagggtttcaccgtgttggccaggctgatctcgaactcctgaccgcaagtgatccacccgcctcggtctcccaaagtgctgggattacagatgtgagccgccgcgcccagacagttctttcgttttaaacagttactcagtactaggatgcacccagtggtgagagtaagcatctttgactgatgacaggtcttgaggtggatagggggcgctttcagtattttgccattaagcatagtatttgatgcaggttttttttgattgatgcaggggatcaaatttaggaagttctgatctgttaatttactacaagtttttgtataaaatgaaaactcgtattctacctatgtcttttctgtaaattattgagacaattgtgtatcatttttgttctgttaatgtggcttagtacattgatttacttcaatttgttaccacaacttgctgaaatacaccattattatttgttgtatgcaatactggatttattttgataacgtattgtttagattttgttctcatctatgttaatgaaagaaattggcctgtatttttacattcttgtaatatctttgccaggttctataaaatgcaataataagcaaataaattactttgtttttgtataagtatgtataggattgagctctaaaaccaaaccattataatgataatttgggtagcttcaaactcaaattgaagagagtcttcactacaatcttcactacaacctttggccttcctctctacatttaagagtagcaatagaacaataaaaaaaaatacgtctttcaaattaattgcagtaaaaacaaaagagtagtggggagagaaaaacaatccaatacatatttttctctcagaatagaaagaaaacacaaagagaaaatatgaacaatataaagcacttaaaggaagaggatgatttcttccagcttttccacactctctttatgcgcaggaacaaacagctgttgagtgagctgctatgactttggtagagaggtgcaatatgttttttgaaccagctataaaagaaattaagaggtacatgtgagggtagaaacaaatatcaaggatgagaatggcactggctgtcccatatggtatccaggagccaccaatgtctgttgagtacttcatacatgcctagtctgaattgagatgtgctcaatgtataaaatatataccagatttcaaatacctacttcaaaaaataatgtaaaatatctcactaataacttttcctttgtgtattgcaatgataatatgttggctctattggattaaataaagtatgttattcattttacctgtt

SEQ ID NO: 7072 - protein, 212 aa, Homo sapiens
MFRAPDLKRMLRVCRELTDVQSYWVDVTLNPHTANLNLVLAKNRRQVRFVGAKVSGPSCLEKHYDCSVLGSQHFSSGKHYWEVDVAKKTAWILGVCSNSLGPTFSFNHFAQNHSAYSRYQPQSGYWVIGLQHNHEYRAYEDSSPSLLLSMTVPPRRVGVFLDYEAGTVSFYNVTNHGFPIYTFSKYYFPTTLCPYFNPCNCVIPMTLRRPSS

SEQ ID NO: 7073 - DNA, 2441 bp, Homo sapiens
gccttccgcaaactcctgacctgtgggtccgtccgttcaacggccaaaggctggcggaggagggatcccctgcctttctcggaacggaacggagcagagtcgtgcgtggttgagtttagataaaagccgagtgagcgcgctctgttccttaagattagtttaaggtgccttggattgctctgaagagctttgaccacctgatattgcttacatctggaacttcttggcttctcattccccagatgtgcgggtcagagaggattctacaggcaggaaacatcttagaaatcagggttgggcaggcaggagccaggagagtagctacaatgacttcaccagtactggtggacatacgagaagaggtgacctgccctatctgcctggagctcctaacagaacccctgagcatagactgtggccacagcttctgccaagcctgcatcacaccaaatggcagggaatcagtgattggtcaagaaggggaaagaagctgccctgtgtgccagaccagctaccagccagggaacctgcggcctaatcggcatctggccaacatagtgaggcggctcagagaggtagtgttgggccctgggaagcagctgaaagcagttctttgtgcagaccatggagaaaaactgcagctcttctgtcaggaggatgggaaggtcatttgctggctttgtgagcggtctcaggagcaccgtggtcaccacacgttcctcgtggaggaggttgcccaggagtaccaggagaagtttcaggagtctctaaagaagctgaagaacgaggagcaggaagctgagaagctaacagcttttatcagagagaagaaaacatcctggaagaatcagatggagcctgagagatgcaggatccagacagagtttaatcagctgcgaaatatcctagacagagtggagcaacgggagctgaaaaagctggaacaggaagagaagaaggggctacgaattatagaagaggctgagaatgatctggtccaccagacccagtcgctgcgagagctcatctcggatctggagcgtcgatgtcaggggtcaacaatggagctgctgcaggatgtgagtgatgtcacagaaaggagtgagttctggaccctgaggaagccagaagctctccctacaaagctgagaagtatgttccgagccccagatctgaaaaggatgctgcgagtgtgtagagagctgacagatgtccaaagctactgggttgacgtgaccctgaatccacacacagctaatttaaatcttgtcctggctaaaaaccggagacaagtgaggtttgtgggagctaaagtatctggaccttcctgtctggaaaagcattatgactgtagtgtcctgggctcccagcacttctcctctggtaagcattactgggaggtagatgtggccaagaagactgcctggatcctgggggtatgcagcaattcactgggacctacattctctttcaaccattttgctcaaaatcacagtgcttactccaggtatcagcctcagagtggatactgggtgattgggttacagcataaccatgaatatagggcctatgaggattcttccccttccctgcttctctccatgacagtgccccctcgccgtgttggggttttcttagattatgaggctggtactgtctccttttataatgtcacaaaccatggcttccccatctacactttctctaaatattactttcccactactctttgtccatattttaatccttgcaactgtgtaattcctatgaccctgcgtcgtccaagctcttgaatattcttctgttcccacccacttctgataagtaccctgaggcttatcagcatgtgattctcccttctgatcttctgtttttctgtgttctcaaacagttctttcgttttaaacagttactcagtactaggatgcacccataaaatgcaataataagcaaataaattactttgtttttgtataagtatgtataggattgagctctaaaaccaaaccattataatgataatttgggtagcttcaaactcaaattgaagagagtcttcactacaatcttcactacaacctttggccttcctctctacatttaagagtagcaatagaacaataaaaaaaaatacgtctttcaaattaattgcagtaaaaacaaaagagtagtggggagagaaaaacaatccaatacatatttttctctcagaatagaaagaaaacacaaagagaaaatatgaacaatataaagcacttaaaggaagaggatgatttcttccagcttttccacactctctttatgcgcaggaacaaacagctgttgagtgagctgctatgactttggtagagaggtgcaatatgttttttgaaccagctataaaagaaattaagaggtacatgtgagggtagaaacaaatatcaaggatgagaatggcactg

SEQ ID NO: 7074 - protein, 516 aa, Homo sapiens; identical to SEQ ID NO: 974

SEQ ID NO: 7075 - DNA, 2666 bp, Homo sapiens
gccttccgcaaactcctgacctgtgggtccgtccgttcaacggccaaaggctggcggaggagggatcccctgcctttctcggaacggaacggagcagagtcgtgcgtggttgagtttagataaaagccgagtgagcgcgctctgttccttaagattagtttaaggtgccttggattgctctgaagagctttgaccacctgatattgcttacatctggaacttcttggcttctcattccccagatgtgcgggtcagagaggattctacaggcaggaaacatcttagaaatcagggttgggcaggcaggagccaggagagtagctacaatgacttcaccagtactggtggacatacgagaagaggtgacctgccctatctgcctggagctcctaacagaacccctgagcatagactgtggccacagcttctgccaagcctgcatcacaccaaatggcagggaatcagtgattggtcaagaaggggaaagaagctgccctgtgtgccagaccagctaccagccagggaacctgcggcctaatcggcatctggccaacatagtgaggcggctcagagaggtagtgttgggccctgggaagcagctgaaagcagttctttgtgcagaccatggagaaaaactgcagctcttctgtcaggaggatgggaaggtcatttgctggctttgtgagcggtctcaggagcaccgtggtcaccacacgttcctcgtggaggaggttgcccaggagtaccaggagaagtttcaggagtctctaaagaagctgaagaacgaggagcaggaagctgagaagctaacagcttttatcagagagaagaaaacatcctggaagaatcagatggagcctgagagatgcaggatccagacagagtttaatcagctgcgaaatatcctagacagagtggagcaacgggagctgaaaaagctggaacaggaagagaagaaggggctacgaattatagaagaggctgagaatgatctggtccaccagacccagtcgctgcgagagctcatctcggatctggagcgtcgatgtcaggggtcaacaatggagctgctgcaggatgtgagtgatgtcacagaaaggagtgagttctggaccctgaggaagccagaagctctccctacaaagctgagaagtatgttccgagccccagatctgaaaaggatgctgcgagtgtgtagagagctgacagatgtccaaagctactgggttgacgtgaccctgaatccacacacagctaatttaaatcttgtcctggctaaaaaccggagacaagtgaggtttgtgggagctaaagtatctggaccttcctgtctggaaaagcattatgactgtagtgtcctgggctcccagcacttctcctctggtaagcattactgggaggtagatgtggccaagaagactgcctggatcctgggggtatgcagcaattcactgggacctacattctctttcaaccattttgctcaaaatcacagtgcttactccaggtatcagcctcagagtggatactgggtgattgggttacagcataaccatgaatatagggcctatgaggattcttccccttccctgcttctctccatgacagtgccccctcgccgtgttggggttttcttagattatgaggctggtactgtctccttttataatgtcacaaaccatggcttccccatctacactttctctaaatattactttcccactactctttgtccatattttaatccttgcaactgtgtaattcctatgaccctgcgtcgtccaagctcttgaatattcttctgttcccacccacttctgataagtaccctgaggcttatcagcatgtgattctcccttctgatcttctgtttttctgtgttctcaaacagttctttcgttttaaacagttactcagtactaggatgcacccataaaatgcaataataagcaaataaattactttgtttttgtataagtatgtataggattgagctctaaaaccaaaccattataatgataatttgggtagcttcaaactcaaattgaagagagtcttcactacaatcttcactacaacctttggccttcctctctacatttaagagtagcaatagaacaataaaaaaaaatacgtctttcaaattaattgcagtaaaaacaaaagagtagtggggagagaaaaacaatccaatacatatttttctctcagaatagaaagaaaacacaaagagaaaatatgaacaatataaagcacttaaaggaagaggatgatttcttccagcttttccacactctctttatgcgcaggaacaaacagctgttgagtgagctgctatgactttggtagagaggtgcaatatgttttttgaaccagctataaaagaaattaagaggtacatgtgagggtagaaacaaatatcaaggatgagaatggcactggctgtcccatatggtatccaggagccaccaatgtctgttgagtacttcatacatgcctagtctgaattgagatgtgctcaatgtataaaatatataccagatttcaaatacctacttcaaaaaataatgtaaaatatctcactaataacttttcctttgtgtattgcaatgataatatgttggctctattggattaaataaagtatgttattcattttacctgtt

SEQ ID NO: 7076 - protein, 516 aa, Homo sapiens; identical to SEQ ID NO: 974

SEQ ID NO: 7077 - DNA, 3235 bp, Homo sapiens
gccttccgcaaactcctgacctgtgggtccgtccgttcaacggccaaaggctggcggaggagggatcccctgcctttctcggaacggaacggagcagagtcgtgcgtggttgagtttagataaaagccgagtgagcgcgctctgttccttaagattagtttaaggtgccttggattgctctgaagagctttgaccacctgatattgcttacatctggaacttcttggcttctcattccccagatgtgcgggtcagagaggattctacaggcaggaaacatcttagaaatcagggttgggcaggcaggagccaggagagtagctacaatgacttcaccagtactggtggacatacgagaagaggtgacctgccctatctgcctggagctcctaacagaacccctgagcatagactgtggccacagcttctgccaagcctgcatcacaccaaatggcagggaatcagtgattggtcaagaaggggaaagaagctgccctgtgtgccagaccagctaccagccagggaacctgcggcctaatcggcatctggccaacatagtgaggcggctcagagaggtagtgttgggccctgggaagcagctgaaagcagttctttgtgcagaccatggagaaaaactgcagctcttctgtcaggaggatgggaaggtcatttgctggctttgtgagcggtctcaggagcaccgtggtcaccacacgttcctcgtggaggaggttgcccaggagtaccaggagaagtttcaggagtctctaaagaagctgaagaacgaggagcaggaagctgagaagctaacagcttttatcagagagaagaaaacatcctggaagaatcagatggagcctgagagatgcaggatccagacagagtttaatcagctgcgaaatatcctagacagagtggagcaacgggagctgaaaaagctggaacaggaagagaagaaggggctacgaattatagaagaggctgagaatgatctggtccaccagacccagtcgctgcgagagctcatctcggatctggagcgtcgatgtcaggggtcaacaatggagctgctgcaggatgtgagtgatgtcacagaaaggagtgagttctggaccctgaggaagccagaagctctccctacaaagctgagaagtatgttccgagccccagatctgaaaaggatgctgcgagtgtgtagagagctgacagatgtccaaagctactgggccatccaggggtctttaaccagaagagagaggagagcctcaggagttaggaccagaagaagccagggaagcagtgcaatggcttcaaaaatcttgcttaacgtacaagaggaggtgacctgtcccatctgcctggagctgttgacagaacccttgagtctagactgtggccacagcctctgccgagcctgcatcactgtgagcaacaaggaggcagtgaccagcatgggaggaaaaagcagctgtcctgtgtgtggtatcagttactcatttgaacatctacaggctaatcagcatctggccaacatagtggagagactcaaggaggtcaagttgagcccagacaatgggaagaagagagatctctgtgatcatcatggagagaaactcctactcttctgtaaggaggataggaaagtcatttgctggctttgtgagcggtctcaggagcaccgtggtcaccacacagtcctcacggaggaagtattcaaggaatgtcaggagaaactccaggcagtcctcaagaggctgaagaaggaagaggaggaagctgagaagctggaagctgacatcagagaagagaaaacttcctggaagtatcaggtacaaactgagagacaaaggatacaaacagaatttgatcagcttagaagcatcctaaataatgaggagcagagagagctgcaaagattggaagaagaagaaaagaagacgctggataagtttgcagaggctgaggatgagctagttcagcagaagcagttggtgagagagctcatctcagatgtggagtgtcggagtcagtggtcaacaatggagctgctgcaggacatgagtggaatcatgaaatggagtgagatctggaggctgaaaaagccaaaaatggtttccaagaaactgaagactgtattccatgctccagatctgagtaggatgctgcaaatgtttagagaactgacagctgtccggtgctactgggtggatgtcacactgaattcagtcaacctaaatttgaatcttgtcctttcagaagatcagagacaagtgatatctgtgccaatttggccttttcagtgttataattatggtgtcttgggatcccaatatttctcctctgggaaacattactgggaagtggacgtgtccaagaaaactgcctggatcctgggggtatactgtagaacatattcccgccatatgaagtatgttgttagaagatgtgcaaatcgtcaaaatctttacaccaaatacagacctctatttggctactgggttatagggttacagaataaatgtaagtatggtgtctttgaagagtctttgtcctctgatcccgaggttttgactctctccatggctgtgcctccctgccgtgttggggttttcctcgactatgaagcaggcattgtctcatttttcaatgtcacaagccatggctccctcatttacaagttctctaaatgttgcttttctcagcctgtttatccatatttcaatccttggaactgtccagctcccatgactctatgcccaccaagctcttgaattttctcatttcttcacctacaaccctttgtcttgacttatctcctgcaactgactcatctgcaacattcacaccattgcttccttgtggtttcccttctttagaacttttactcatccttgagatgtatggtgtatttggcttgagttatgagagatgcttatttattcatttactctttttcatattttcagagaaagttacctaatccctcctaaagacacagcagtatgggtataacatccttgccttcccatttatccatgtttcactttatcactgatatgaagaggcccaaagcctgttagccaccatccatgctacctaggtagtccataggaaccacccccatgaccaccaccaacatcaactaaaggttcttggagggtatgtcagtgtgttgctcaggataccccaggtacatcaaggaatcaaggagaggaaaatatgagcaatatgtgta

SEQ ID NO: 7078 - protein, 842 aa, Homo sapiens; identical to SEQ ID NO: 978

SEQ ID NO: 7079 - DNA, 1989 bp, Homo sapiens
ggagcagagtcgtgcgtggttgagtttagataaaagccgagtgagcgcgctctgttccttaagattagtttaaggtgccttggattgctctgaagagctttgaccacctgatattgcttacatctggaacttcttggcttctcattccccagatgtgcgggtcagagagaccatggagaaaaactgcagctcttctgtcaggaggatgggaaggtcatttgctggctttgtgagcggtctcaggagcaccgtggtcaccacacgttcctcgtggaggaggttgcccaggagtaccaggagaagtttcaggagtctctaaagaagctgaagaacgaggagcaggaagctgagaagctaacagcttttatcagagagaagaaaacatcctggaagaatcagatggagcctgagagatgcaggatccagacagagtttaatcagctgcgaaatatcctagacagagtggagcaacgggagctgaaaaagctggaacaggaagagaagaaggggctacgaattatagaagaggctgagaatgatctggtccaccagacccagtcgctgcgagagctcatctcggatctggagcgtcgatgtcaggggtcaacaatggagctgctgcaggatgtgagtgatgtcacagaaaggagtgagttctggaccctgaggaagccagaagctctccctacaaagctgagaagtatgttccgagccccagatctgaaaaggatgctgcgagtgtgtagagagctgacagatgtccaaagctactgggttgacgtgaccctgaatccacacacagctaatttaaatcttgtcctggctaaaaaccggagacaagtgaggtttgtgggagctaaagtatctggaccttcctgtctggaaaagcattatgactgtagtgtcctgggctcccagcacttctcctctggtaagcattactgggaggtagatgtggccaagaagactgcctggatcctgggggtatgcagcaattcactgggacctacattctctttcaaccattttgctcaaaatcacagtgcttactccaggtatcagcctcagagtggatactgggtgattgggttacagcataaccatgaatatagggcctatgaggattcttccccttccctgcttctctccatgacagtgccccctcgccgtgttggggttttcttagattatgaggctggtactgtctccttttataatgtcacaaaccatggcttccccatctacactttctctaaatattactttcccactactctttgtccatattttaatccttgcaactgtgtaattcctatgaccctgcgtcgtccaagctcttgaatattcttctgttcccacccacttctgataagtaccctgaggcttatcagcatgtgattctcccttctgatcttctgtttttctgtgttctcaaacagttctttcgttttaaacagttactcagtactaggatgcacccataaaatgcaataataagcaaataaattactttgtttttgtataagtatgtataggattgagctctaaaaccaaaccattataatgataatttgggtagcttcaaactcaaattgaagagagtcttcactacaatcttcactacaacctttggccttcctctctacatttaagagtagcaatagaacaataaaaaaaaatacgtctttcaaattaattgcagtaaaaacaaaagagtagtggggagagaaaaacaatccaatacatatttttctctcagaatagaaagaaaacacaaagagaaaatatgaacaatataaagcacttaaaggaagaggatgatttcttccagcttttccacactctctttatgcgcaggaacaaacagctgttgagtgagctgctatgactttggtagagaggtgcaatatgttttttgaaccagctataaaagaaattaagaggtacatgtgagggtagaaacaaatatcaaggatgagaatggcactg

SEQ ID NO: 7080 - protein, 313 aa, Homo sapiens
MEPERCRIQTEFNQLRNILDRVEQRELKKLEQEEKKGLRIIEEAENDLVHQTQSLRELISDLERRCQGSTMELLQDVSDVTERSEFWTLRKPEALPTKLRSMFRAPDLKRMLRVCRELTDVQSYWVDVTLNPHTANLNLVLAKNRRQVRFVGAKVSGPSCLEKHYDCSVLGSQHFSSGKHYWEVDVAKKTAWILGVCSNSLGPTFSFNHFAQNHSAYSRYQPQSGYWVIGLQHNHEYRAYEDSSPSLLLSMTVPPRRVGVFLDYEAGTVSFYNVTNHGFPIYTFSKYYFPTTLCPYFNPCNCVIPMTLRRPSS

SEQ ID NO: 7081 - DNA, 2729 bp, Homo sapiens
aaggaaagaacaggctacaaaggctttctcctgcagcatttaccctccctctccctgggaggcttggcccaggaaagcagtcctgagcccaacttccccgcttttaatagaggagaccctcagtgtgaccgactagcagcctctttttcttccctgttcctgaagaatcagatggagcctgagagatgcaggatccagacagagtttaatcagctgcgaaatatcctagacagagtggagcaacgggagctgaaaaagctggaacaggaagagaagaaggggctacgaattatagaagaggctgagaatgatctggtccaccagacccagtcgctgcgagagctcatctcggatctggagcgtcgatgtcaggggtcaacaatggagctgctgcaggatgtgagtgatgtcacagaaaggagtgagttctggaccctgaggaagccagaagctctccctacaaagctgagaagtatgttccgagccccagatctgaaaaggatgctgcgagtgtgtagagagctgacagatgtccaaagctactgggttgacgtgaccctgaatccacacacagctaatttaaatcttgtcctggctaaaaaccggagacaagtgaggtttgtgggagctaaagtatctggaccttcctgtctggaaaagcattatgactgtagtgtcctgggctcccagcacttctcctctggtaagcattactgggaggtagatgtggccaagaagactgcctggatcctgggggtatgcagcaattcactgggacctacattctctttcaaccattttgctcaaaatcacagtgcttactccaggtatcagcctcagagtggatactgggtgattgggttacagcataaccatgaatatagggcctatgaggattcttccccttccctgcttctctccatgacagtgccccctcgccgtgttggggttttcttagattatgaggctggtactgtctccttttataatgtcacaaaccatggcttccccatctacactttctctaaatattactttcccactactctttgtccatattttaatccttgcaactgtgtaattcctatgaccctgcgtcgtccaagctcttgaatattcttctgttcccacccacttctgataagtaccctgaggcttatcagcatgtgattctcccttctgatcttctgtttttctgtgttctcaattcttttgttgttttttggtttttgaatcttttttgagatggaatctcgctctgtcgcccaggctggagtgcactggcgcaatctcggctcactgcaacctctgcctcctgggttcaagcgaacctcctgcctcagcatcccaagtagctgggattacaggcacccaccaccatgcccaactaatttttgtatttttatagagatagggtttcaccgtgttggccaggctgatctcgaactcctgaccgcaagtgatccacccgcctcggtctcccaaagtgctgggattacagatgtgagccgccgcgcccagacagttctttcgttttaaacagttactcagtactaggatgcacccagtggtgagagtaagcatctttgactgatgacaggtcttgaggtggatagggggcgctttcagtattttgccattaagcatagtatttgatgcaggttttttttgattgatgcaggggatcaaatttaggaagttctgatctgttaatttactacaagtttttgtataaaatgaaaactcgtattctacctatgtcttttctgtaaattattgagacaattgtgtatcatttttgttctgttaatgtggcttagtacattgatttacttcaatttgttaccacaacttgctgaaatacaccattattatttgttgtatgcaatactggatttattttgataacgtattgtttagattttgttctcatctatgttaatgaaagaaattggcctgtatttttacattcttgtaatatctttgccaggttctataaaatgcaataataagcaaataaattactttgtttttgtataagtatgtataggattgagctctaaaaccaaaccattataatgataatttgggtagcttcaaactcaaattgaagagagtcttcactacaatcttcactacaacctttggccttcctctctacatttaagagtagcaatagaacaataaaaaaaaatacgtctttcaaattaattgcagtaaaaacaaaagagtagtggggagagaaaaacaatccaatacatatttttctctcagaatagaaagaaaacacaaagagaaaatatgaacaatataaagcacttaaaggaagaggatgatttcttccagcttttccacactctctttatgcgcaggaacaaacagctgttgagtgagctgctatgactttggtagagaggtgcaatatgttttttgaaccagctataaaagaaattaagaggtacatgtgagggtagaaacaaatatcaaggatgagaatggcactggctgtcccatatggtatccaggagccaccaatgtctgttgagtacttcatacatgcctagtctgaattgagatgtgctcaatgtataaaatatataccagatttcaaatacctacttcaaaaaataatgtaaaatatctcactaataacttttcctttgtgtattgcaatgataatatgttggctctattggattaaataaagtatgttattcattttacctgtt

SEQ ID NO: 7082 - protein, 313 aa, Homo sapiens; identical to SEQ ID NO: 7080

SEQ ID NO: 7083 - DNA, 1200 bp, Homo sapiens
tgcaacctctgtctcctgggttcaagcgatcctcctgtctcagcctcccgagtaactgggattacaggcgcccaccaccatgcccggctaatttttgtatttttgtagacagggtttcgacatgttggccaggctggtctcaaactcctgacctcaagtgatccacccgcctcagcctcccaaagtgctgggattacaggtgtgagccactgcgcccgtcctgactcatgcaacttctgcttcagccatccaggggtctttaaccagaagagagaggagagcctcaggagttaggaccagaagaagccagggaagcagtgcaatggcttcaaaaatcttgcttaacgtacaagaggaggtgacctgtcccatctgcctggagctgttgacagaacccttgagtctagactgtggccacagcctctgccgagcctgcatcactgtgagcaacaaggaggcagtgaccagcatgggaggaaaaagcagctgtcctgtgtgtggtatcagttactcatttgaacatctacaggctaatcagcatctggccaacatagtggagagactcaaggaggtcaagttgagcccagacaatgggaagaagagagatctctgtgatcatcatggagagaaactcctactcttctgtaaggaggataggaaagtcatttgctggctttgtgagcggtctcaggagcaccgtggtcaccacacagtcctcacggaggaagtattcaaggaatgtcaggagaaactccaggcagtcctcaagaggctgaagaaggaagaggaggaagctgagaagctggaagctgacatcagagaagagaaaacttcctggaagtatcaggtacaaactgagagacaaaggatacaaacagaatttgatcagcttagaagcatcctaaataatgaggagcagagagagctgcaaagattggaagaagaagaaaagaagacgctggataagtttgcagaggctgaggatgagctagttcagcagaagcagttggtgagagagctcatctcagatgtggagtgtcggagtcagtggtcaacaatggagctgctgcaggacatgagtggaatcatgaaatggtgcgtatgggtggccaggagtggtgcttgtgagttataaagaagtgtttgtagctattagagttatttggtggtcaattggaataaaaaatctcccagagtagt

SEQ ID NO: 7084 - protein, 270 aa, Homo sapiens; identical to SEQ ID NO: 986

SEQ ID NO: 7085 - DNA, 967 bp, Homo sapiens
atttgttgaatgaatcctgaccacacccaccctggcttttcttcacctcttcaaccaggagccgagatttctgttgctctgaagccatccaggggtctttaaccagaagagagaggagagcctcaggagttaggaccagaagaagccagggaagcagtgcaatggcttcaaaaatcttgcttaacgtacaagaggaggtgacctgtcccatctgcctggagctgttgacagaacccttgagtctagactgtggccacagcctctgccgagcctgcatcactgtgagcaacaaggaggcagtgaccagcatgggaggaaaaagcagctgtcctgtgtgtggtatcagttactcatttgaacatctacaggctaatcagcatctggccaacatagtggagagactcaaggaggtcaagttgagcccagacaatgggaagaagagagatctctgtgatcatcatggagagaaactcctactcttctgtaaggaggataggaaagtcatttgctggctttgtgagcggtctcaggagcaccgtggtcaccacacagtcctcacggaggaagtattcaaggaatgtcaggagaaactccaggcagtcctcaagaggctgaagaaggaagaggaggaagctgagaagctggaagctgacatcagagaagagaaaacttcctggaaggcaagaggagattctgaaggttttctgagacaggaatcttgacaggaccttaatccaaggaggcctcgtcctttttattccttgacattgcatgagtcctgaagccatttgattagttctcttctctgtcctgtccctgttgggggtggaggctagaaagtggacatgttacaattacacatacatacctggaactgagcacaaagatagactctatgatgaggaaggctagcaaatactgtgttccattgctcttttccaacggggctctactacttctggtggaa

SEQ ID NO: 7086 - protein, 186 aa, Homo sapiens
MASKILLNVQEEVTCPICLELLTEPLSLDCGHSLCRACITVSNKEAVTSMGGKSSCPVCGISYSFEHLQANQHLANIVERLKEVKLSPDNGKKRDLCDHHGEKLLLFCKEDRKVICWLCERSQEHRGHHTVLTEEVFKECQEKLQAVLKRLKKEEEEAEKLEADIREEKTSWKARGDSEGFLRQES

SEQ ID NO: 7087 - DNA, 1039 bp, Homo sapiens
atttgttgaatgaatcctgaccacacccaccctggcttttcttcacctcttcaaccaggagccgagatttctgttgctctgaagccatccaggggtctttaaccagaagagagaggagagcctcaggagttaggaccagaagaagccagggaagcagtgcaatggcttcaaaaatcttgcttaacgtacaagaggaggtgacctgtcccatctgcctggagctgttgacagaacccttgagtctagactgtggccacagcctctgccgagcctgcatcactgtgagcaacaaggaggcagtgaccagcatgggaggaaaaagcagctgtcctgtgtgtggtatcagttactcatttgaacatctacaggctaatcagcatctggccaacatagtggagagactcaaggaggtcaagttgagcccagacaatgggaagaagagagatctctgtgatcatcatggagagaaactcctactcttctgtaaggaggataggaaagtcatttgctggctttgtgagcggtctcaggagcaccgtggtcaccacacagtcctcacggaggaagtattcaaggaatgtcaggagaaactccaggcagtcctcaagaggctgaagaaggaagaggaggaagctgagaagctggaagctgacatcagagaagagaaaacttcctggaagtatcaggtacaaactgagagacaaaggatacaaacagaatttgatcagcttagaagcatcctaaataatgaggagcagagagagctgcaaagattggaagaagaagaaaagaagacgctggataagtttgcagaggctgaggatgagctagttcagcagaagcagttggtgagagagctcatctcagatgtggagtgtcggagtcagtggtcaacaatggagctgctgcaggacatgagtggaatcatgaaatggtgcgtatgggtggccaggagtggtgcttgtgagttataaagaagtgtttgtagctattagagttatttggtggtcaattggaataaaaaatctcccagagtagt

SEQ ID NO: 7088 - protein, 270 aa, Homo sapiens; identical to SEQ ID NO: 986

SEQ ID NO: 7089 - DNA, 2314 bp, Homo sapiens
atttgttgaatgaatcctgaccacacccaccctggcttttcttcacctcttcaaccaggagccgagatttctgttgctctgaagccatccaggggtctttaaccagaagagagaggagagcctcaggagttaggaccagaagaagccagggaagcagtgcaatggcttcaaaaatcttgcttaacgtacaagaggaggtgacctgtcccatctgcctggagctgttgacagaacccttgagtctagactgtggccacagcctctgccgagcctgcatcactgtgagcaacaaggaggcagtgaccagcatgggaggaaaaagcagctgtcctgtgtgtggtatcagttactcatttgaacatctacaggctaatcagcatctggccaacatagtggagagactcaaggaggtcaagttgagcccagacaatgggaagaagagagatctctgtgatcatcatggagagaaactcctactcttctgtaaggaggataggaaagtcatttgctggctttgtgagcggtctcaggagcaccgtggtcaccacacagtcctcacggaggaagtattcaaggaatgtcaggagaaactccaggcagtcctcaagaggctgaagaaggaagaggaggaagctgagaagctggaagctgacatcagagaagagaaaacttcctggaagtatcaggtacaaactgagagacaaaggatacaaacagaatttgatcagcttagaagcatcctaaataatgaggagcagagagagctgcaaagattggaagaagaagaaaagaagacgctggataagtttgcagaggctgaggatgagctagttcagcagaagcagttggtgagagagctcatctcagatgtggagtgtcggagtcagtggtcaacaatggagctgctgcaggacatgagtggaatcatgaaatggagtgagatctggaggctgaaaaagccaaaaatggtttccaagaaactgaagactgtattccatgctccagatctgagtaggatgctgcaaatgtttagagaactgacagctgtccggtgctactgggtggatgtcacactgaattcagtcaacctaaatttgaatcttgtcctttcagaagatcagagacaagtgatatctgtgccaatttggccttttcagtgttataattatggtgtcttgggatcccaatatttctcctctgggaaacattactgggaagtggacgtgtccaagaaaactgcctggatcctgggggtatactgtagaacatattcccgccatatgaagtatgttgttagaagatgtgcaaatcgtcaaaatctttacaccaaatacagacctctatttggctactgggttatagggttacagaataaatgtaagtatggtgtctttgaagagtctttgtcctctgatcccgaggttttgactctctccatggctgtgcctccctgccgtgttggggttttcctcgactatgaagcaggcattgtctcatttttcaatgtcacaagccatggctccctcatttacaagttctctaaatgttgcttttctcagcctgtttatccatatttcaatccttggaactgtccagctcccatgactctatgcccaccaagctcttgaattttctcatttcttcacctacaaccctttgtcttgacttatctcctgcaactgactcatctgcaacattcacaccattgcttccttgtggtttcccttctttagaacttttactcatccttgagatgtatggtgtatttggcttgagttatgagagatgcttatttattcatttactctttttcatattttcagagaaagttacctaatccctcctaaagacacagcagtatgggtataacatccttgccttcccatttatccatgtttcactttatcactgatatgaagaggcccaaagcctgttagccaccatccatgctacctaggtagtccataggaaccacccccatgaccaccaccaacatcaactaaaggttcttggagggtatgtcagtgtgttgctcaggataccccaggtacatcaaggaatcaaggagaggaaaatatgagcaatatgtgtattcagagtgaagattttatgtccagagtatttgagctcaaaccttgcctgttgttttctaatcatgatgaatactttctcagtttctttttcctgaaatataaattgggatttaagactgtacctaactattaagatcactgtgtaaaactaagtgtctctaaatgtaatgcatcgatttagtgtctggaacataataaatatttgctctcatgattgctaa

SEQ ID NO: 7090 - protein, 488 aa, Homo sapiens; identical to SEQ ID NO: 980

SEQ ID NO: 7091 - DNA, 2219 bp, Homo sapiens
accctggcttttcttcacctcttcaaccaggagccgagatttctgttgctctgaagccatccaggggtctttaaccagaagagagaggagagcctcaggagttaggaccagaagaagccagggaagcagtgcaatggcttcaaaaatcttgcttaacgtacaagaggaggtgacctgtcccatctgcctggagctgttgacagaacccttgagtctagactgtggccacagcctctgccgagcctgcatcactgtgagcaacaaggaggcagtgaccagcatgggaggaaaaagcagctgtcctgtgtgtggtatcagttactcatttgaacatctacaggctaatcagcatctggccaacatagtggagagactcaaggaggtcaagttgagcccagacaatgggaagaagagagatctctgtgatcatcatggagagaaactcctactcttctgtaaggaggataggaaatattcaaggaatgtcaggagaaactccaggcagtcctcaagaggctgaagaaggaagaggaggaagctgagaagctggaagctgacatcagagaagagaaaacttcctggaagtatcaggtacaaactgagagacaaaggatacaaacagaatttgatcagcttagaagcatcctaaataatgaggagcagagagagctgcaaagattggaagaagaagaaaagaagacgctggataagtttgcagaggctgaggatgagctagttcagcagaagcagttggtgagagagctcatctcagatgtggagtgtcggagtcagtggtcaacaatggagctgctgcaggacatgagtggaatcatgaaatggagtgagatctggaggctgaaaaagccaaaaatggtttccaagaaactgaagactgtattccatgctccagatctgagtaggatgctgcaaatgtttagagaactgacagctgtccggtgctactgggtggatgtcacactgaattcagtcaacctaaatttgaatcttgtcctttcagaagatcagagacaagtgatatctgtgccaatttggccttttcagtgttataattatggtgtcttgggatcccaatatttctcctctgggaaacattactgggaagtggacgtgtccaagaaaactgcctggatcctgggggtatactgtagaacatattcccgccatatgaagtatgttgttagaagatgtgcaaatcgtcaaaatctttacaccaaatacagacctctatttggctactgggttatagggttacagaataaatgtaagtatggtgtctttgaagagtctttgtcctctgatcccgaggttttgactctctccatggctgtgcctccctgccgtgttggggttttcctcgactatgaagcaggcattgtctcatttttcaatgtcacaagccatggctccctcatttacaagttctctaaatgttgcttttctcagcctgtttatccatatttcaatccttggaactgtccagctcccatgactctatgcccaccaagctcttgaattttctcatttcttcacctacaaccctttgtcttgacttatctcctgcaactgactcatctgcaacattcacaccattgcttccttgtggtttcccttctttagaacttttactcatccttgagatgtatggtgtatttggcttgagttatgagagatgcttatttattcatttactctttttcatattttcagagaaagttacctaatccctcctaaagacacagcagtatgggtataacatccttgccttcccatttatccatgtttcactttatcactgatatgaagaggcccaaagcctgttagccaccatccatgctacctaggtagtccataggaaccacccccatgaccaccaccaacatcaactaaaggttcttggagggtatgtcagtgtgttgctcaggataccccaggtacatcaaggaatcaaggagaggaaaatatgagcaatatgtgtattcagagtgaagattttatgtccagagtatttgagctcaaaccttgcctgttgttttctaatcatgatgaatactttctcagtttctttttcctgaaatataaattgggatttaagactgtacctaactattaagatcactgtgtaaaactaagtgtctctaaatgtaatgcatcgatttagtgtctggaacataataaatatttgctctcatgattgctaa

SEQ ID NO: 7092 - protein, 243 aa, Homo sapiens; identical to SEQ ID NO: 984

SEQ ID NO: 7093 - DNA, 1985 bp, Homo sapiens
cttcacctcttcaaccaggagccgagatttctgttgctctgaagccatccaggggtctttaaccagaagagagaggagagcctcaggagttaggaccagaagaagccagggaagcagtgcaatggcttcaaaaatcttgcttaacgtacaagaggaggtgacctgtcccatctgcctggagctgttgacagaacccttgagtctagactgtggccacagcctctgccgagcctgcatcactgtgagcaacaaggaggcagtgaccagcatgggaggaaaaagcagctgtcctgtgtgtggtatcagttactcatttgaacatctacaggctaatcagcatctggccaacatagtggagagactcaaggaggtcaagttgagcccagacaatgggaagaagagagatctctgtgatcatcatggagagaaactcctactcttctgtaaggaggataggaaatattcaaggaatgtcaggagaaactccaggcagtcctcaagaggctgaagaaggaagaggaggaagctgagaagctggaagctgacatcagagaagagaaaacttcctggaagtatcaggtacaaactgagagacaaaggatacaaacagaatttgatcagcttagaagcatcctaaataatgaggagcagagagagctgcaaagattggaagaagaagaaaagaagacgctggataagtttgcagaggctgaggatgagctagttcagcagaagcagttggtgagagagctcatctcagatgtggagtgtcggagtcagtggtcaacaatggagctgctgcaggacatgagtggaatcatgaaatggagtgagatctggaggctgaaaaagccaaaaatggtttccaagaaactgaagactgtattccatgctccagatctgagtaggatgctgcaaatgtttagagaactgacagctgtccggtgctactgggtggatgtcacactgaattcagtcaacctaaatttgaatcttgtcctttcagaagatcagagacaagtgatatctgtgccaatttggccttttcagtgttataattatggtgtcttgggatcccaatatttctcctctgggaaacattactgggaagtggacgtgtccaagaaaactgcctggatcctgggggtatactgtagaacatattcccgccatatgaagtatgttgttagaagatgtgcaaatcgtcaaaatctttacaccaaatacagacctctatttggctactgggttatagggttacagaataaatgtaagtatggtgtctttgaagagtctttgtcctctgatcccgaggttttgactctctccatggctgtgcctccctgccgtgttggggttttcctcgactatgaagcaggcattgtctcatttttcaatgtcacaagccatggctccctcatttacaagttctctaaatgttgcttttctcagcctgtttatccatatttcaatccttggaactgtccagctcccatgactctatgcccaccaagctcttgaattttctcatttcttcacctacaaccctttgtcttgacttatctcctgcaactgactcatctgcaacattcacaccattgcttccttgtggtttcccttctttagaacttttactcatccttgagatgtatggtgtatttggcttgagttatgagagatgcttatttattcatttactctttttcatattttcagagaaagttacctaatccctcctaaagacacagcagtatgggtataacatccttgccttcccatttatccatgtttcactttatcactgatatgaagaggcccaaagcctgttagccaccatccatgctacctaggtagtccataggaaccacccccatgaccaccaccaacatcaactaaaggttcttggagggtatgtcagtgtgttgctcaggataccccaggtacatcaaggaatcaaggagaggaaaatatgagcaatatgtgta

SEQ ID NO: 7094 - protein, 243 aa, Homo sapiens; identical to SEQ ID NO: 984

SEQ ID NO: 7095 - DNA, 1044 bp, Homo sapiens
ctcttcaaccaggagccgagatttctgttgctctgaaggagaacagtgtggaagattaagatgggagtgtgcctggagaggcataaaagccatccaggggtctttaaccagaagagagaggagagcctcaggagttaggaccagaagaagccagggaagcagtgcaatggcttcaaaaatcttgcttaacgtacaagaggaggtgacctgtcccatctgcctggagctgttgacagaacccttgagtctagactgtggccacagcctctgccgagcctgcatcactgtgagcaacaaggaggcagtgaccagcatgggaggaaaaagcagctgtcctgtgtgtggtatcagttactcatttgaacatctacaggctaatcagcatctggccaacatagtggagagactcaaggaggtcaagttgagcccagacaatgggaagaagagagatctctgtgatcatcatggagagaaactcctactcttctgtaaggaggataggaaagtcatttgctggctttgtgagcggtctcaggagcaccgtggtcaccacacagtcctcacggaggaagtattcaaggaatgtcaggagaaactccaggcagtcctcaagaggctgaagaaggaagaggaggaagctgagaagctggaagctgacatcagagaagagaaaacttcctggaagtatcaggtacaaactgagagacaaaggatacaaacagaatttgatcagcttagaagcatcctaaataatgaggagcagagagagctgcaaagattggaagaagaagaaaagaagacgctggataagtttgcagaggctgaggatgagctagttcagcagaagcagttggtgagagagctcatctcagatgtggagtgtcggagtcagtggtcaacaatggagctgctgcaggacatgagtggaatcatgaaatggtgcgtatgggtggccaggagtggtgcttgtgagttataaagaagtgtttgtagctattagagttatttggtggtcaattggaataaaaaatctcccagagtagt

SEQ ID NO: 7096 - protein, 270 aa, Homo sapiens; identical to SEQ ID NO: 986

SEQ ID NO: 7097 - DNA, 960 bp, Homo sapiens
atggatacctccaccagtgttacctatgactccagcctccagatttcccagttcatcctgatgggattaccaggcattcatgagtggcagcactggctctccctgcccctgactctgctctacctcttagctcttggtgccaatctcctcatcataatcaccattcaacatgagaccgtgctacatgaacccatgtaccatttgctgggcatattagcagtggtggacattggcctggccaccaccatcatgcccaagatcctggccatcttctggtttgatgccaaggccattagcctccccatgtgttttgctcagatctatgccatccactgcttcttctgcatagagtcaggcatctttctctgcatggcagtagacagatacatagccatctgtcgccctcttcagtacccctccatagtcactaaagcttttgtcttcaaagccacagggttcatcatgctcaggaatggcctgttgaccatcccagtgcctatactggctgcccagagacactactgttccaggaatgaaatcgagcactgcctctgctctaacttgggggttatcagcctggcttgtgatgacatcactgtgaacaaattttaccaactgatgctagcatgggtcttggttgggagtgatatggctctggtattttcttcctatgctgtaatccttcactctgtgctgaggctgaactcagcagaagcaatgtccaaggctctgagcacttgtagctcccacctcatcctcatcctcttccacacaggtatcattgtgctgtctgtcacacaccttgcagagaaaaagattccccttattcctgtgttccttaatgtgctgcacaatgtcatcccccctgcactcaaccccctggcctgtgcactcaggatgcacaaactcagactgggctttcagagactgcttggactgggtcaggacgtgtccaagtaa

SEQ ID NO: 7098 - protein, 319 aa, Homo sapiens; identical to SEQ ID NO: 988

SEQ ID NO: 7099 - DNA, 4540 bp, Homo sapiens
cccctgctgctctcaagtttcccgttggcggcgcggcccgggcgcttcaggtagcctctcggctctctctgctccgctccgcgcccaggtagggcaccgacgggggctgcacgcggctggccggcttcctccctgctgaggcggccctccctcctcccgcggggccctcctggccggggatccgcagcgctgcgccctctgaacgcccggcccccgcgcctgctgcggggcgcggcctggccgggccctggccccggctggcctcagtgcccagcagccccgctccgctctgcccagcgcgtcccctttgctccagccctgcggccgtccctttcggccggcggcatggccctgtcgtccgaacccgctgagatgccgcggcagtttcccaagctgaacatctctgaagtggatgagcaagtccggctcctggcggagaaggtgtttgctaaagtgctccgagaagaggacagcaaagatgccctgtccctgttcactgtcccagaggactgccccatcgggcaaaaggaagccaaggagagggagctgcagaaggagctggcagagcagaagtctgtggagaccgcaaaaagaaagaaaagtttcaagatgattcggtcccagtccctgtctctgcaaatgccgccacagcaagattggaagggccccccggcagccagtccggccatgtctcccacaacccctgtggtcactggagccacttccctgcccacgccagcaccctatgccatgcctgagttccagcgggtcaccatcagcggagattactgtgccgggatcactttggaggactatgagcaggcagccaagagtctggccaaggccctaatgatccgggagaagtatgcgcggctcgcctaccaccgcttcccgcggatcacatcccagtacctgggtcatccgcgggcggatactgcacctccggaagagggccttccagacttccaccctcctccactgccccaggaagacccctactgcctggatgatgcaccccccaacctggattacttggtccacatgcaggggggcatcctctttgtgtatgataacaagaagatgctggagcaccaggagccgcacagcctaccctaccccgacctggagacctacacggtggacatgagccacatcctggctctcatcaccgatggccccacgaaaacctattgtcaccggcgactgaactttctggaatccaagttcagccttcatgagatgttaaacgaaatgtccgagttcaaagagttgaagagtaacccccaccgggacttctataacgtgagaaaggtggacacacacatccatgcggccgcctgcatgaaccaaaagcatctgctgcgcttcatcaagcacacataccagacggagcctgacaggactgtggcagagaagcggggccggaagatcaccctgcggcaggtgtttgacggcctgcacatggacccctacgacctcactgtggactcactggatgtccacgcgggccggcagacattccaccgctttgacaagttcaactccaaatacaaccctgtgggggccagtgagctgcgtgacctgtatttgaaaactgaaaactatctgggaggagagtactttgctcggatggtcaaggaggttgcccgggagctggaggagagcaagtaccagtactcagagccacggctctccatctacggccgcagtcctgaggagtggcccaacctggcctactggttcatccagcacaaggtctactctcccaacatgcgctggatcatccaggtgccccggatttatgacatatttaggtcaaagaagctgctgccaaactttgggaagatgctggagaacatcttcctgccccttttcaaggccactatcaacccccaagatcatcgagagcttcacctcttccttaaatatgtgacggggtttgacagcgtggatgatgagtccaagcacagcgaccacatgttttccgacaagagcccaaacccggacgtctggaccagtgagcagaacccaccctacagctactacctgtactacatgtatgccaacatcatggtgctcaacaacctccgcagggagcgcggcctgagcacgttcctgttccggccgcactgtggggaagccggctccatcacccacctggtgtctgccttcctcactgctgacaacatttcccacgggctgctcctcaagaagagtccggtattgcagtatctctactaccttgctcagatccccattgccatgtctcctcttagcaacaacagtttgttcctcgaatattccaagaaccctctgagggaattcctacacaagggactgcatgtttctctttccaccgatgaccccatgcagttccactacacgaaggaagcacttatggaagaatatgccattgcagctcaagtgtggaagctgagcacctgcgacctgtgtgagatcgccaggaacagcgtgctgcagagcggcctctcgcatcaggaaaagcaaaagtttctgggacaaaattattataaagaaggacctgaaggaaatgatattcgaaagacaaatgtggctcagatccggatggcattccgatatgagaccttatgcaatgagctcagcttcctgtctgatgctatgaaatcagaagagatcaccgccttgaccaactaggtccagcatttgacatgcattttaactttttggttcaatttcaagtctgctgtggctaatagtggtcaagattccgaactaggactttcctctgtgaagaggatgcctctgaagaaattttaaactggtgattttggttgcactgctcactttaagagttaacatgctcacttgttagtatttctgagtaacaagatggtgacttctccttggggatctgggagctgagcacttgtctatacttgttcctaattttccaagtatttctcttgaaactgccagtgcctgaactgttggggccaggattttccctggtcagatgccaagtaacatgtggttttctgccatacttttctccattggcccaggtaggctaattggtagttgttcatttcagcctctggatggctggctgccttaaacacaatcaatttcaaagctccatttcataaaggggctactttgaaggagttaagatggaagacttccttcttgacaaattgtgtttttagtgaatttcttaaaccgttttatttagccctccttccctctttctagttggaagccaaatgtactcatgaaaacagccactcctattctgagtcttggtttcttcacctagaaagtgagggtttggactagatgagtggctttcagggtgttctgtgaatctcctcatgaatactttagggtaggggagggaagggagtgagtgatgctcaggggctgtcaaagtgactgcgttcatcagttttacactggggctgctacataatattttcatttgaacgaagaacttcaaaaagcacaggactagatgatctctgttccttttggctctaatatgctacaactgtaggccaattatcactttaccaattaagagttaggccagataagtgaaatttaacttaagggcacacagctaataagtaataggcctaaactggatttccttattccaaatcctgtcttttccccactattccattagaccccacaaatgttagttgtgtgtgtgtgtgtgtgtgtttttaatcactgtaaccggatgcatttttttaaggcaaaatttctcccttatctactatgatgacttcagaagatacaatggtcccaggggccaagtagaaagcatttttaaagattaatctgaattaagctttatcagtgtactctttatctgtgttactagtgcctggtatgtagtaggtgctcaataaatgcatattgaataactaagtgaatttcttttggcaactttttaaggacatgtgctcttagtacttaagaggctgctcaaggaccttcctatctatttctgtggtcaaattcagactacaggaggtctttttgaatcattatagttagaagaagaatccagtttctgcctgtgaacttatttgactttagattgtctcatcttgtgactttataatgcctgtcccctccactggtcaattcagcatatggaagtataaatgcagtctttttactaggcagatatatatgctatcttacagctaattatgaaattgaatgaaaatccattgttatcttagggattagttttgaaaagcccccgtttatatacatttgccctaacataggaagtattgtgtagtttctcattgtcattttatctgtatcaagtatctttttttaaattgttaaataaagtcagctaggactgtggctcaatagtttaaaactatttaaagataatcatatttaaagcaaatgttaaagatttttactcttaagattgggcaccatgaaaagctatcaataataatagctaatttatcttttactaagactccgacatgaatgacattcactaggaaaactcaaaattttcaaa

SEQ ID NO: 7100 - protein, 776 aa, Homo sapiens; identical to SEQ ID NO: 990

SEQ ID NO: 7101 - DNA, 4503 bp, Homo sapiens
aaacaactgacccatccttcctgagctcttctccccaggatttcaacagcaccacagaaatagccattttgctcatggttatttcccaggaccacaggatttgcctaagtcactgggaggctatgtgtctgttctgagccttcccactctcctaaagggcagatgaagatcagagctttgcaccctgtgatgccattttaatcaaccctgcttggttttagaggattgctcctgtgggtcacttgaggcaggctccaccttccccaggaggagtggcagagtccagccagcgctcggagctggaggcccacgtgggagcagtgagcggctctgagatgccgcggcagtttcccaagctgaacatctctgaagtggatgagcaagtccggctcctggcggagaaggtgtttgctaaagtgctccgagaagaggacagcaaagatgccctgtccctgttcactgtcccagaggactgccccatcgggcaaaaggaagccaaggagagggagctgcagaaggagctggcagagcagaagtctgtggagaccgcaaaaagaaagaaaagtttcaagatgattcggtcccagtccctgtctctgcaaatgccgccacagcaagattggaagggccccccggcagccagtccggccatgtctcccacaacccctgtggtcactggagccacttccctgcccacgccagcaccctatgccatgcctgagttccagcgggtcaccatcagcggagattactgtgccgggatcactttggaggactatgagcaggcagccaagagtctggccaaggccctaatgatccgggagaagtatgcgcggctcgcctaccaccgcttcccgcggatcacatcccagtacctgggtcatccgcgggcggatactgcacctccggaagagggccttccagacttccaccctcctccactgccccaggaagacccctactgcctggatgatgcaccccccaacctggattacttggtccacatgcaggggggcatcctctttgtgtatgataacaagaagatgctggagcaccaggagccgcacagcctaccctaccccgacctggagacctacacggtggacatgagccacatcctggctctcatcaccgatggccccacgaaaacctattgtcaccggcgactgaactttctggaatccaagttcagccttcatgagatgttaaacgaaatgtccgagttcaaagagttgaagagtaacccccaccgggacttctataacgtgagaaaggtggacacacacatccatgcggccgcctgcatgaaccaaaagcatctgctgcgcttcatcaagcacacataccagacggagcctgacaggactgtggcagagaagcggggccggaagatcaccctgcggcaggtgtttgacggcctgcacatggacccctacgacctcactgtggactcactggatgtccacgcgggccggcagacattccaccgctttgacaagttcaactccaaatacaaccctgtgggggccagtgagctgcgtgacctgtatttgaaaactgaaaactatctgggaggagagtactttgctcggatggtcaaggaggttgcccgggagctggaggagagcaagtaccagtactcagagccacggctctccatctacggccgcagtcctgaggagtggcccaacctggcctactggttcatccagcacaaggtctactctcccaacatgcgctggatcatccaggtgccccggatttatgacatatttaggtcaaagaagctgctgccaaactttgggaagatgctggagaacatcttcctgccccttttcaaggccactatcaacccccaagatcatcgagagcttcacctcttccttaaatatgtgacggggtttgacagcgtggatgatgagtccaagcacagcgaccacatgttttccgacaagagcccaaacccggacgtctggaccagtgagcagaacccaccctacagctactacctgtactacatgtatgccaacatcatggtgctcaacaacctccgcagggagcgcggcctgagcacgttcctgttccggccgcactgtggggaagccggctccatcacccacctggtgtctgccttcctcactgctgacaacatttcccacgggctgctcctcaagaagagtccggtattgcagtatctctactaccttgctcagatccccattgccatgtctcctcttagcaacaacagtttgttcctcgaatattccaagaaccctctgagggaattcctacacaagggactgcatgtttctctttccaccgatgaccccatgcagttccactacacgaaggaagcacttatggaagaatatgccattgcagctcaagtgtggaagctgagcacctgcgacctgtgtgagatcgccaggaacagcgtgctgcagagcggcctctcgcatcaggaaaagcaaaagtttctgggacaaaattattataaagaaggacctgaaggaaatgatattcgaaagacaaatgtggctcagatccggatggcattccgatatgagaccttatgcaatgagctcagcttcctgtctgatgctatgaaatcagaagagatcaccgccttgaccaactaggtccagcatttgacatgcattttaactttttggttcaatttcaagtctgctgtggctaatagtggtcaagattccgaactaggactttcctctgtgaagaggatgcctctgaagaaattttaaactggtgattttggttgcactgctcactttaagagttaacatgctcacttgttagtatttctgagtaacaagatggtgacttctccttggggatctgggagctgagcacttgtctatacttgttcctaattttccaagtatttctcttgaaactgccagtgcctgaactgttggggccaggattttccctggtcagatgccaagtaacatgtggttttctgccatacttttctccattggcccaggtaggctaattggtagttgttcatttcagcctctggatggctggctgccttaaacacaatcaatttcaaagctccatttcataaaggggctactttgaaggagttaagatggaagacttccttcttgacaaattgtgtttttagtgaatttcttaaaccgttttatttagccctccttccctctttctagttggaagccaaatgtactcatgaaaacagccactcctattctgagtcttggtttcttcacctagaaagtgagggtttggactagatgagtggctttcagggtgttctgtgaatctcctcatgaatactttagggtaggggagggaagggagtgagtgatgctcaggggctgtcaaagtgactgcgttcatcagttttacactggggctgctacataatattttcatttgaacgaagaacttcaaaaagcacaggactagatgatctctgttccttttggctctaatatgctacaactgtaggccaattatcactttaccaattaagagttaggccagataagtgaaatttaacttaagggcacacagctaataagtaataggcctaaactggatttccttattccaaatcctgtcttttccccactattccattagaccccacaaatgttagttgtgtgtgtgtgtgtgtgtgtttttaatcactgtaaccggatgcatttttttaaggcaaaatttctcccttatctactatgatgacttcagaagatacaatggtcccaggggccaagtagaaagcatttttaaagattaatctgaattaagctttatcagtgtactctttatctgtgttactagtgcctggtatgtagtaggtgctcaataaatgcatattgaataactaagtgaatttcttttggcaactttttaaggacatgtgctcttagtacttaagaggctgctcaaggaccttcctatctatttctgtggtcaaattcagactacaggaggtctttttgaatcattatagttagaagaagaatccagtttctgcctgtgaacttatttgactttagattgtctcatcttgtgactttataatgcctgtcccctccactggtcaattcagcatatggaagtataaatgcagtctttttactaggcagatatatatgctatcttacagctaattatgaaattgaatgaaaatccattgttatcttagggattagttttgaaaagcccccgtttatatacatttgccctaacataggaagtattgtgtagtttctcattgtcattttatctgtatcaagtatctttttttaaattgttaaataaagtcagctaggactgtggctcaatagtttaaaactatttaaagataatcatatttaaagcaaatgttaaagatttttactcttaagattgggcaccatgaaaagctatcaataataatagctaatttatcttttactaagactccgacatgaatgacattcactaggaaaactcaaaattttcaaa

SEQ ID NO: 7102 - protein, 767 aa, Homo sapiens; identical to SEQ ID NO: 992

SEQ ID NO: 7103 - DNA, 3848 bp, Homo sapiens
aggatttcaacagcaccacagaaatagccattttgctcatggttatttcccaggaccacaggatttgcctaagtcactgggaggctatgtgtctgttctgagccttcccactctcctaaagggcagatgaagatcagagctttgcaccctgtgatgccattttaatcaaccctgcttggttttagaggattgctcctgtgggtcacttgaggcaggctccaccttccccaggaggagtggcagagtccagccagcgctcggagctggaggcccacgtgggagcagtgagcggctctgagatgccgcggcagtttcccaagctgaacatctctgaagtggatgagcaagtccggctcctggcggagaaggtgtttgctaaagtgctccgagaagaggacagcaaagatgccctgtccctgttcactgtcccagaggactgccccatcgggcaaaaggaagccaaggagagggagctgcagaaggagctggcagagcagaagtctgtggagaccgcaaaaagaaagaaaagtttcaagatgattcggtcccagtccctgtctctgcaaatgccgccacagcaagattggaagggccccccggcagccagtccggccatgtctcccacaacccctgtggtcactggagccacttccctgcccacgccagcaccctatgccatgcctgagttccagcgggtcaccatcagcggagattactgtgccgggatcactttggaggactatgagcaggcagccaagagtctggccaaggccctaatgatccgggagaagtatgcgcggctcgcctaccaccgcttcccgcggatcacatcccagtacctgggtcatccgcgggcggatactgcacctccggaagagggccttccagacttccaccctcctccactgccccaggaagacccctactgcctggatgatgcaccccccaacctggattacttggtccacatgcaggggggcatcctctttgtgtatgataacaagaagatgctggagcaccaggagccgcacagcctaccctaccccgacctggagacctacacggtggacatgagccacatcctggctctcatcaccgatggccccacgaaaacctattgtcaccggcgactgaactttctggaatccaagttcagccttcatgagatgttaaacgaaatgtccgagttcaaagagttgaagagtaacccccaccgggacttctataacgtgagaaaggtggacacacacatccatgcggccgcctgcatgaaccaaaagcatctgctgcgcttcatcaagcacacataccagacggagcctgacaggactgtggcagagaagcggggccggaagatcaccctgcggcaggtgtttgacggcctgcacatggacccctacgacctcactgtggactcactggatgtccacgcgggccggcagacattccaccgctttgacaagttcaactccaaatacaaccctgtgggggccagtgagctgcgtgacctgtatttgaaaactgaaaactatctgggaggagagtactttgctcggatggtcaaggaggttgcccgggagctggaggagagcaagtaccagtactcagagccacggctctccatctacggccgcagtcctgaggagtggcccaacctggcctactggttcatccagcacaaggtctactctcccaacatgcgctggatcatccaggtgccccggatttatgacatatttaggtcaaagaagctgctgccaaactttgggaagatgctggagaacatcttcctgccccttttcaaggccactatcaacccccaagatcatcgagagcttcacctcttccttaaatatgtgacggggtttgacagcgtggatgatgagtccaagcacagcgaccacatgttttccgacaagagcccaaacccggacgtctggaccagtgagcagaacccaccctacagctactacctgtactacatgtatgccaacatcatggtgctcaacaacctccgcagggagcgcggcctgagcacgttcctgttccggccgcactgtggggaagccggctccatcacccacctggtgtctgccttcctcactgctgacaacatttcccacgggctgctcctcaagaagagtccggtattgcagtatctctactaccttgctcagatccccattgccatgtctcctcttagcaacaacagtttgttcctcgaatattccaagaaccctctgagggaattcctacacaagggactgcatgtttctctttccaccgatgaccccatgcagttccactacacgaaggaagcacttatggaagaatatgccattgcagctcaagtgtggaagctgagcacctgcgacctgtgtgagatcgccaggaacagcgtgctgcagagcggcctctcgcatcaggaaaagcaaaagtttctgggacaaaattattataaagaaggacctgaaggaaatgatattcgaaagacaaatgtggctcagatccggatggcattccgatatgagaccttatgcaatgagctcagcttcctgtctgatgctatgaaatcagaagagatcaccgccttgaccaactaggtccagcatttgacatgcattttaactttttggttcaatttcaagtctgctgtggctaatagtggtcaagattccgaactaggactttcctctgtgaagaggatgcctctgaagaaattttaaactggtgattttggttgcactgctcactttaagagttaacatgctcacttgttagtatttctgagtaacaagatggtgacttctccttggggatctgggagctgagcacttgtctatacttgttcctaattttccaagtatttctcttgaaactgccagtgcctgaactgttggggccaggattttccctggtcagatgccaagtaacatgtggttttctgccatacttttctccattggcccaggtaggctaattggtagttgttcatttcagcctctggatggctggctgccttaaacacaatcaatttcaaagctccatttcataaaggggctactttgaaggagttaagatggaagacttccttcttgacaaattgtgtttttagtgaatttcttaaaccgttttatttagccctccttccctctttctagttggaagccaaatgtactcatgaaaacagccactcctattctgagtcttggtttcttcacctagaaagtgagggtttggactagatgagtggctttcagggtgttctgtgaatctcctcatgaatactttagggtaggggagggaagggagtgagtgatgctcaggggctgtcaaagtgactgcgttcatcagttttacactggggctgctacataatattttcatttgaacgaagaacttcaaaaagcacaggactagatgatctctgttccttttggctctaatatgctacaactgtaggccaattatcactttaccaattaagagttaggccagataagtgaaatttaacttaagggcacacagctaataagtaataggcctaaactggatttccttattccaaatcctgtcttttccccactattccattagaccccacaaatgttagttgtgtgtgtgtgtgtgtgtgtttttaatcactgtaaccggatgcatttttttaaggcaaaatttctcccttatctactatgatgacttcagaagatacaatggtcccaggggccaagtagaaagcatttttaaagattaatctgaattaagctttatcagtgtactctttatctgtgttactagtgcctggtatgtagtaggtgctcaataaatgcatattgaataactaagtg

SEQ ID NO: 7104 - protein, 767 aa, Homo sapiens; identical to SEQ ID NO: 992

SEQ ID NO: 7105 - DNA, 4903 bp, Homo sapiens
ctgctccctgagtctctgtcctttcctgggaaaggtggaagcagttcatggtctttccctttcagaggaggaggggatggaggggattgtattagcaactgggattgaagctccccctggcagttatggggtgcccttgggagggctgctttaggggggctttctgagaagaggcaggtcgggctgtacctgagaccaatccccttgataaaatgcagccaggcctgaagcacgttcagaacggaagcagcaaaggtgatgatatcgctcgttgctactcagctttcaggaggaggctgggcgttagagggaggctgtggcttatctcctgcagctgggcaggacggctgagtttactgttgtaaagaggaagccgccgctttagtttcctcttgtgagggctgtgaagagggccaggacactgcattcaggataccacagccattttgttttggataactgggattacctggggacttcagggctcttggaaattttccactcatatttcatattcacgagagaatttccagcccaggcttttcctgctctggctcactgctgctcacagatatgcaaaacagagacctcctactccagccggcagacaggacccagccagctgcacgcacgcactgactcagctgagcctcctgggtggcaggcagcacctcacccgggtgcatcacttgagtggcatcttcaggaccagtcatggagccaggctcagctgagatgccgcggcagtttcccaagctgaacatctctgaagtggatgagcaagtccggctcctggcggagaaggtgtttgctaaagtgctccgagaagaggacagcaaagatgccctgtccctgttcactgtcccagaggactgccccatcgggcaaaaggaagccaaggagagggagctgcagaaggagctggcagagcagaagtctgtggagaccgcaaaaagaaagaaaagtttcaagatgattcggtcccagtccctgtctctgcaaatgccgccacagcaagattggaagggccccccggcagccagtccggccatgtctcccacaacccctgtggtcactggagccacttccctgcccacgccagcaccctatgccatgcctgagttccagcgggtcaccatcagcggagattactgtgccgggatcactttggaggactatgagcaggcagccaagagtctggccaaggccctaatgatccgggagaagtatgcgcggctcgcctaccaccgcttcccgcggatcacatcccagtacctgggtcatccgcgggcggatactgcacctccggaagagggccttccagacttccaccctcctccactgccccaggaagacccctactgcctggatgatgcaccccccaacctggattacttggtccacatgcaggggggcatcctctttgtgtatgataacaagaagatgctggagcaccaggagccgcacagcctaccctaccccgacctggagacctacacggtggacatgagccacatcctggctctcatcaccgatggccccacgaaaacctattgtcaccggcgactgaactttctggaatccaagttcagccttcatgagatgttaaacgaaatgtccgagttcaaagagttgaagagtaacccccaccgggacttctataacgtgagaaaggtggacacacacatccatgcggccgcctgcatgaaccaaaagcatctgctgcgcttcatcaagcacacataccagacggagcctgacaggactgtggcagagaagcggggccggaagatcaccctgcggcaggtgtttgacggcctgcacatggacccctacgacctcactgtggactcactggatgtccacgcgggccggcagacattccaccgctttgacaagttcaactccaaatacaaccctgtgggggccagtgagctgcgtgacctgtatttgaaaactgaaaactatctgggaggagagtactttgctcggatggtcaaggaggttgcccgggagctggaggagagcaagtaccagtactcagagccacggctctccatctacggccgcagtcctgaggagtggcccaacctggcctactggttcatccagcacaaggtctactctcccaacatgcgctggatcatccaggtgccccggatttatgacatatttaggtcaaagaagctgctgccaaactttgggaagatgctggagaacatcttcctgccccttttcaaggccactatcaacccccaagatcatcgagagcttcacctcttccttaaatatgtgacggggtttgacagcgtggatgatgagtccaagcacagcgaccacatgttttccgacaagagcccaaacccggacgtctggaccagtgagcagaacccaccctacagctactacctgtactacatgtatgccaacatcatggtgctcaacaacctccgcagggagcgcggcctgagcacgttcctgttccggccgcactgtggggaagccggctccatcacccacctggtgtctgccttcctcactgctgacaacatttcccacgggctgctcctcaagaagagtccggtattgcagtatctctactaccttgctcagatccccattgccatgtctcctcttagcaacaacagtttgttcctcgaatattccaagaaccctctgagggaattcctacacaagggactgcatgtttctctttccaccgatgaccccatgcagttccactacacgaaggaagcacttatggaagaatatgccattgcagctcaagtgtggaagctgagcacctgcgacctgtgtgagatcgccaggaacagcgtgctgcagagcggcctctcgcatcaggaaaagcaaaagtttctgggacaaaattattataaagaaggacctgaaggaaatgatattcgaaagacaaatgtggctcagatccggatggcattccgatatgagaccttatgcaatgagctcagcttcctgtctgatgctatgaaatcagaagagatcaccgccttgaccaactaggtccagcatttgacatgcattttaactttttggttcaatttcaagtctgctgtggctaatagtggtcaagattccgaactaggactttcctctgtgaagaggatgcctctgaagaaattttaaactggtgattttggttgcactgctcactttaagagttaacatgctcacttgttagtatttctgagtaacaagatggtgacttctccttggggatctgggagctgagcacttgtctatacttgttcctaattttccaagtatttctcttgaaactgccagtgcctgaactgttggggccaggattttccctggtcagatgccaagtaacatgtggttttctgccatacttttctccattggcccaggtaggctaattggtagttgttcatttcagcctctggatggctggctgccttaaacacaatcaatttcaaagctccatttcataaaggggctactttgaaggagttaagatggaagacttccttcttgacaaattgtgtttttagtgaatttcttaaaccgttttatttagccctccttccctctttctagttggaagccaaatgtactcatgaaaacagccactcctattctgagtcttggtttcttcacctagaaagtgagggtttggactagatgagtggctttcagggtgttctgtgaatctcctcatgaatactttagggtaggggagggaagggagtgagtgatgctcaggggctgtcaaagtgactgcgttcatcagttttacactggggctgctacataatattttcatttgaacgaagaacttcaaaaagcacaggactagatgatctctgttccttttggctctaatatgctacaactgtaggccaattatcactttaccaattaagagttaggccagataagtgaaatttaacttaagggcacacagctaataagtaataggcctaaactggatttccttattccaaatcctgtcttttccccactattccattagaccccacaaatgttagttgtgtgtgtgtgtgtgtgtgtttttaatcactgtaaccggatgcatttttttaaggcaaaatttctcccttatctactatgatgacttcagaagatacaatggtcccaggggccaagtagaaagcatttttaaagattaatctgaattaagctttatcagtgtactctttatctgtgttactagtgcctggtatgtagtaggtgctcaataaatgcatattgaataactaagtgaatttcttttggcaactttttaaggacatgtgctcttagtacttaagaggctgctcaaggaccttcctatctatttctgtggtcaaattcagactacaggaggtctttttgaatcattatagttagaagaagaatccagtttctgcctgtgaacttatttgactttagattgtctcatcttgtgactttataatgcctgtcccctccactggtcaattcagcatatggaagtataaatgcagtctttttactaggcagatatatatgctatcttacagctaattatgaaattgaatgaaaatccattgttatcttagggattagttttgaaaagcccccgtttatatacatttgccctaacataggaagtattgtgtagtttctcattgtcattttatctgtatcaagtatctttttttaaattgttaaataaagtcagctaggactgtggctcaatagtttaaaactatttaaagataatcatatttaaagcaaatgttaaagatttttactcttaagattgggcaccatgaaaagctatcaataataatagctaatttatcttttactaagactccgacatgaatgacattcactaggaaaactcaaaattttcaaa

SEQ ID NO: 7106 - protein, 774 aa, Homo sapiens; identical to SEQ ID NO: 994

SEQ ID NO: 7107 - DNA, 2152 bp, Homo sapiens
agcggcagtggggtggggaagaggtcacagacggcttgtgatgaatagacacttcacatcccagaagggaagcaaaaccacagctcaaacccagatcattctgggattacaccattttaccacttatcctatgatcacttctcattttttttttgatgttccatctctgcttttagtactttactcatctatctatctatctatctatctatctatctatttatctatctatcatctatctatctattgcaaacttaagaaaatagtgtgttaaaaagaaaagctagagggcaagtgctaaatgtggcatgactagagggcttgtcacaggagagcagagactgccatccctgatgactggcacagggtttcaacatgaggtctcagtgctggtcaatgaataaatgtagaggcgtgattttagatctctctttgataacccatgattttacagaagaaaagatcttaggctttgaaggtgtgatgtttgatgatccaggtgccatttagtgaggaaaagttaaacccgcagtgtctgatgttgttagctttggacatgtgtgaacgattgacatggatatccccccttctaatccacatgctttgggggaggatctaggaagcacttatggaagaatatgccattgcagctcaagtgtggaagctgagcacctgcgacctgtgtgagatcgccaggaacagcgtgctgcagagcggcctctcgcatcaggaaaagcaaaagtttctgggacaaaattattataaagaaggacctgaaggaaatgatattcgaaagacaaatgtggctcagatccggatggcattccgatatgagaccttatgcaatgagctcagcttcctgtctgatgctatgaaatcagaagagatcaccgccttgaccaactaggtccagcatttgacatgcattttaactttttggttcaatttcaagtctgctgtggctaatagtggtcaagattccgaactaggactttcctctgtgaagaggatgcctctgaagaaattttaaactggtgattttggttgcactgctcactttaagagttaacatgctcacttgttagtatttctgagtaacaagatggtgacttctccttggggatctgggagctgagcacttgtctatacttgttcctaattttccaagtatttctcttgaaactgccagtgcctgaactgttggggccaggattttccctggtcagatgccaagtaacatgtggttttctgccatacttttctccattggcccaggtaggctaattggtagttgttcatttcagcctctggatggctggctgccttaaacacaatcaatttcaaagctccatttcataaaggggctactttgaaggagttaagatggaagacttccttcttgacaaattgtgtttttagtgaatttcttaaaccgttttatttagccctccttccctctttctagttggaagccaaatgtactcatgaaaacagccactcctattctgagtcttggtttcttcacctagaaagtgagggtttggactagatgagtggctttcagggtgttctgtgaatctcctcatgaatactttagggtaggggagggaagggagtgagtgatgctcaggggctgtcaaagtgactgcgttcatcagttttacactggggctgctacataatattttcatttgaacgaagaacttcaaaaagcacaggactagatgatctctgttccttttggctctaatatgctacaactgtaggccaattatcactttaccaattaagagttaggccagataagtgaaatttaacttaagggcacacagctaataagtaataggcctaaactggatttccttattccaaatcctgtcttttccccactattccattagaccccacaaatgttagttgtgtgtgtgtgtgtgtgtgtttttaatcactgtaaccggatgcatttttttaaggcaaaatttctcccttatctactatgatgacttcagaagatacaatggtcccaggggccaagtagaaagcatttttaaagattaatctgaattaagctttatcagtgtactctttatctgtgttactagtgcctggtatgtagtaggtgctcaataaatgcatattgaataactaagtg

SEQ ID NO: 7108 - protein, 92 aa, Homo sapiens [sequence omitted]

SEQ ID NO: 7109 - DNA, 2771 bp, Homo sapiens
agcggcagtggggtggggaagaggtcacagacggcttgtgatgaatagacacttcacatcccagaagggaagcaaaaccacagctcaaacccagatcattctgggattacaccattttaccacttatcctatgatcacttctcattttttttttgatgttccatctctgcttttagtactttactcatctatctatctatctatctatctatctatctatttatctatctatcatctatctatctattgcaaacttaagaaaatagtgtgttaaaaagaaaagctagagggcaagtgctaaatgtggcatgactagagggcttgtcacaggagagcagagactgccatccctgatgactggcacagggtttcaacatgaggtctcagtgctggtcaatgaataaatgtagaggcgtgattttagatctctctttgataacccatgattttacagaagaaaagatcttaggctttgaaggtgtgatgtttgatgatccaggtgccatttagtgaggaaaagttaaacccgcagtgtctgatgttgttagctttggacatgtgtgaacgattgacatggatatccccccttctaatccacatgctttgggggaggatctaggaagcacttatggaagaatatgccattgcagctcaagtgtggaagctgagcacctgcgacctgtgtgagatcgccaggaacagcgtgctgcagagcggcctctcgcatcaggaaaagcaaaagtttctgggacaaaattattataaagaaggacctgaaggaaatgatattcgaaagacaaatgtggctcagatccggatggcattccgatatgagaccttatgcaatgagctcagcttcctgtctgatgctatgaaatcagaagagatcaccgccttgaccaactaggtccagcatttgacatgcattttaactttttggttcaatttcaagtctgctgtggctaatagtggtcaagattccgaactaggactttcctctgtgaagaggatgcctctgaagaaattttaaactggtgattttggttgcactgctcactttaagagttaacatgctcacttgttagtatttctgagtaacaagatggtgacttctccttggggatctgggagctgagcacttgtctatacttgttcctaattttccaagtatttctcttgaaactgccagtgcctgaactgttggggccaggattttccctggtcagatgccaagtaacatgtggttttctgccatacttttctccattggcccaggtaggctaattggtagttgttcatttcagcctctggatggctggctgccttaaacacaatcaatttcaaagctccatttcataaaggggctactttgaaggagttaagatggaagacttccttcttgacaaattgtgtttttagtgaatttcttaaaccgttttatttagccctccttccctctttctagttggaagccaaatgtactcatgaaaacagccactcctattctgagtcttggtttcttcacctagaaagtgagggtttggactagatgagtggctttcagggtgttctgtgaatctcctcatgaatactttagggtaggggagggaagggagtgagtgatgctcaggggctgtcaaagtgactgcgttcatcagttttacactggggctgctacataatattttcatttgaacgaagaacttcaaaaagcacaggactagatgatctctgttccttttggctctaatatgctacaactgtaggccaattatcactttaccaattaagagttaggccagataagtgaaatttaacttaagggcacacagctaataagtaataggcctaaactggatttccttattccaaatcctgtcttttccccactattccattagaccccacaaatgttagttgtgtgtgtgtgtgtgtgtgtttttaatcactgtaaccggatgcatttttttaaggcaaaatttctcccttatctactatgatgacttcagaagatacaatggtcccaggggccaagtagaaagcatttttaaagattaatctgaattaagctttatcagtgtactctttatctgtgttactagtgcctggtatgtagtaggtgctcaataaatgcatattgaataactaagtgaatttcttttggcaactttttaaggacatgtgctcttagtacttaagaggctgctcaaggaccttcctatctatttctgtggtcaaattcagactacaggaggtctttttgaatcattatagttagaagaagaatccagtttctgcctgtgaacttatttgactttagattgtctcatcttgtgactttataatgcctgtcccctccactggtcaattcagcatatggaagtataaatgcagtctttttactaggcagatatatatgctatcttacagctaattatgaaattgaatgaaaatccattgttatcttagggattagttttgaaaagcccccgtttatatacatttgccctaacataggaagtattgtgtagtttctcattgtcattttatctgtatcaagtatctttttttaaattgttaaataaagtcagctaggactgtggctcaatagtttaaaactatttaaagataatcatatttaaagcaaatgttaaagatttttactcttaagattgggcaccatgaaaagctatcaataataatagctaatttatcttttactaagactccgacatgaatgacattcactaggaaaactcaaaattttcaaa

SEQ ID NO: 7110 - protein, 92 aa, Homo sapiens [sequence omitted]

SEQ ID NO: 7111 - DNA, 4095 bp, Homo sapiens
gcgtcacagaggtgcgaccgggtcccggcctgagtcgcggccacccgcaggtctgagctgtgggctgaggcagcgcagccgctgccgcagggtgcgcgatgccttgaacctgggaaactatgtgaagcaacactctggattttgaaagacatcttttcatcatgggacagcaaatttcggatcagacacagttggttattaacaagttaccagaaaaagtagcaaaacatgttacgttggttcgagagagtggctccttaacttatgaagaatttcttgggagagtagctgagcttaatgatgtaacggctaaagtggcttctggccaggaaaaacatcttctctttgaggtacaacctgggtctgattcctctgctttttggaaagtggttgtacgggtggtctgtaccaagattaacaaaagcagtggcattgtggaggcatcacggatcatgaatttataccagtttattcaactttataaagatatcacaagtcaagcagcaggagtattggcacagagctccacctctgaagaacctgatgaaaactcatcctctgtaacatcttgtcaggctagtctttggatgggaagggtgaagcagctgaccgatgaggaggagtgttgtatctgtatggatgggcgggctgacctcatcctgccttgtgctcacagcttttgtcagaagtgtattgataaatggagtgatcgacacaggaattgccctatttgtcgcctacagatgactggagcaaatgaatcttgggtggtatcagatgcacccactgaagatgatatggctaactatattcttaacatggctgatgaggcaggccagccccacaggccatgaccttgaagtgaaagtcttctgttgctattgtgggctcaaatatttggtcatgggggaagaatgtagggttgtggcactggcacagacacaggaaaatccattttccccactcttttatttttgctattctgatcatttgtcccccttttaaaaataaacttcccatgtcttccatttgtggtactaaaatttgctactgttttagaccatattttcctattatttatctgttcaaatttgtattattacaactaatagctcttgaattctttgctaaaggtaacagcaacacttccagaggcttctaaaacactactgttttgcagggcaggagtattctggaatctttttacttagatataaaataaacctcgaatattaaaaagttgtagccatctgagagaggaaagtttaagtgactgaaaatgtagaatacttcaacgtgcatgttactacttaaaactagtctttctgctggaatctaaggagtatatatatatatgcccccttgtggttaattattgctcctttaataatttttacttgaaatgatccacaattatttcataactttagcagtgtgttttggaactactgtacttaaaggtttgtttgtttgtttttgccatactgtataatttgggtgaggtctacaaaattgggtgtgactttcctttgcaaatggatttctcctggggaattttcttggctgttctggaaatgctttcccacagctgggtaactgttctaaatggctttgataatgctcacacatcttggagtttcagaaggaaattattctgcatcacaaatactaaattttatatttctaaattactataggtcatttaatattggtttatggtgcttttatttccttaacttgaaaacatctttctgagatttcagagtcctcaaatttcttagattaagagacaagaggccagtgcagtggttcacacctgtaatcccagcactttgggaggccgaggtgggtggatcatttgaggttaggagtttgagaccagcctggccaacatggcgaaatcctctctctactaaaatacaaaaattagctgggcatggtggcaggtgcctgtaatctcagctactcgggaggctgaggcagaattgcttgaacccaggaggtggaggttgcagtgagccgagatcacaccactgcactccagcctgggagacagaacgagactcctaatcaaaaaaaaaacacaagaaaatagagtgaggcttttttaccgtatatacataaaatacttatgaaaattagaagataatttggcattcctactgtttcactgtacttccattgaaatactctttccattaaaatattctgaaacaatatagtaataatggaattgtgatcttcagttgcacctcaaccattttttttgcttatgaactaaaatttctaacattaacatttcggcatgtaataaaacaagggcctatctcctttaaaatttaacattccatgtaacttttctgacttatcattcataagttgcaaatattactattttcctaaaccagggtacacaatttaagttgccacttattgatgacagaatttctggatagtaggattttaataggcgagcaaataaaattcaaatcaatttcaaggaaaaacatctggccaggggtagcttgatttcgcccccaaaaatactgaagactaatccattgacattcataatgggacagctaagtaccaaatagctaactactccctatggaggtttatgcaagcagagtaccaggggttccatcatatcaacctggcaatgcacttggtggttgtgtgaccttgagaaagtctcttactcttgtttatgtgttcttactttagaaactgagactttatttgtggttttcacactatttcagcagcaaaaactttttcaaggaaaatcttacagaacctttaaacacgtgtgcatacacacataccctataccccactatataaaagtcatattattataaatttccttattatataaactttatatactataaatgtgattaagtcaatgaataaaaacattaatgcattggtgatatccagcatgtttgaatttggtgagtaacacacatatagtgggagtcgttttttttaaaaaaattttttaattaaattcaagtcaaatttgcagaaccctgtatctcctccatagattcttagtattccatggaacatattttgaaaaccttgggatagatgatccactgaaatcttttccagctctaagattttaaattgtccttttagattagacttgctgagtttaattcagattacctaattttaaaatgtttctgaaaagtgaacagagttaccttacagagttttggatctttccagggatagccaatgattttatcccccagaatccttcacctttcaaggagttatttaacaatgagcccagtgactcaatagggcccaaacctttttattttacaatatgagctccaagacacttactgatctactgtgaatataaaatgttattagccttatcaaataaataaatgagcacagctctttgttcgctctattgaactgggtgataattatttagatgtgaatgttaggtcagttctactgtaataactaatcgtaaaagttgtaaatttgtttaatggatgaaatgtacactttttgtattctgtacagctttgtcttttttaaatatgaagtacttaaatgtacttactatgataggaaatataatgtgtgccttctaggatttgtgaagtggtttcatgaactctaaggaatttgttttccctatcctaactcagtaacagagggtttactccgattatgtatagaaccttagtttgagaaaatgaattttactatgtactgaatttagaggttgagaataataggatctgtgttattcttagtacccactgataaattgtgcaataaataatctttcgcaagtgattttagctaattgaagagattattttcctatgtaatttcacattctaatatactaaatgtttatattccttagagaactattttatattgtgcgctgggggcttgtgatgtttgtgtgctgttttaaaattcatttcaaattggactcgatttccttatatctaatatatatctgggagaaaaggctgcttgaaaatatcttttgattcagtgatttttaacattgggaagttgagtttattaaaaggtagtctgaag

SEQ ID NO: 7112 - protein, 230 aa, Homo sapiens; identical to SEQ ID NO: 996

SEQ ID NO: 7113 - DNA, 660 bp, Homo sapiens
aaagccccgccccccgcgcgttgccgggagacggcgcccaaccttcctctgcagcgcccctaccgacccgcgctccgcagctcctgagggctttcgagcccagatggtcatctgagacgagaggtggcggcgaaggagagtctcgcctgtcacgctcccggagcaggggcttcatgaggtggccatggaaacagcctggcagactcccatctctcctggtgccatctccggagcggaaagtggagcgccccgctggcgaccaaggccgcactgagagccctggtttggtcaacagttgggctccaaggagccctggtattccttgaacatgcatacctttcccagcgtgagggacatggaccgtgccgtgcgagggaccccatcttctgcagcaggagggagcagagaagagaacacagggattcctgttgctaaaaggtctgttttctcctgctagccaccctcatcagccagagttcaaaccctgacagtgcccatggagagatctggtccaaggcaccaacctcttcctgctggactgagaaagagcctcctactgtgtctctctttacctcagcttttgcacacctccaatatattgtccactgaagtcagaataatctaaaaataaaggctgattacctcatgtggtataaactt

SEQ ID NO: 7114 - protein, 50 aa, Homo sapiens
MRWPWKQPGRLPSLLVPSPERKVERPAGDQGRTESPGLVNSWAPRSPGIP

SEQ ID NO: 7115 - DNA, 587 bp, Homo sapiens
cccaaccttcctctgcagcgcccctaccgacccgcgctccgcagctcctgagggctttcgagcccagatggtcatctgagacgagaggtggcggcgaaggagagtctcgcctgtcacgctcccggagcaggggcttcatgaggtggccatggaaacagcctggcagactcccatctctcctggtgccatctccggagcggaaagtggagcgccccgctggcgaccaaggccgcactgagagccctggtttggtcaacagttgggctccaaggagccctggtattccttgaacatgcatacctttcccagcgtgagggacatggaccgtgccgtgcgagggaccccatcttctgcagcaggagggagcagagaagagaacacagccaccctcatcagccagagttcaaaccctgacagtgcccatggagagatctggtccaaggcaccaacctcttcctgctggactgagaaagagcctcctactgtgtctctctttacctcagcttttgcacacctccaatatattgtccactgaagtcagaataatctaaaaataaaggctgattacctcatgtggtataaactta

SEQ ID NO: 7116 - protein, 80 aa, Homo sapiens
MHTFPSVRDMDRAVRGTPSSAAGGSREENTATLISQSSNPDSAHGEIWSKAPTSSCWTEKEPPTVSLFTSAFAHLQYIVH

SEQ ID NO: 7117 - DNA, 838 bp, Homo sapiens
accgacccgcgctccgcagctcctgagggctttcgagcccagatggtcatctgagacgagaggtggcggcgaaggagagtctcgcctgtcacgctcccggagcaggggcttcatgaggtggccatggaaacagcctggcagactcccatctctcctggtgccatctccggagcggaaagtggagcgccccgctggcgaccaaggccgcactgagagccctggtttggtcaacagttgggctccaagaagtctcttcctttcactctgctgagtgaagcccttcctgccctcaggctggaccatggcttccatgctgcccctcttttcaaggctgcttgtctacagttctacaggtttctaggcccttggtgagtgaagagcagttcattacgaaatgacctccaagaacaaggctcagcattctctgaaatctcatgaagcagtgtaaccagctctcaagtatcttcctgtgaactagccacagggagccctggtattccttgaacatgcatacctttcccagcgtgagggacatggaccgtgccgtgcgagggaccccatcttctgcagcaggagggagcagagaagagaacacagggattcctgttgctaaaaggtctgttttctcctgctagccaccctcatcagccagagttcaaaccctgacagtgcccatggagagatctggtccaaggcaccaacctcttcctgctggactgagaaagagcctcctactgtgtctctctttacctcagcttttgcacacctccaatatattgtccactgaagtcagaataatctaaaaataaaggctgattacctcatgtggtataaactt

SEQ ID NO: 7118 - protein, 52 aa, Homo sapiens
MRWPWKQPGRLPSLLVPSPERKVERPAGDQGRTESPGLVNSWAPRSLFLSLC

SEQ ID NO: 7119 - DNA, 723 bp, Homo sapiens
gcagctcctgagggctttcgagcccagatggtcatctgagacgagaggtggcggcgaaggagagtctcgcctgtcacgctcccggagcaggggcttcatgaggtggccatggaaacagcctggcagactcccatctctcctggtgccatctccggagcggaaagtggagcgccccgctggcgaccaaggccgcactgagagccctggtttggtcaacagttgggctccaagtctacaggtttctaggcccttggtgagtgaagagcagttcattacgaaatgacctccaagaacaaggctcagcattctctgaaatctcatgaagcagtgtaaccagctctcaagtatcttcctgtgaactagccacagggagccctggtattccttgaacatgcatacctttcccagcgtgagggacatggaccgtgccgtgcgagggaccccatcttctgcagcaggagggagcagagaagagaacacagggattcctgttgctaaaaggtctgttttctcctgctagccaccctcatcagccagagttcaaaccctgacagtgcccatggagagatctggtccaaggcaccaacctcttcctgctggactgagaaagagcctcctactgtgtctctctttacctcagcttttgcacacctccaatatattgtccactgaagtcagaataatctaaaaataaaggctgattacctcatgtggtataaactt

SEQ ID NO: 7120 - protein, 61 aa, Homo sapiens
MRWPWKQPGRLPSLLVPSPERKVERPAGDQGRTESPGLVNSWAPSLQVSRPLVSEEQFITK

SEQ ID NO: 7121 - DNA, 1436 bp, Homo sapiens
gatgtaagataaagtgtatcaaggaatttcaagtaatttcagtatggcaggggcaatgagagaaaaagagcagatgaggctggcatgttagcaggggccaaatcacagaaggccttgtaggccatacaacaaagatagccactgaaggcttctaaggaagaaagtgatatggttagatttgctttttaaagaccattccagctgcggtataaggggtttggaggtagtaagactagaggcaagaagaacagttaggaggctgttgcaatacttttattccatgtttccctatcccaacagatacttggactaactcgtgcattccagaaattatcaccaccaaagatcccatattcaacactcaaactgcaacacaaacaacagaatttattgtcagtgacagtacctactcggtggcatccccttactctacaatacctgcccctactactactcctcctgctccagcttccacttctattccacggagaaaaaaattgatttgtgtcacagaagtttttatggaaactagcaccatgtctgaggctaggtgggttgaaagccaaggagtcactgagaccaaggctttctctactgattccgcagctcagaccctttcttcagctctgaaagagaaacacgtatcccacctgacatgtccttctgagcccggtaagagcaaaagaatggcagaaaagtttagcccctgaaagccatggagattctcataacttgagacctaatctctgtaaagctaaaataaagaaatagaacaaggctgaggatacgacagtacactgtcagcagggactgtaaacacagacagggtcaaagtgttttctctgaacacattgagttggaatcactgtttagaacacacacacttactttttctggtctctaccactgctgatattttctctaggaaatatacttttacaagtaacaaaaataaaaactcttataaatttctatttttatctgagttacagaaatgattactaaggaagattactcagtaatttgtttaaaaagtaataaaattcaacaaacatttgctgaatagctactatatgtcaagtgctgtgcaaggtattacactctgtaattgaatattattcctcaaaaaattgcacatagtagaacgctatctgggaagctatttttttcagttttgatatttctagcttatctacttccaaactaatttttatttttgctgagactaatcttattcattttctctaatatggcaaccattataaccttaatttattattaacatacctaagaagtacattgttacctctatataccaaagcacattttaaaagtgccattaacaaatgtatcactagccctcctttttccaacaagaagggactgagagatgcagaaatatttgtgacaaaaaattaaagcatttagaaaacttc

SEQ ID NO: 7122 - protein, 62 aa, Homo sapiens
METSTMSEARWVESQGVTETKAFSTDSAAQTLSSALKEKHVSHLTCPSEPGKSKRMAEKFSP

SEQ ID NO: 7123 - DNA, 2320 bp, Homo sapiens
gtgaccttgacaagtcagaagcttgaaagcagggaaatccggatgtctcggttatgaagtggagcagtgagtgtgagcctcaacatagttccagaactctccatccggactagttattgagcatctgcctctcatatcaccagtggccatctgaggtgtttccctggctctgaaggggtaggcacgatggccaggtgcttcagcctggtgttgcttctcacttccatctggaccacgaggctcctggtccaaggctctttgcgtgcagaaggtagttcttttttagctctgtgttcttgttcagcaatagagatgaagccttctaatcatttttctgttcaactagtgtgtattcttttacagctatggctgggttggagatggattcgtggtcatctctaggattagcccaaaccccaagtgtgggaaaaatggggtgggtgtcctgatttggaaggttccagtgagccgacagtttgcagcctattgttacaactcatctgatacttggactaactcgtgcattccagaaattatcaccaccaaagatcccatattcaacactcaaactgcaacacaaacaacagaatttattgtcagtgacagtacctactcggtggcatccccttactctacaatacctgcccctactactactcctcctgctccagcttccacttctattccacggagaaaaaaattgatttgtgtcacagaagtttttatggaaactagcaccatgtctacagaaactgaaccatttgttgaaaataaagcagcattcaagaatgaagctgctgggtttggaggtgtccccacggctctgctagtgcttgctctcctcttctttggtgctgcagctggtcttggattttgctatgtcaaaaggtatgtgaaggccttcccttttacaaacaagaatcagcagaaggaaatgatcgaaaccaaagtagtaaaggaggagaaggccaatgatagcaaccctaatgaggaatcaaagaaaactgataaaaacccagaagagtccaagagtccaagcaaaactaccgtgcgatgcctggaagctgaagtttagatgagacagaaatgaggagacacacctgaggctggtttctttcatgctccttaccctgccccagctggggaaatcaaaagggccaaagaaccaaagaagaaagtccacccttggttcctaactggaatcagctcaggactgccattggactatggagtgcaccaaagagaatgcccttctccttattgtaaccctgtctggatcctatcctcctacctccaaagcttcccacggcctttctagcctggctatgtcctaataatatcccactgggagaaaggagttttgcaaagtgcaaggacctaaaacatctcatcagtatccagtggtaaaaaggcctcctggctgtctgaggctaggtgggttgaaagccaaggagtcactgagaccaaggctttctctactgattccgcagctcagaccctttcttcagctctgaaagagaaacacgtatcccacctgacatgtccttctgagcccggtaagagcaaaagaatggcagaaaagtttagcccctgaaagccatggagattctcataacttgagacctaatctctgtaaagctaaaataaagaaatagaacaaggctgaggatacgacagtacactgtcagcagggactgtaaacacagacagggtcaaagtgttttctctgaacacattgagttggaatcactgtttagaacacacacacttactttttctggtctctaccactgctgatattttctctaggaaatatacttttacaagtaacaaaaataaaaactcttataaatttctatttttatctgagttacagaaatgattactaaggaagattactcagtaatttgtttaaaaagtaataaaattcaacaaacatttgctgaatagctactatatgtcaagtgctgtgcaaggtattacactctgtaattgaatattattcctcaaaaaattgcacatagtagaacgctatctgggaagctatttttttcagttttgatatttctagcttatctacttccaaactaatttttatttttgctgagactaatcttattcattttctctaatatggcaaccattataaccttaatttattattaacatacctaagaagtacattgttacctctatataccaaagcacattttaaaagtgccattaacaaatgtatcactagccctcctttttccaacaagaagggactgagagatgcagaaatatttgtgacaaaaaattaaagcatttagaaaacttc

SEQ ID NO: 7124 - protein, 116 aa, Homo sapiens [sequence omitted]

SEQ ID NO: 7125 - DNA, 2500 bp, Homo sapiens
ctcatttgtgtgttttctgagtcagcattagctaaattttccagaaggccatccacaaagtacagcctgggcgttcaagggacgtcattcatttcccccagtgaccttgacaagtcagaagcttgaaagcagggaaatccggatgtctcggttatgaagtggagcagtgagtgtgagcctcaacatagttccagaactctccatccggactagttattgagcatctgcctctcatatcaccagtggccatctgaggtgtttccctggctctgaaggggtaggcacgatggccaggtgcttcagcctggtgttgcttctcacttccatctggaccacgaggctcctggtccaaggctctttgcgtgcagaagagctttccatccaggtgtcatgcagaattatggggatcacccttgtgagcaaaaaggcgaaccagcagctgaatttcacagaagctaaggaggcctgtaggctgctgggactaagtttggccggcaaggaccaagttgaaacagccttgaaagctagctttgaaacttgcagctatggctgggttggagatggattcgtggtcatctctaggattagcccaaaccccaagtgtgggaaaaatggggtgggtgtcctgatttggaaggttccagtgagccgacagtttgcagcctattgttacaactcatctgatacttggactaactcgtgcattccagaaattatcaccaccaaagatcccatattcaacactcaaactgcaacacaaacaacagaatttattgtcagtgacagtacctactcggtggcatccccttactctacaatacctgcccctactactactcctcctgctccagcttccacttctattccacggagaaaaaaattgatttgtgtcacagaagtttttatggaaactagcaccatgtctacagaaactgaaccatttgttgaaaataaagcagcattcaagaatgaagctgctgggtttggaggtgtccccacggctctgctagtgcttgctctcctcttctttggtgctgcagctggtcttggattttgctatgtcaaaaggtatgtgaaggccttcccttttacaaacaagaatcagcagaaggaaatgatcgaaaccaaagtagtaaaggaggagaaggccaatgatagcaaccctaatgaggaatcaaagaaaactgataaaaacccagaagagtccaagagtccaagcaaaactaccgtgcgatgcctggaagctgaagtttagatgagacagaaatgaggagacacacctgaggctggtttctttcatgctccttaccctgccccagctggggaaatcaaaagggccaaagaaccaaagaagaaagtccacccttggttcctaactggaatcagctcaggactgccattggactatggagtgcaccaaagagaatgcccttctccttattgtaaccctgtctggatcctatcctcctacctccaaagcttcccacggcctttctagcctggctatgtcctaataatatcccactgggagaaaggagttttgcaaagtgcaaggacctaaaacatctcatcagtatccagtggtaaaaaggcctcctggctgtctgaggctaggtgggttgaaagccaaggagtcactgagaccaaggctttctctactgattccgcagctcagaccctttcttcagctctgaaagagaaacacgtatcccacctgacatgtccttctgagcccggtaagagcaaaagaatggcagaaaagtttagcccctgaaagccatggagattctcataacttgagacctaatctctgtaaagctaaaataaagaaatagaacaaggctgaggatacgacagtacactgtcagcagggactgtaaacacagacagggtcaaagtgttttctctgaacacattgagttggaatcactgtttagaacacacacacttactttttctggtctctaccactgctgatattttctctaggaaatatacttttacaagtaacaaaaataaaaactcttataaatttctatttttatctgagttacagaaatgattactaaggaagattactcagtaatttgtttaaaaagtaataaaattcaacaaacatttgctgaatagctactatatgtcaagtgctgtgcaaggtattacactctgtaattgaatattattcctcaaaaaattgcacatagtagaacgctatctgggaagctatttttttcagttttgatatttctagcttatctacttccaaactaatttttatttttgctgagactaatcttattcattttctctaatatggcaaccattataaccttaatttattattaacatacctaagaagtacattgttacctctatataccaaagcacattttaaaagtgccattaacaaatgtatcactagccctcctttttccaacaagaagggactgagagatgcagaaatatttgtgacaaaaaattaaagcatttagaaaacttc

SEQ ID NO: 7126 - protein, 322 aa, Homo sapiens; identical to SEQ ID NO: 998

SEQ ID NO: 7127 - DNA, 1553 bp, Homo sapiens
ataaacgatggactccacaggcagtaacagtgaatggtgtgagaactgagctgctgggggaggaggaacagcagggaatatgggaattgggagaacctttagcagttcacactgtgctatctgccttcctcatttgtgtgttttctgagtcagcattagctaaattttccagaaggccatccacaaagtacagcctgggcgttcaagggacgtcattcatttcccccagtgaccttgacaagtcagaagcttgaaagcagggaaatccggatgtctcggttatgaagtggagcagtgagtgtgagcctcaacatagttccagaactctccatccggactagttattgagcatctgcctctcatatcaccagtggccatctgaggtgtttccctggctctgaaggggtaggcacgatggccaggtgcttcagcctggtgttgcttctcacttccatctggaccacgaggctcctggtccaaggctctttgcgtgcagaagagctttccatccaggtgtcatgcagaattatggggatcacccttgtgagcaaaaaggcgaaccagcagctgaatttcacagaagctaaggagttttgcaaagtgcaaggacctaaaacatctcatcagtatccagtggtaaaaaggcctcctggctgtctgaggctaggtgggttgaaagccaaggagtcactgagaccaaggctttctctactgattccgcagctcagaccctttcttcagctctgaaagagaaacacgtatcccacctgacatgtccttctgagcccggtaagagcaaaagaatggcagaaaagtttagcccctgaaagccatggagattctcataacttgagacctaatctctgtaaagctaaaataaagaaatagaacaaggctgaggatacgacagtacactgtcagcagggactgtaaacacagacagggtcaaagtgttttctctgaacacattgagttggaatcactgtttagaacacacacacttactttttctggtctctaccactgctgatattttctctaggaaatatacttttacaagtaacaaaaataaaaactcttataaatttctatttttatctgagttacagaaatgattactaaggaagattactcagtaatttgtttaaaaagtaataaaattcaacaaacatttgctgaatagctactatatgtcaagtgctgtgcaaggtattacactctgtaattgaatattattcctcaaaaaattgcacatagtagaacgctatctgggaagctatttttttcagttttgatatttctagcttatctacttccaaactaatttttatttttgctgagactaatcttattcattttctctaatatggcaaccattataaccttaatttattattaacatacctaagaagtacattgttacctctatataccaaagcacattttaaaagtgccattaacaaatgtatcactagccctcctttttccaacaagaagggactgagagatgcagaaatatttgtgacaaaaaattaaagcatttagaaaacttc

SEQ ID NO: 7128 - protein, 110 aa, Homo sapiens
MARCFSLVLLLTSIWTTRLLVQGSLRAEELSIQVSCRIMGITLVSKKANQQLNFTEAKEFCKVQGPKTSHQYPVVKRPPGCLRLGGLKAKESLRPRLSLLIPQLRPFLQL

SEQ ID NO: 7129 - DNA, 978 bp, Homo sapiens
gatgtaagataaagtgtatcaaggaatttcaagtaatttcagtatggcaggggcaatgagagaaaaagagcagatgaggctggcatgttagcaggggccaaatcacagaaggccttgtaggccatacaacaaagatagccactgaaggcttctaaggaagaaagtgatatggttagatttgctttttaaagaccattccagctgcggtataaggggtttggaggtagtaagactagaggcaagaagaacagttaggaggctgttgcaatacttttattccatgtttccctatcccaacagatacttggactaactcgtgcattccagaaattatcaccaccaaagatcccatattcaacactcaaactgcaacacaaacaacagaatttattgtcagtgacagtacctactcggtggcatccccttactctacaatacctgcccctactactactcctcctgctccagcttccacttctattccacggagaaaaaaattgatttgtgtcacagaagtttttatggaaactagcaccatgtctgaggctaggtgggttgaaagccaaggagtcactgagaccaaggctttctctactgattccgcagctcagaccctttcttcagctctgaaagagaaacacgtatcccacctgacatgtccttctgagcccggtaagagcaaaagaatggcagaaaagtttagcccctgaaagccatggagattctcataacttgagacctaatctctgtaaagctaaaataaagaaatagaacaaggctgaggatacgacagtacactgtcagcagggactgtaaacacagacagggtcaaagtgttttctctgaacacattgagttggaatcactgtttagaacacacacacttactttttctggtctctaccactgctgatattttctctaggaaatatacttttacaagtaacaaaaataaaaactcttataaatttctatttt

SEQ ID NO: 7130 - protein, 62 aa, Homo sapiens; identical to SEQ ID NO: 7122

SEQ ID NO: 7131 - DNA, 1862 bp, Homo sapiens
gtgaccttgacaagtcagaagcttgaaagcagggaaatccggatgtctcggttatgaagtggagcagtgagtgtgagcctcaacatagttccagaactctccatccggactagttattgagcatctgcctctcatatcaccagtggccatctgaggtgtttccctggctctgaaggggtaggcacgatggccaggtgcttcagcctggtgttgcttctcacttccatctggaccacgaggctcctggtccaaggctctttgcgtgcagaaggtagttcttttttagctctgtgttcttgttcagcaatagagatgaagccttctaatcatttttctgttcaactagtgtgtattcttttacagctatggctgggttggagatggattcgtggtcatctctaggattagcccaaaccccaagtgtgggaaaaatggggtgggtgtcctgatttggaaggttccagtgagccgacagtttgcagcctattgttacaactcatctgatacttggactaactcgtgcattccagaaattatcaccaccaaagatcccatattcaacactcaaactgcaacacaaacaacagaatttattgtcagtgacagtacctactcggtggcatccccttactctacaatacctgcccctactactactcctcctgctccagcttccacttctattccacggagaaaaaaattgatttgtgtcacagaagtttttatggaaactagcaccatgtctacagaaactgaaccatttgttgaaaataaagcagcattcaagaatgaagctgctgggtttggaggtgtccccacggctctgctagtgcttgctctcctcttctttggtgctgcagctggtcttggattttgctatgtcaaaaggtatgtgaaggccttcccttttacaaacaagaatcagcagaaggaaatgatcgaaaccaaagtagtaaaggaggagaaggccaatgatagcaaccctaatgaggaatcaaagaaaactgataaaaacccagaagagtccaagagtccaagcaaaactaccgtgcgatgcctggaagctgaagtttagatgagacagaaatgaggagacacacctgaggctggtttctttcatgctccttaccctgccccagctggggaaatcaaaagggccaaagaaccaaagaagaaagtccacccttggttcctaactggaatcagctcaggactgccattggactatggagtgcaccaaagagaatgcccttctccttattgtaaccctgtctggatcctatcctcctacctccaaagcttcccacggcctttctagcctggctatgtcctaataatatcccactgggagaaaggagttttgcaaagtgcaaggacctaaaacatctcatcagtatccagtggtaaaaaggcctcctggctgtctgaggctaggtgggttgaaagccaaggagtcactgagaccaaggctttctctactgattccgcagctcagaccctttcttcagctctgaaagagaaacacgtatcccacctgacatgtccttctgagcccggtaagagcaaaagaatggcagaaaagtttagcccctgaaagccatggagattctcataacttgagacctaatctctgtaaagctaaaataaagaaatagaacaaggctgaggatacgacagtacactgtcagcagggactgtaaacacagacagggtcaaagtgttttctctgaacacattgagttggaatcactgtttagaacacacacacttactttttctggtctctaccactgctgatattttctctaggaaatatacttttacaagtaacaaaaataaaaactcttataaatttctatttt

SEQ ID NO: 7132 - protein, 116 aa, Homo sapiens [sequence omitted]

SEQ ID NO: 7133 - DNA, 2042 bp, Homo sapiens
ctcatttgtgtgttttctgagtcagcattagctaaattttccagaaggccatccacaaagtacagcctgggcgttcaagggacgtcattcatttcccccagtgaccttgacaagtcagaagcttgaaagcagggaaatccggatgtctcggttatgaagtggagcagtgagtgtgagcctcaacatagttccagaactctccatccggactagttattgagcatctgcctctcatatcaccagtggccatctgaggtgtttccctggctctgaaggggtaggcacgatggccaggtgcttcagcctggtgttgcttctcacttccatctggaccacgaggctcctggtccaaggctctttgcgtgcagaagagctttccatccaggtgtcatgcagaattatggggatcacccttgtgagcaaaaaggcgaaccagcagctgaatttcacagaagctaaggaggcctgtaggctgctgggactaagtttggccggcaaggaccaagttgaaacagccttgaaagctagctttgaaacttgcagctatggctgggttggagatggattcgtggtcatctctaggattagcccaaaccccaagtgtgggaaaaatggggtgggtgtcctgatttggaaggttccagtgagccgacagtttgcagcctattgttacaactcatctgatacttggactaactcgtgcattccagaaattatcaccaccaaagatcccatattcaacactcaaactgcaacacaaacaacagaatttattgtcagtgacagtacctactcggtggcatccccttactctacaatacctgcccctactactactcctcctgctccagcttccacttctattccacggagaaaaaaattgatttgtgtcacagaagtttttatggaaactagcaccatgtctacagaaactgaaccatttgttgaaaataaagcagcattcaagaatgaagctgctgggtttggaggtgtccccacggctctgctagtgcttgctctcctcttctttggtgctgcagctggtcttggattttgctatgtcaaaaggtatgtgaaggccttcccttttacaaacaagaatcagcagaaggaaatgatcgaaaccaaagtagtaaaggaggagaaggccaatgatagcaaccctaatgaggaatcaaagaaaactgataaaaacccagaagagtccaagagtccaagcaaaactaccgtgcgatgcctggaagctgaagtttagatgagacagaaatgaggagacacacctgaggctggtttctttcatgctccttaccctgccccagctggggaaatcaaaagggccaaagaaccaaagaagaaagtccacccttggttcctaactggaatcagctcaggactgccattggactatggagtgcaccaaagagaatgcccttctccttattgtaaccctgtctggatcctatcctcctacctccaaagcttcccacggcctttctagcctggctatgtcctaataatatcccactgggagaaaggagttttgcaaagtgcaaggacctaaaacatctcatcagtatccagtggtaaaaaggcctcctggctgtctgaggctaggtgggttgaaagccaaggagtcactgagaccaaggctttctctactgattccgcagctcagaccctttcttcagctctgaaagagaaacacgtatcccacctgacatgtccttctgagcccggtaagagcaaaagaatggcagaaaagtttagcccctgaaagccatggagattctcataacttgagacctaatctctgtaaagctaaaataaagaaatagaacaaggctgaggatacgacagtacactgtcagcagggactgtaaacacagacagggtcaaagtgttttctctgaacacattgagttggaatcactgtttagaacacacacacttactttttctggtctctaccactgctgatattttctctaggaaatatacttttacaagtaacaaaaataaaaactcttataaatttctatttt

SEQ ID NO: 7134 - protein, 322 aa, Homo sapiens; identical to SEQ ID NO: 998

SEQ ID NO: 7135 - DNA, 1095 bp, Homo sapiens
ataaacgatggactccacaggcagtaacagtgaatggtgtgagaactgagctgctgggggaggaggaacagcagggaatatgggaattgggagaacctttagcagttcacactgtgctatctgccttcctcatttgtgtgttttctgagtcagcattagctaaattttccagaaggccatccacaaagtacagcctgggcgttcaagggacgtcattcatttcccccagtgaccttgacaagtcagaagcttgaaagcagggaaatccggatgtctcggttatgaagtggagcagtgagtgtgagcctcaacatagttccagaactctccatccggactagttattgagcatctgcctctcatatcaccagtggccatctgaggtgtttccctggctctgaaggggtaggcacgatggccaggtgcttcagcctggtgttgcttctcacttccatctggaccacgaggctcctggtccaaggctctttgcgtgcagaagagctttccatccaggtgtcatgcagaattatggggatcacccttgtgagcaaaaaggcgaaccagcagctgaatttcacagaagctaaggagttttgcaaagtgcaaggacctaaaacatctcatcagtatccagtggtaaaaaggcctcctggctgtctgaggctaggtgggttgaaagccaaggagtcactgagaccaaggctttctctactgattccgcagctcagaccctttcttcagctctgaaagagaaacacgtatcccacctgacatgtccttctgagcccggtaagagcaaaagaatggcagaaaagtttagcccctgaaagccatggagattctcataacttgagacctaatctctgtaaagctaaaataaagaaatagaacaaggctgaggatacgacagtacactgtcagcagggactgtaaacacagacagggtcaaagtgttttctctgaacacattgagttggaatcactgtttagaacacacacacttactttttctggtctctaccactgctgatattttctctaggaaatatacttttacaagtaacaaaaataaaaactcttataaatttctatttt

SEQ ID NO: 7136 - protein, 110 aa, Homo sapiens; identical to SEQ ID NO: 7128

SEQ ID NO: 7137 - DNA, 3783 bp, Homo sapiens
ctgaaatgatgccctgtacttccctcttctcactagtggaaagacaaatggggacccagattgtgaagcctctgctcctgcgctgaccctgagctgcctggaggagcttagtcaggagaccaaggccaggatggaggaagaagcctacagcaagggattccaagaaggtctaaagaagaccaaagaacttcaagacctgaaggaggaggaggaagaacagaagagtgagagtcctgaggaacctgaagaggtagaagaaactgaggaagaggaaaagggcccaagaagcagcaaacttgaagaattggtccatttcttacaagtcatgtatcccaaactgtgtcagcactggcaagtgatctggatgatggctgcagtgatgctggtcttgactgttgtgctggggctctacaattcctataactcttgtgcagagcaggctgatgggccccttggaagatccacttgctcggcagcccagagggactcctggtggagctcaggactccagcatgagcagcctacagagcagtaggaaacctcacacctagccagtgccctgctctgagacactcagactaccaccctttccccaagtataacgtcaggcccaagtgtggacacactgccgcccatcccatcaggtcatgaggaagggttcttttaacactcggcacttctgtgggagctattcatacacagtgacttgatgttcttggaggatcaacaaaactgccctgggaaagcatccagtggatgaagaagtcaccttcaccaaggaactctattggaagggaaggtctcctgcccctagctcaggtggctggggagaactaaaacaccttcactggtggttgggggtaaggagcggggcacgggggaggaggaggtagggggcagtaaaaaacttactctcttttttcctctctgtaattggttatcaggaagaatttgcttaatgactaacaccctaagcatcagacctggaatttggagttgcaaagtgactatcttcccatttcccatctcattttcaataacttcagcctcccattctttcctttggaatgagagtttctttttacagaagtaggaaaggcttctcagaaaaaaaaaaaaaagtataggctgaatttagctcagtgcttgaaatgggaagatatgaattattatatacgcatctgtccacacatacacacatactgttgtgtacacacacacaacatgcctgtgcacagagccaacaacccttcaaaagtgtgctctgggtgtgtacctctggataaataagatgcatgccaagccaacccacagattttcaccagtgtggggcagtcaccaggcacctgttcaatgagctgtccacatggattgaagatgttttaaaaacacagaaaactcatggcttcaatggcagacttactagtctccatttcaaatgccaactctgagctgctgtacagcacaatctattccctattctctctttgaaaacagttaacccacctcacaggtgaatgaggagagaagatgtgctttctgcttcagtctcttactctgtgtgtgaccacatgcaagagtaaacttgcacctcagtgcttcagttcaaatggggtttccaaccccagtataattaggggtgtttcagagcatccccagttatttagcacaacactgaaggagcacatcccctctccattttgacttctctccccacttttacagccactgccttcatcagttttgtagaggtttgatttccatgtgggttttgttgtcattgttttgcatttttgttttgttattgatattgtttgctttcattgctaaaactcatatacgacttactatgagccaagcactgttctcagtattacataggtatgaattcatttaagtcctgaagaaaaagaaaaaaaaatacgaagtggatattacccttcccattttcaaataaggaaactgaagcacaaaaagaacaagtaacttgacaaggacaccccggtagtaaatcatggggctggagctcaaccccagggtaggctggctccagagctgtgctctccttgactcttctgatggtctcctagctggaagcctcacatttcagtctcattcccccaagtggcccatcagctactccatctctggctccccaactaaacagtttctctcatagtgctggacctccactcactagttttttttccagctgttcttctcttttcttcaggtcactcttctcgaccgagtgcaaaaattatcccctccataccagctttgatgaccttccttccatactcctcaccagacacaacataataggtcacacactcctctgtgctttctggcacgttttaaacattattattattgacctttacctatagtataccatggcctatttatgtatccatctcccctagcatttttcctcaaagacaagaaccatgtcttacccatctcttgggtaagtgcctagcatggtggctgacgcttgggagggtgtcattaaatgttgctcaaaagaacaagcaaacatttaaggtggtggagagcagcctggggacagctgacatgctgcatgcttctcagtaccagcaccatcacaatgcaaaaagcaacatctttcttaacctcagcttattctgtttttcagtctactctgtgagagagcaggaatgagaccagactagcaacaccattgccaagctcaaggactgggctcaatgcagtcactccttcagagagaccccccaccccaagcatgccccactttaaaatagcatgtttattgaagggggcatcctttacagtagctagaaaatgactgaggcccaagccagggttgatcaaggatgtgccattaaggtaaagagttacagagcagggcagagggactctgggggcagaagtggatgatttgcccggcctcttccagggggtctggatacaactgaaggagctttagctacatgaggccctcagagccaaagacaggatgcaaatagagttctagagagtggccgtggaagcagaactccaggtggggaatgttcaatctctgcctcccttaaagcagggccaggctcagctggccccattgttcacttggtcacaagtttcctacctttgtttctggatgagtcaaaggccaggaaggcagttatggagagctcctgcacctccagctgccccacagaaaagcctgcaagagtacttccaggcacaggccctctcccaccctattccatttgtaagcaagggaggtcgaggaaaaggacatctccaaaagggagcataagaatagccatatatacaggggctgaaaaagtgctcatgagtccatcttttctggaaagcaaagaccagcctgaagcagtgggagctgctgcccaagcggtagtgaactggagagaaacaggccctggattttcagtgaggatgtggatctgaagagtcccccaaatgcctctgaagtctgacatctctgcttagccctaggagtctggttccctgccttcagttgcagagtgatgtgtttgtgtcattgttgatgtcacctcctaaaaagaccttcactttctggctgccacaaagccatatgtgttgctccccatatacagcctgacagagtaaatggagaggaagtgctggatttgtgtatcactggctatcagttcctcatgttgttaagcctcacacaggtgtgctagcattgaactgtagagtgtcacatacctgagtttgaaaataaaagcacatttccaaacctctggcagc

SEQ ID NO: 7138 - protein, 134 aa, Homo sapiens [sequence omitted]

SEQ ID NO: 7139 - DNA, 667 bp, Homo sapiens
gaccccgcggggcacatcattgacctggtgaatgaccagctgccagacatcagcatctcagaggaggacaagaagaaaaacctggcgctgctggaagaagccaagttggtgagtgagcgattcctgacccgccgtgggaggaagtccaggagcagccccgaaaaggacatctccaaaagggagcataagaatagccatatatacaggggctgaaaaagtgctcatgagtccatcttttctggaaagcaaagaccagcctgaagcagtgggagctgctgcccaagcggtagtgaactggagagaaacaggccctggattttcagtgaggatgtggatctgaagagtcccccaaatgcctctgaagtctgacatctctgcttagccctaggagtctggttccctgccttcagttgcagagtgatgtgtttgtgtcattgttgatgtcacctcctaaaaagaccttcactttctggctgccacaaagccatatgtgttgctccccatatacagcctgacagagtaaatggagaggaagtgctggatttgtgtatcactggctatcagttcctcatgttgttaagcctcacacaggtgtgctagcattgaactgtagagtgtcacatacctgagtttgaaaataaaagcacatttccaaacctctggcagc

SEQ ID NO: 7140 - protein, 38 aa, Homo sapiens
MSPSFLESKDQPEAVGAAAQAVVNWRETGPGFSVRMWI

SEQ ID NO: 7141 - DNA, 6061 bp, Homo sapiens
cctctgactttgtaaacaaagccagagagccggaggaaatgaaattccaaatgccctctcctagcctggtttgacctccggtgttgatgcaaactcaagccggctctcactgtggcttgtggctccgggaaatggaacccagcttgggacagggatgggaatggatttgacttgtccttttggcatctccccagcctgtggagcccaggcctcttggagcatctttggggctgacgcagcggaggttccgggcacacgtggccactcccagcaggaggctgccatgccccacattcccgaggacgaggagccccccggagagccacaggcagcccagagccctgccggccaaggtcctcctgccgcaggagtatcttgcagtccaactcccacgattgtcctgactggggatgccacttcaccagaaggagaaaccgacaaaaacctggccaacagagttcacagtccccacaagaggctttctcaccgacacttgaaggtgtccactgcctccctgacatctgtggaccccgcggggcacatcattgacctggtgaatgaccagctgccagacatcagcatctcagaggaggacaagaagaaaaacctggcgctgctggaagaagccaagttggtgagtgagcgattcctgacccgccgtgggaggaagtccaggagcagccccggagactccccatcagctgtttccccgaacctcagccccagcgcttctcctacatcctctcggagcaactcacttacagtccccaccccgccagaagggggatgaggccgacgtctcttcacctcaccctggcgagcctaacgtccccaaagggctagctgacaggaagcagaatgaccagaggaaagtgtctcagggcaggctggctcctcgtcctcctccagttgagaagtccaaagagattgcaatagaacaaaaggaaaacttcgatcccctccagtaccccgagaccacacccaaaggcctagctcctgttacaaacagcagtgggaaaatggccctgaacagccctcagcctggccccgtggagagcgagctggggaagcagctcttgaaaacgggctgggagggcagccctctgccgagaagtccaacccaggatgcggcaggagtgggtcccccagcctcccaggggagaggcccagctggagagccgatggggcccgaggctggctccaaagctgagcttccacccactgtgtcccggcccccgctgctgcgagggctctcctgggacagtggccctgaagaacctggcccccggctgcagaaagtgcttgccaagctgccactggcagaggaagaaaagcgttttgcaggcaaggccggcggcaagctggccaaggcccctggtctcaaagactttcagatacaagtgcagcccgtgcggatgcagaaactgaccaagctccgagaggagcacatcctgatgagaaatcagaacttagtggggctcaagcttccagaccttagtgaagcagctgagcaggaaaaagggcttccttctgaactctccccagctattgaggaagaagagtcaaagagtggcttagatgtcatgcctaatatttctgatgtgctgctgcgcaaactgcgggtccacaggagtctccctggaagtgcccctccactcactgaaaaggaagttgagaacgtgtttgtgcaactgtccttggcctttagaaatgacagctacactctggaatctagaattaaccaggctgaaagggaacgcaacctgacagaggagaacactgagaaagaactggaaaacttcaaagcttccattacgtcctcagcttcactctggcaccactgtgagcaccgggaaacctaccagaagttgctggaggacatcgctgtcctgcaccgcctggctgcccgcctctccagccgagctgaggtggtaggcgccgtccgccaggaaaagcgcatgtcgaaagcaacggaagtgatgatgcagtatgtggagaatctaaagaggacgtatgagaaggaccatgcggagctcatggagtttaaaaagcttgcaaatcagaattcaagccgcagctgtggcccctctgaagatggggtccctcgcacggcacggtccatgtccctcacgctgggaaagaatatgcctcgccggagggtcagcgttgctgtggttcctaagtttaatgccctgaatctgcctggccaaactcccagctcatcatccattccctccttaccagccttgtcggaatcacccaatgggaaaggcagcctacctgtcacttcagcactgcctgcacttttggaaaatggaaagacaaatggggacccagattgtgaagcctctgctcctgcgctgaccctgagctgcctggaggagcttagtcaggagaccaaggccaggatggaggaagaagcctacagcaagggattccaagaaggtctaaagaagaccaaagaacttcaagacctgaaggaggaggaggaagaacagaagagtgagagtcctgaggaacctgaagaggtagaagaaactgaggaagaggaaaagggcccaagaagcagcaaacttgaagaattggtccatttcttacaagtcatgtatcccaaactgtgtcagcactggcaagtgatctggatgatggctgcagtgatgctggtcttgactgttgtgctggggctctacaattcctataactcttgtgcagagcaggctgatgggccccttggaagatccacttgctcggcagcccagagggactcctggtggagctcaggactccagcatgagcagcctacagagcagtaggaaacctcacacctagccagtgccctgctctgagacactcagactaccaccctttccccaagtataacgtcaggcccaagtgtggacacactgccgcccatcccatcaggtcatgaggaagggttcttttaacactcggcacttctgtgggagctattcatacacagtgacttgatgttcttggaggatcaacaaaactgccctgggaaagcatccagtggatgaagaagtcaccttcaccaaggaactctattggaagggaaggtctcctgcccctagctcaggtggctggggagaactaaaacaccttcactggtggttgggggtaaggagcggggcacgggggaggaggaggtagggggcagtaaaaaacttactctcttttttcctctctgtaattggttatcaggaagaatttgcttaatgactaacaccctaagcatcagacctggaatttggagttgcaaagtgactatcttcccatttcccatctcattttcaataacttcagcctcccattctttcctttggaatgagagtttctttttacagaagtaggaaaggcttctcagaaaaaaaaaaaaaagtataggctgaatttagctcagtgcttgaaatgggaagatatgaattattatatacgcatctgtccacacatacacacatactgttgtgtacacacacacaacatgcctgtgcacagagccaacaacccttcaaaagtgtgctctgggtgtgtacctctggataaataagatgcatgccaagccaacccacagattttcaccagtgtggggcagtcaccaggcacctgttcaatgagctgtccacatggattgaagatgttttaaaaacacagaaaactcatggcttcaatggcagacttactagtctccatttcaaatgccaactctgagctgctgtacagcacaatctattccctattctctctttgaaaacagttaacccacctcacaggtgaatgaggagagaagatgtgctttctgcttcagtctcttactctgtgtgtgaccacatgcaagagtaaacttgcacctcagtgcttcagttcaaatggggtttccaaccccagtataattaggggtgtttcagagcatccccagttatttagcacaacactgaaggagcacatcccctctccattttgacttctctccccacttttacagccactgccttcatcagttttgtagaggtttgatttccatgtgggttttgttgtcattgttttgcatttttgttttgttattgatattgtttgctttcattgctaaaactcatatacgacttactatgagccaagcactgttctcagtattacataggtatgaattcatttaagtcctgaagaaaaagaaaaaaaaatacgaagtggatattacccttcccattttcaaataaggaaactgaagcacaaaaagaacaagtaacttgacaaggacaccccggtagtaaatcatggggctggagctcaaccccagggtaggctggctccagagctgtgctctccttgactcttctgatggtctcctagctggaagcctcacatttcagtctcattcccccaagtggcccatcagctactccatctctggctccccaactaaacagtttctctcatagtgctggacctccactcactagttttttttccagctgttcttctcttttcttcaggtcactcttctcgaccgagtgcaaaaattatcccctccataccagctttgatgaccttccttccatactcctcaccagacacaacataataggtcacacactcctctgtgctttctggcacgttttaaacattattattattgacctttacctatagtataccatggcctatttatgtatccatctcccctagcatttttcctcaaagacaagaaccatgtcttacccatctcttgggtaagtgcctagcatggtggctgacgcttgggagggtgtcattaaatgttgctcaaaagaacaagcaaacatttaaggtggtggagagcagcctggggacagctgacatgctgcatgcttctcagtaccagcaccatcacaatgcaaaaagcaacatctttcttaacctcagcttattctgtttttcagtctactctgtgagagagcaggaatgagaccagactagcaacaccattgccaagctcaaggactgggctcaatgcagtcactccttcagagagaccccccaccccaagcatgccccactttaaaatagcatgtttattgaagggggcatcctttacagtagctagaaaatgactgaggcccaagccagggttgatcaaggatgtgccattaaggtaaagagttacagagcagggcagagggactctgggggcagaagtggatgatttgcccggcctcttccagggggtctggatacaactgaaggagctttagctacatgaggccctcagagccaaagacaggatgcaaatagagttctagagagtggccgtggaagcagaactccaggtggggaatgttcaatctctgcctcccttaaagcagggccaggctcagctggccccattgttcacttggtcacaagtttcctacctttgtttctggatgagtcaaaggccaggaaggcagttatggagagctcctgcacctccagctgccccacagaaaagcctgcaagagtacttccaggcacaggccctctcccaccctattccatttgtaagcaagggaggtcgaggaaaaggacatctccaaaagggagcataagaatagccatatatacaggggctgaaaaagtgctcatgagtccatcttttctggaaagcaaagaccagcctgaagcagtgggagctgctgcccaagcggtagtgaactggagagaaacaggccctggattttcagtgaggatgtggatctgaagagtcccccaaatgcctctgaagtctgacatctctgcttagccctaggagtctggttccctgccttcagttgcagagtgatgtgtttgtgtcattgttgatgtcacctcctaaaaagaccttcactttctggctgccacaaagccatatgtgttgctccccatatacagcctgacagagtaaatggagaggaagtgctggatttgtgtatcactggctatcagttcctcatgttgttaagcctcacacaggtgtgctagcattgaactgtagagtgtcacatacctgagtttgaaaataaaagcacatttccaaacctctggcagc

SEQ ID NO: 7142 - protein, 597 aa, Homo sapiens
MALNSPQPGPVESELGKQLLKTGWEGSPLPRSPTQDAAGVGPPASQGRGPAGEPMGPEAGSKAELPPTVSRPPLLRGLSWDSGPEEPGPRLQKVLAKLPLAEEEKRFAGKAGGKLAKAPGLKDFQIQVQPVRMQKLTKLREEHILMRNQNLVGLKLPDLSEAAEQEKGLPSELSPAIEEEESKSGLDVMPNISDVLLRKLRVHRSLPGSAPPLTEKEVENVFVQLSLAFRNDSYTLESRINQAERERNLTEENTEKELENFKASITSSASLWHHCEHRETYQKLLEDIAVLHRLAARLSSRAEVVGAVRQEKRMSKATEVMMQYVENLKRTYEKDHAELMEFKKLANQNSSRSCGPSEDGVPRTARSMSLTLGKNMPRRRVSVAVVPKFNALNLPGQTPSSSSIPSLPALSESPNGKGSLPVTSALPALLENGKTNGDPDCEASAPALTLSCLEELSQETKARMEEEAYSKGFQEGLKKTKELQDLKEEEEEQKSESPEEPEEVEETEEEEKGPRSSKLEELVHFLQVMYPKLCQHWQVIWMMAAVMLVLTVVLGLYNSYNSCAEQADGPLGRSTCSAAQRDSWWSSGLQHEQPTEQ

SEQ ID NO: 7143 - DNA, 6012 bp, Homo sapiens
gaataactcagttttaggtaagcctcccctatatcctagaataacctgcctcttcggctgggaagcggagggaaccttctcttccttaaagacagggtctcgcactgtcacccaggctggagtgcagtggtgcaaccccacctcccgggttcaagcaattctcatgcctcagcctcccaagtagctgggattacagcctgtggagcccaggcctcttggagcatctttggggctgacgcagcggaggttccgggcacacgtggccactcccagcaggaggctgccatgccccacattcccgaggacgaggagccccccggagagccacaggcagcccagagccctgccggccaaagttcacagtccccacaagaggctttctcaccgacacttgaaggtgtccactgcctccctgacatctgtggaccccgcggggcacatcattgacctggtgaatgaccagctgccagacatcagcatctcagaggaggacaagaagaaaaacctggcgctgctggaagaagccaagttggtgagtgagcgattcctgacccgccgtgggaggaagtccaggagcagccccggagactccccatcagctgtttccccgaacctcagccccagcgcttctcctacatcctctcggagcaactcacttacagtccccaccccgccaggtttggatgtgtgcagtggcccgccatcccctctgcctggagcaccaccacagaagggggatgaggccgacgtctcttcacctcaccctggcgagcctaacgtccccaaagggctagctgacaggaagcagaatgaccagaggaaagtgtctcagggcaggctggctcctcgtcctcctccagttgagaagtccaaagagattgcaatagaacaaaaggaaaacttcgatcccctccagtaccccgagaccacacccaaaggcctagctcctgttacaaacagcagtgggaaaatggccctgaacagccctcagcctggccccgtggagagcgagctggggaagcagctcttgaaaacgggctgggagggcagccctctgccgagaagtccaacccaggatgcggcaggagtgggtcccccagcctcccaggggagaggcccagctggagagccgatggggcccgaggctggctccaaagctgagcttccacccactgtgtcccggcccccgctgctgcgagggctctcctgggacagtggccctgaagaacctggcccccggctgcagaaagtgcttgccaagctgccactggcagaggaagaaaagcgttttgcaggcaaggccggcggcaagctggccaaggcccctggtctcaaagactttcagatacaagtgcagcccgtgcggatgcagaaactgaccaagctccgagaggagcacatcctgatgagaaatcagaacttagtggggctcaagcttccagaccttagtgaagcagctgagcaggaaaaagggcttccttctgaactctccccagctattgaggaagaagagtcaaagagtggcttagatgtcatgcctaatatttctgatgtgctgctgcgcaaactgcgggtccacaggagtctccctggaagtgcccctccactcactgaaaaggaagttgagaacgtgtttgtgcaactgtccttggcctttagaaatgacagctacactctggaatctagaattaaccaggctgaaagggaacgcaacctgacagaggagaacactgagaaagaactggaaaacttcaaagcttccattacgtcctcagcttcactctggcaccactgtgagcaccgggaaacctaccagaagttgctggaggacatcgctgtcctgcaccgcctggctgcccgcctctccagccgagctgaggtggtaggcgccgtccgccaggaaaagcgcatgtcgaaagcaacggaagtgatgatgcagtatgtggagaatctaaagaggacgtatgagaaggaccatgcggagctcatggagtttaaaaagcttgcaaatcagaattcaagccgcagctgtggcccctctgaagatggggtccctcgcacggcacggtccatgtccctcacgctgggaaagaatatgcctcgccggagggtcagcgttgctgtggttcctaagtttaatgccctgaatctgcctggccaaactcccagctcatcatccattccctccttaccagccttgtcggaatcacccaatgggaaaggcagcctacctgtcacttcagcactgcctgcacttttggaaaatggaaagacaaatggggacccagattgtgaagcctctgctcctgcgctgaccctgagctgcctggaggagcttagtcaggagaccaaggccaggatggaggaagaagcctacagcaagggattccaagaaggtctaaagaagaccaaagaacttcaagacctgaaggaggaggaggaagaacagaagagtgagagtcctgaggaacctgaagaggtagaagaaactgaggaagaggaaaagggcccaagaagcagcaaacttgaagaattggtccatttcttacaagtcatgtatcccaaactgtgtcagcactggcaagtgatctggatgatggctgcagtgatgctggtcttgactgttgtgctggggctctacaattcctataactcttgtgcagagcaggctgatgggccccttggaagatccacttgctcggcagcccagagggactcctggtggagctcaggactccagcatgagcagcctacagagcagtaggaaacctcacacctagccagtgccctgctctgagacactcagactaccaccctttccccaagtataacgtcaggcccaagtgtggacacactgccgcccatcccatcaggtcatgaggaagggttcttttaacactcggcacttctgtgggagctattcatacacagtgacttgatgttcttggaggatcaacaaaactgccctgggaaagcatccagtggatgaagaagtcaccttcaccaaggaactctattggaagggaaggtctcctgcccctagctcaggtggctggggagaactaaaacaccttcactggtggttgggggtaaggagcggggcacgggggaggaggaggtagggggcagtaaaaaacttactctcttttttcctctctgtaattggttatcaggaagaatttgcttaatgactaacaccctaagcatcagacctggaatttggagttgcaaagtgactatcttcccatttcccatctcattttcaataacttcagcctcccattctttcctttggaatgagagtttctttttacagaagtaggaaaggcttctcagaaaaaaaaaaaaaagtataggctgaatttagctcagtgcttgaaatgggaagatatgaattattatatacgcatctgtccacacatacacacatactgttgtgtacacacacacaacatgcctgtgcacagagccaacaacccttcaaaagtgtgctctgggtgtgtacctctggataaataagatgcatgccaagccaacccacagattttcaccagtgtggggcagtcaccaggcacctgttcaatgagctgtccacatggattgaagatgttttaaaaacacagaaaactcatggcttcaatggcagacttactagtctccatttcaaatgccaactctgagctgctgtacagcacaatctattccctattctctctttgaaaacagttaacccacctcacaggtgaatgaggagagaagatgtgctttctgcttcagtctcttactctgtgtgtgaccacatgcaagagtaaacttgcacctcagtgcttcagttcaaatggggtttccaaccccagtataattaggggtgtttcagagcatccccagttatttagcacaacactgaaggagcacatcccctctccattttgacttctctccccacttttacagccactgccttcatcagttttgtagaggtttgatttccatgtgggttttgttgtcattgttttgcatttttgttttgttattgatattgtttgctttcattgctaaaactcatatacgacttactatgagccaagcactgttctcagtattacataggtatgaattcatttaagtcctgaagaaaaagaaaaaaaaatacgaagtggatattacccttcccattttcaaataaggaaactgaagcacaaaaagaacaagtaacttgacaaggacaccccggtagtaaatcatggggctggagctcaaccccagggtaggctggctccagagctgtgctctccttgactcttctgatggtctcctagctggaagcctcacatttcagtctcattcccccaagtggcccatcagctactccatctctggctccccaactaaacagtttctctcatagtgctggacctccactcactagttttttttccagctgttcttctcttttcttcaggtcactcttctcgaccgagtgcaaaaattatcccctccataccagctttgatgaccttccttccatactcctcaccagacacaacataataggtcacacactcctctgtgctttctggcacgttttaaacattattattattgacctttacctatagtataccatggcctatttatgtatccatctcccctagcatttttcctcaaagacaagaaccatgtcttacccatctcttgggtaagtgcctagcatggtggctgacgcttgggagggtgtcattaaatgttgctcaaaagaacaagcaaacatttaaggtggtggagagcagcctggggacagctgacatgctgcatgcttctcagtaccagcaccatcacaatgcaaaaagcaacatctttcttaacctcagcttattctgtttttcagtctactctgtgagagagcaggaatgagaccagactagcaacaccattgccaagctcaaggactgggctcaatgcagtcactccttcagagagaccccccaccccaagcatgccccactttaaaatagcatgtttattgaagggggcatcctttacagtagctagaaaatgactgaggcccaagccagggttgatcaaggatgtgccattaaggtaaagagttacagagcagggcagagggactctgggggcagaagtggatgatttgcccggcctcttccagggggtctggatacaactgaaggagctttagctacatgaggccctcagagccaaagacaggatgcaaatagagttctagagagtggccgtggaagcagaactccaggtggggaatgttcaatctctgcctcccttaaagcagggccaggctcagctggccccattgttcacttggtcacaagtttcctacctttgtttctggatgagtcaaaggccaggaaggcagttatggagagctcctgcacctccagctgccccacagaaaagcctgcaagagtacttccaggcacaggccctctcccaccctattccatttgtaagcaagggaggtcgaggaaaaggacatctccaaaagggagcataagaatagccatatatacaggggctgaaaaagtgctcatgagtccatcttttctggaaagcaaagaccagcctgaagcagtgggagctgctgcccaagcggtagtgaactggagagaaacaggccctggattttcagtgaggatgtggatctgaagagtcccccaaatgcctctgaagtctgacatctctgcttagccctaggagtctggttccctgccttcagttgcagagtgatgtgtttgtgtcattgttgatgtcacctcctaaaaagaccttcactttctggctgccacaaagccatatgtgttgctccccatatacagcctgacagagtaaatggagaggaagtgctggatttgtgtatcactggctatcagttcctcatgttgttaagcctcacacaggtgtgctagcattgaactgtagagtgtcacatacctgagtttgaaaataaaagcacatttccaaacctctggcagc

SEQ ID NO: 7144 - protein, 597 aa, Homo sapiens; identical to SEQ ID NO: 7142

SEQ ID NO: 7145 - DNA, 6162 bp, Homo sapiens
ggcgctggcccagggtcttctccaggctcacatgcttgctggaggctccaggcgggtggggagatctgcagggtccctttgttcccgtccggccaggacagtgtccagtggcacgagttgccatggggactgccatctgctgtgtggatacccatcggaggggcccagggtgagcgactgccccaaaggcccagcctgccctgagccctgaggccagctggtcggctttccctgccattatcccccgagccaggccggagtggggctcccagaggagctctcggctctaagtcccagcccctctcagaggaggcgtgcggccgaggttctgcagccagaggcttctcggctctgagctccggagccagatgtaacattgaccttaaatggtaaaagctccccagagtgaagagaggctggccagaggaggaaaggagaataactcagttttagggtcctcctgccgcaggagtatcttgcagtccaactcccacgattgtcctgactggggatgccacttcaccagaaggagaaaccgacaaaaacctggccaacagagttcacagtccccacaagaggctttctcaccgacacttgaaggtgtccactgcctccctgacatctgtggaccccgcggggcacatcattgacctggtgaatgaccagctgccagacatcagcatctcagaggaggacaagaagaaaaacctggcgctgctggaagaagccaagttggtgagtgagcgattcctgacccgccgtgggaggaagtccaggagcagccccggagactccccatcagctgtttccccgaacctcagccccagcgcttctcctacatcctctcggagcaactcacttacagtccccaccccgccagaagggggatgaggccgacgtctcttcacctcaccctggcgagcctaacgtccccaaagggctagctgacaggaagcagaatgaccagaggaaagtgtctcagggcaggctggctcctcgtcctcctccagttgagaagtccaaagagattgcaatagaacaaaaggaaaacttcgatcccctccagtaccccgagaccacacccaaaggcctagctcctgttacaaacagcagtgggaaaatggccctgaacagccctcagcctggccccgtggagagcgagctggggaagcagctcttgaaaacgggctgggagggcagccctctgccgagaagtccaacccaggatgcggcaggagtgggtcccccagcctcccaggggagaggcccagctggagagccgatggggcccgaggctggctccaaagctgagcttccacccactgtgtcccggcccccgctgctgcgagggctctcctgggacagtggccctgaagaacctggcccccggctgcagaaagtgcttgccaagctgccactggcagaggaagaaaagcgttttgcaggcaaggccggcggcaagctggccaaggcccctggtctcaaagactttcagatacaagtgcagcccgtgcggatgcagaaactgaccaagctccgagaggagcacatcctgatgagaaatcagaacttagtggggctcaagcttccagaccttagtgaagcagctgagcaggaaaaagggcttccttctgaactctccccagctattgaggaagaagagtcaaagagtggcttagatgtcatgcctaatatttctgatgtgctgctgcgcaaactgcgggtccacaggagtctccctggaagtgcccctccactcactgaaaaggaagttgagaacgtgtttgtgcaactgtccttggcctttagaaatgacagctacactctggaatctagaattaaccaggctgaaagggaacgcaacctgacagaggagaacactgagaaagaactggaaaacttcaaagcttccattacgtcctcagcttcactctggcaccactgtgagcaccgggaaacctaccagaagttgctggaggacatcgctgtcctgcaccgcctggctgcccgcctctccagccgagctgaggtggtaggcgccgtccgccaggaaaagcgcatgtcgaaagcaacggaagtgatgatgcagtatgtggagaatctaaagaggacgtatgagaaggaccatgcggagctcatggagtttaaaaagcttgcaaatcagaattcaagccgcagctgtggcccctctgaagatggggtccctcgcacggcacggtccatgtccctcacgctgggaaagaatatgcctcgccggagggtcagcgttgctgtggttcctaagtttaatgccctgaatctgcctggccaaactcccagctcatcatccattccctccttaccagccttgtcggaatcacccaatgggaaaggcagcctacctgtcacttcagcactgcctgcacttttggaaaatggaaagacaaatggggacccagattgtgaagcctctgctcctgcgctgaccctgagctgcctggaggagcttagtcaggagaccaaggccaggatggaggaagaagcctacagcaagggattccaagaaggtctaaagaagaccaaagaacttcaagacctgaaggaggaggaggaagaacagaagagtgagagtcctgaggaacctgaagaggtagaagaaactgaggaagaggaaaagggcccaagaagcagcaaacttgaagaattggtccatttcttacaagtcatgtatcccaaactgtgtcagcactggcaagtgatctggatgatggctgcagtgatgctggtcttgactgttgtgctggggctctacaattcctataactcttgtgcagagcaggctgatgggccccttggaagatccacttgctcggcagcccagagggactcctggtggagctcaggactccagcatgagcagcctacagagcagtaggaaacctcacacctagccagtgccctgctctgagacactcagactaccaccctttccccaagtataacgtcaggcccaagtgtggacacactgccgcccatcccatcaggtcatgaggaagggttcttttaacactcggcacttctgtgggagctattcatacacagtgacttgatgttcttggaggatcaacaaaactgccctgggaaagcatccagtggatgaagaagtcaccttcaccaaggaactctattggaagggaaggtctcctgcccctagctcaggtggctggggagaactaaaacaccttcactggtggttgggggtaaggagcggggcacgggggaggaggaggtagggggcagtaaaaaacttactctcttttttcctctctgtaattggttatcaggaagaatttgcttaatgactaacaccctaagcatcagacctggaatttggagttgcaaagtgactatcttcccatttcccatctcattttcaataacttcagcctcccattctttcctttggaatgagagtttctttttacagaagtaggaaaggcttctcagaaaaaaaaaaaaaagtataggctgaatttagctcagtgcttgaaatgggaagatatgaattattatatacgcatctgtccacacatacacacatactgttgtgtacacacacacaacatgcctgtgcacagagccaacaacccttcaaaagtgtgctctgggtgtgtacctctggataaataagatgcatgccaagccaacccacagattttcaccagtgtggggcagtcaccaggcacctgttcaatgagctgtccacatggattgaagatgttttaaaaacacagaaaactcatggcttcaatggcagacttactagtctccatttcaaatgccaactctgagctgctgtacagcacaatctattccctattctctctttgaaaacagttaacccacctcacaggtgaatgaggagagaagatgtgctttctgcttcagtctcttactctgtgtgtgaccacatgcaagagtaaacttgcacctcagtgcttcagttcaaatggggtttccaaccccagtataattaggggtgtttcagagcatccccagttatttagcacaacactgaaggagcacatcccctctccattttgacttctctccccacttttacagccactgccttcatcagttttgtagaggtttgatttccatgtgggttttgttgtcattgttttgcatttttgttttgttattgatattgtttgctttcattgctaaaactcatatacgacttactatgagccaagcactgttctcagtattacataggtatgaattcatttaagtcctgaagaaaaagaaaaaaaaatacgaagtggatattacccttcccattttcaaataaggaaactgaagcacaaaaagaacaagtaacttgacaaggacaccccggtagtaaatcatggggctggagctcaaccccagggtaggctggctccagagctgtgctctccttgactcttctgatggtctcctagctggaagcctcacatttcagtctcattcccccaagtggcccatcagctactccatctctggctccccaactaaacagtttctctcatagtgctggacctccactcactagttttttttccagctgttcttctcttttcttcaggtcactcttctcgaccgagtgcaaaaattatcccctccataccagctttgatgaccttccttccatactcctcaccagacacaacataataggtcacacactcctctgtgctttctggcacgttttaaacattattattattgacctttacctatagtataccatggcctatttatgtatccatctcccctagcatttttcctcaaagacaagaaccatgtcttacccatctcttgggtaagtgcctagcatggtggctgacgcttgggagggtgtcattaaatgttgctcaaaagaacaagcaaacatttaaggtggtggagagcagcctggggacagctgacatgctgcatgcttctcagtaccagcaccatcacaatgcaaaaagcaacatctttcttaacctcagcttattctgtttttcagtctactctgtgagagagcaggaatgagaccagactagcaacaccattgccaagctcaaggactgggctcaatgcagtcactccttcagagagaccccccaccccaagcatgccccactttaaaatagcatgtttattgaagggggcatcctttacagtagctagaaaatgactgaggcccaagccagggttgatcaaggatgtgccattaaggtaaagagttacagagcagggcagagggactctgggggcagaagtggatgatttgcccggcctcttccagggggtctggatacaactgaaggagctttagctacatgaggccctcagagccaaagacaggatgcaaatagagttctagagagtggccgtggaagcagaactccaggtggggaatgttcaatctctgcctcccttaaagcagggccaggctcagctggccccattgttcacttggtcacaagtttcctacctttgtttctggatgagtcaaaggccaggaaggcagttatggagagctcctgcacctccagctgccccacagaaaagcctgcaagagtacttccaggcacaggccctctcccaccctattccatttgtaagcaagggaggtcgaggaaaaggacatctccaaaagggagcataagaatagccatatatacaggggctgaaaaagtgctcatgagtccatcttttctggaaagcaaagaccagcctgaagcagtgggagctgctgcccaagcggtagtgaactggagagaaacaggccctggattttcagtgaggatgtggatctgaagagtcccccaaatgcctctgaagtctgacatctctgcttagccctaggagtctggttccctgccttcagttgcagagtgatgtgtttgtgtcattgttgatgtcacctcctaaaaagaccttcactttctggctgccacaaagccatatgtgttgctccccatatacagcctgacagagtaaatggagaggaagtgctggatttgtgtatcactggctatcagttcctcatgttgttaagcctcacacaggtgtgctagcattgaactgtagagtgtcacatacctgagtttgaaaataaaagcacatttccaaacctctggcagc

SEQ ID NO: 7146 - protein, 597 aa, Homo sapiens; identical to SEQ ID NO: 7142

SEQ ID NO: 7147 - DNA, 915 bp, Homo sapiens
tctggatgatggctgcagtgatgctggtcttgactgttgtgctggggctctacaattcctataactcttgtgcagagcaggctgatgggccccttggaagatccacttgctcggcagcccagagggactcctggtggagctcaggactccagcatgagcagcctacagagcagtaggaaacctcacacctagccagtgccctgctctgagacactcagactaccaccctttccccaagtataacgtcaggcccaagtgtggacacactgccgcccatcccatcaggtcatgaggaagggttcttttaacactcggcacttctgtgggagctattcatacacagtgacttgatgttcttggaggatcaacaaaactgccctgggaaagcatccagtggatgaagaagtcaccttcaccaaggaactctattggaagggaaggtctcctgcccctagctcaggtggctggggagaactaaaacaccttcactggtggttggggcaaagaccagcctgaagcagtgggagctgctgcccaagcggtagtgaactggagagaaacaggccctggattttcagtgaggatgtggatctgaagagtcccccaaatgcctctgaagtctgacatctctgcttagccctaggagtctggttccctgccttcagttgcagagtgatgtgtttgtgtcattgttgatgtcacctcctaaaaagaccttcactttctggctgccacaaagccatatgtgttgctccccatatacagcctgacagagtaaatggagaggaagtgctggatttgtgtatcactggctatcagttcctcatgttgttaagcctcacacaggtgtgctagcattgaactgtagagtgtcacatacctgagtttgaaaataaaagcacatttccaaacctc

SEQ ID NO: 7148 - protein, 56 aa, Homo sapiens [sequence omitted]

SEQ ID NO: 7149 - DNA, 633 bp, Homo sapiens
gtcacccaaacaatcattcattctgggatccatggatgccagagaatctctgaacagagtttctattcggctttccacactctcaagtttagcctctgacatcttacctttcttgctcatggtttccttaactatgtatacatcccttaaatgaacatgaagtgatcataagccttcatattgctacaggcagcttgaatacagtctccagggtgttacccagagactgtggggtcatttccattctgtatctccaagatctcataagctaaaatagaacagattgagcgttcactcaccaacaacagaaaatttgggtcaactttggccactctctccacaccaattctatcattgctactgcaaaaccaaaatatccagtgaatgccattacagcattagaaatgaggaggctttttcccagcccttctgaactatggctattgctacctccaagacagtgagcctggtcacttctcttcctgcagaatatgcctcgccggagggtcagcgttgctgtggttcctaagtttaatgccctgaatctgcctggccaaactcccagctcatcatccattccctccttaccagccttgtcggaatcacccaatgggaaaggcagcctacctgtca

SEQ ID NO: 7150 - protein, 46 aa, Homo sapiens
MPRRRVSVAVVPKFNALNLPGQTPSSSSIPSLPALSESPNGKGSLP

SEQ ID NO: 7151 - DNA, 818 bp, Homo sapiens
aaaaaattgtaaccaccttggcagattgtggtgtaagcacaaaaagagttatcatttgcaaagaacgctgagctgccaacaccatgctgagggcagtgggacttcccagagtagtagaatacatgcagcctggtgtatattgagtttttgagcctatcactcagattctattctggaaatttcctctccttgttgaccctgcccccatttggtcaccctccctgccctaggactgagtacgaaggaaaggttattctactattctgtgctgggaggcagacatcgtcatacttaccaaggctgcttatgagatcttggagatacagaatggaaatgaccccacagtctctgggtaacaccctggagactgtattcaagctgcctgtagcaatatgaaggcttatgatcacttcatgttcatttaagggatgtatacatagttaaggaaaccatgagcaagaaaggagccctggtattccttgaacatgcatacctttcccagcgtgagggacatggaccgtgccgtgcgagggaccccatcttctgcagcaggagggagcagagaagagaacacaggttcagggtacatgtgcaggtgcattacataaacttgtcatgaagatttgttgtacagattatttcgtcacccagccaccctcatcagccagagttcaaaccctgacagtgcccatggagagatctggtccaaggcaccaacctcttcctgctggactgagaaagagcctcctactgtgtctctctttacctcagcttttgcacacctccaatatattgtccactgaagtcagaataatcta

SEQ ID NO: 7152 - protein, 66 aa, Homo sapiens
MKICCTDYFVTQPPSSARVQTLTVPMERSGPRHQPLPAGLRKSLLLCLSLPQLLHTSNILSTEVRI

SEQ ID NO: 7153 - DNA, 2993 bp, Homo sapiens
cctacccagctcggggttctgtccccgcccagagacctgaggctcggggctgcagatggaatgcacggcagggaggcgggaccctttgtttgtgtgtgcgtgttgttggcctccatccccactccccagactccacttctccaggcctctctcccgccttttcatcccgcatccgcaggacacccaatcaccgggcaacaggatgccttccgcgccttccaccctgacctggaattcgtgggcaagttcttgaaacccctgctgattggtgaactggccccggaggagcccagccaggaccacggcaagaactcaaagatcactgaggacttccgggccctgaggaagacggctgaggacatgaacctgttcaagaccaaccacgtgttcttcctcctcctcctggcccacatcatcgccctggagagcattgcatggttcactgtcttttactttggcaatggctggattcctaccctcatcacggcctttgtccttgctacctctcaggcccaagctggatggctgcaacatgattatggccacctgtctgtctacagaaaacccaagtggaaccaccttgtccacaaattcgtcattggccacttaaagggtgcctctgccaactggtggaatcatcgccacttccagcaccacgccaagcctaacatcttccacaaggatcccgatgtgaacatgctgcacgtgtttgttctgggcgaatggcagcccatcgagtacggcaagaagaagctgaaatacctgccctacaatcaccagcacgaatacttcttcctgattgggccgccgctgctcatccccatgtatttccagtaccagatcatcatgaccatgatcgtccataagaactgggtggacctggcctgggccgtcagctactacatccggttcttcatcacctacatccctttctacggcatcctgggagccctccttttcctcaacttcatcaggttcctggagagccactggtttgtgtgggtcacacagatgaatcacatcgtcatggagattgaccaggaggcctaccgtgactggttcagtagccagctgacagccacctgcaacgtggagcagtccttcttcaacgactggttcagtggacaccttaacttccagattgagcaccacctcttccccaccatgccccggcacaacttacacaagatcgccccgctggtgaagtctctatgtgccaagcatggcattgaataccaggagaagccgctactgagggccctgctggacatcatcaggtccctgaagaagtctgggaagctgtggctggacgcctaccttcacaaatgaagccacagcccccgggacaccgtggggaaggggtgcaggtggggtgatggccagaggaatgatgggcttttgttctgaggggtgtccgagaggctggtgtatgcactgctcacggaccccatgttggatctttctccctttctcctctcctttttctcttcacatctcccccatagcaccctgccctcatgggacctgccctccctcagccgtcagccatcagccatggccctcccagtgcctcctagccccttcttccaaggagcagagaggtggccaccgggggtggctctgtcctacctccactctctgcccctaaagatgggaggagaccagcggtccatgggtctggcctgtgagtctccccttgcagcctggtcactaggcatcacccccgctttggttcttcagatgctcttggggttcataggggcaggtcctagtcgggcagggcccctgaccctcccggcctggcttcactctccctgacggctgccattggtccaccctttcatagagaggcctgctttgttacaaagctcgggtctccctcctgcagctcggttaagtacccgaggcctctcttaagatgtccagggccccaggcccgcgggcacagccagcccaaaccttgggccctggaagagtcctccaccccatcactagagtgctctgaccctgggctttcacgggccccattccaccgcctccccaacttgagcctgtgaccttgggaccaaagggggagtccctcgtctcttgtgactcagcagaggcagtggccacgttcagggaggggccggctggcctggaggctcagcccaccctccagcttttcctcagggtgtcctgaggtccaagattctggagcaatctgacccttctccaaaggctctgttatcagctgggcagtgccagccaatccctggccatttggccccaggggacgtgggccctgcaggctgcaggagggcactggagctgggaggtctcgtcccagccctccccatctcggggctgctgtgtggacggcgctgcctcaggcactctcctgtctgaacctgcccttactgtgtttaacctgttgctccaggatgcattctgataggagggggcggcagggctgggccttgtgacaatctgcctttcaccacatggccttgcctcggtggccctgactgtcagggagggccagggaggcagagcgggagggagtctcaggaggaggctgccctgaggggctggggagggggtacctcatgaggaccagggtggagctgagaagaggaggaggtgggggctggaggtgctggtagctgaggggacgggcaagtgagaggggagggagggaagtcctgggaggatcctgagctgctgttgcagtctaacccactaatcagttcttagattcaggggaagggcaggcaccaacaactcagaatgggggctttcggggagggcgcctagtccccccagctctaagcagccaggagggacctgcatctaagcatctgggttgccatggcaatggcatgccccccagctactgtatgcccccgacccccgcagaggcagaatgaacccatagggagctgatcgtaatgtttatcatgttacttccccacccctacattttttgaaataaaataaggaattttattctc

SEQ ID NO: 7154 - protein, 422 aa, Homo sapiens
MHGREAGPFVCVCVLLASIPTPQTPLLQASLPPFHPASAGHPITGQQDAFRAFHPDLEFVGKFLKPLLIGELAPEEPSQDHGKNSKITEDFRALRKTAEDMNLFKTNHVFFLLLLAHIIALESIAWFTVFYFGNGWIPTLITAFVLATSQAQAGWLQHDYGHLSVYRKPKWNHLVHKFVIGHLKGASANWWNHRHFQHHAKPNIFHKDPDVNMLHVFVLGEWQPIEYGKKKLKYLPYNHQHEYFFLIGPPLLIPMYFQYQIIMTMIVHKNWVDLAWAVSYYIRFFITYIPFYGILGALLFLNFIRFLESHWFVWVTQMNHIVMEIDQEAYRDWFSSQLTATCNVEQSFFNDWFSGHLNFQIEHHLFPTMPRHNLHKIAPLVKSLCAKHGIEYQEKPLLRALLDIIRSLKKSGKLWLDAYLHK

SEQ ID NO: 7155 - DNA, 3125 bp, Homo sapiens
cctacccagctcggggttctgtccccgcccagagacctgaggctcggggctgcagatggaatgcacggcagggaggcgggaccctttgtttgtgtgtgcgtgttgttggcctccatccccactccccagactccacttctccaggcctctctcccgccttttcatcccgcatccgcaggacacccaatcaccgggcaacaggatgccttccgcgccttccaccctgacctggaattcgtgggcaagttcttgaaacccctgctgattggtgaactggccccggaggagcccagccaggaccacggcaagaactcaaagatcactgaggacttccgggccctgaggaagacggctgaggacatgaacctgttcaagaccaaccacgtgttcttcctcctcctcctggcccacatcatcgccctggagagcattgcatggttcactgtcttttactttggcaatggctggattcctaccctcatcacggcctttgtccttgctacctctcaggcccaagctggatggctgcaacatgattatggccacctgtctgtctacagaaaacccaagtggaaccaccttgtccacaaattcgtcattggccacttaaagggtgcctctgccaactggtggaatcatcgccacttccagcaccacgccaagcctaacatcttccacaaggatcccgatgtgaacatgctgcacgtgtttgttctgggcgaatggcagcccatcgagtacggcaagaagaagctgaaatacctgccctacaatcaccagcacgaatacttcttcctgattgggccgccgctgctcatccccatgtatttccagtaccagatcatcatgaccatgatcgtccataagaactgggtggacctggcctgggccgtcagctactacatccggttcttcatcacctacatccctttctacggcatcctgggagccctccttttcctcaacttcatcaggttcctggagagccactggtttgtgtgggtcacacagatgaatcacatcgtcatggagattgaccaggaggcctaccgtgactggttcagtagccagctgacagccacctgcaacgtggagcagtccttcttcaacgactggttcagtggacaccttaacttccagattgagcaccacctcttccccaccatgccccggcacaacttacacaagatcgccccgctggtgaagtctctatgtgccaagcatggcattgaataccaggagaagccgctactgagggccctgctggacatcatcaggtccctgaagaagtctgggaagctgtggctggacgcctaccttcacaaatgaagccacagcccccgggacaccgtggggaaggggtgcaggtggggtgatggccagaggaatgatgggcttttgttctgaggggtgtccgagaggctggtgtatgcactgctcacggaccccatgttggatctttctccctttctcctctcctttttctcttcacatctcccccatagcaccctgccctcatgggacctgccctccctcagccgtcagccatcagccatggccctcccagtgcctcctagccccttcttccaaggagcagagaggtggccaccgggggtggctctgtcctacctccactctctgcccctaaagatgggaggagaccagcggtccatgggtctggcctgtgagtctccccttgcagcctggtcactaggcatcacccccgctttggttcttcagatgctcttggggttcataggggcaggtcctagtcgggcagggcccctgaccctcccggcctggcttcactctccctgacggctgccattggtccaccctttcatagagaggcctgctttgttacaaagctcgggtctccctcctgcagctcggttaagtacccgaggcctctcttaagatgtccagggccccaggcccgcgggcacagccagcccaaaccttgggccctggaagagtcctccaccccatcactagagtgctctgaccctgggctttcacgggccccattccaccgcctccccaacttgagcctgtgaccttgggaccaaagggggagtccctcgtctcttgtgactcagcagaggcagtggccacgttcagggaggggccggctggcctggaggctcagcccaccctccagcttttcctcagggtgtcctgaggtccaagattctggagcaatctgacccttctccaaaggctctgttatcagctgggcagtgccagccaatccctggccatttggccccaggggacgtgggccctgcaggctgcaggagggcactggagctgggaggtctcgtcccagccctccccatctcggggctgctgtgtggacggcgctgcctcaggcactctcctgtctgaacctgcccttactgtgtttaacctgttgctccaggatgcattctgataggagggggcggcagggctgggccttgtgacaatctgcctttcaccacatggccttgcctcggtggccctgactgtcagggagggccagggaggcagagcgggagggagtctcaggaggaggctgccctgaggggctggggagggggtacctcatgaggaccagggtggagctgagaagaggaggaggtgggggctggaggtgctggtagctgaggggacgggcaagtgagaggggagggagggaagtcctgggaggatcctgagctgctgttgcagtctaacccactaatcagttcttagattcaggggaagggcaggcaccaacaactcagaatgggggctttcggggagggcgcctagtccccccagctctaagcagccaggagggacctgcatctaagcatctgggttgccatggcaatggcatgccccccagctactgtatgcccccgacccccgcagaggcagaatgaacccatagggagctgatcgtaatgtttatcatgttacttccccacccctacattttttgaaataaaataaggaattttattctcacttcctgtgtttcctgcacgccaatgccaggccatggtattgggtgatagatgaggcccttctagctgggcctgggcaccaggaggggtccccatgcttgcatctctctgtatcccctccctcccctgtgg

SEQ ID NO: 7156 - protein, 422 aa, Homo sapiens; identical to SEQ ID NO: 7154

SEQ ID NO: 7157 - DNA, 2229 bp, Homo sapiens
attcgttgcccccaccgggatctcctctaggatctcctccggcgcccggggccggagagtgggggagggaggaggtcggacacgtagcctgcctcgcagcagggctcgactccacgcgggagggcgggggagccggggacccgccgctccagcccgctggccttcgaaagatcctcctgggccaatggcaggcggggcgacgcgaccggattggtgcaggcgctctgctgatcgctgtggaaactcgggcggcggggaacgcgggaggatgtggaacccgaggcggggggagccggaggggcgggcagaggaggtgtcgaggccctgagctcccggggagtttttactggaggcaaaagtccatagcgggagggctgagggaggggcggaggaaggggaccgcttgggggcactgggaagccagggatcctccgccaggaaggcagggacactcccgagcgcaggcgagaaggctgggggagggggcgcggtgggaggagtaggagaagacaaaagccgaaagcgaagagggcccgggctgcacacaccggctgggaggcagccgtctgtgcagcgagcagccggcgcggggaggccgcagtgcacggggcgtcacagtcggcaggcagcatggggaagggagggaaccagggcgagggggccgccgagcgcgaggtgtcggtgcccaccttcagctgggaggagattcagaagcataacctgcgcaccgacaggtggctggtcattgaccgcaaggtttacaacatcaccaaatggtccatccagcacccggggggccagcgggtcatcgggcactacgctggagaagatgcaacggatgccttccgcgccttccaccctgacctggaattcgtgggcaagttcttgaaacccctgctgattggtgaactggccccggaggagcccagccaggaccacggcaagaactcaaagatcactgaggacttccgggccctgaggaagacggctgaggacatgaacctgttcaagaccaaccacgtgttcttcctcctcctcctggcccacatcatcgccctggagagcattgcatggttcactgtcttttactttggcaatggctggattcctaccctcatcacggcctttgtccttgctacctctcaggcccaagctggatggctgcaacatgattatggccacctgtctgtctacagaaaacccaagtggaaccaccttgtccacaaattcgtcattggccacttaaagggtgcctctgccaactggtggaatcatcgccacttccagcaccacgccaagcctaacatcttccacaaggatcccgatgtgaacatgctgcacgtgtttgttctgggcgaatggcagcccatcgagtacggcaagaagaagctgaaatacctgccctacaatcaccagcacgaatacttcttcctgattgggccgccgctgctcatccccatgtatttccagtaccagatcatcatgaccatgatcgtccataagaactgggtggacctggcctgggccgtcagctactacatccggttcttcatcacctacatccctttctacggcatcctgggagccctccttttcctcaacttcatcaggttcctggagagccactggtttgtgtgggtcacacagatgaatcacatcgtcatggagattgaccaggaggcctaccgtgactggttcagtagccagctgacagccacctgcaacgtggagcagtccttcttcaacgactggttcagtggacaccttaacttccagattgagcaccagtgagcgcggggctgcggggaggcggggagacccacagcgggagggaagtggccgctatcccactgggcagaatgcagaatgtgggggccacctctttgtctctctgacaaggtctctgcccaatatagagcaaggctcccagccagccccgctgaggtcaggagaggggctcccctattccatctccctgagggtcatcctgtgcccctcatgctgtgccacttggtcatagtggttaccacctccctccatgtgggcctgggactttgtagttatggagcctgcacacgcacctcatgaccctgtgaggctagcagggcagggctacgtagcttgcctggaacatcggccgagggactgccctgctgccccttgtccttgcttcacctcttgtcactgtttttttttttttttattaaaaaataaaaaatgtagagacag

SEQ ID NO: 7158 - protein, 386 aa, Homo sapiens
MGKGGNQGEGAAEREVSVPTFSWEEIQKHNLRTDRWLVIDRKVYNITKWSIQHPGGQRVIGHYAGEDATDAFRAFHPDLEFVGKFLKPLLIGELAPEEPSQDHGKNSKITEDFRALRKTAEDMNLFKTNHVFFLLLLAHIIALESIAWFTVFYFGNGWIPTLITAFVLATSQAQAGWLQHDYGHLSVYRKPKWNHLVHKFVIGHLKGASANWWNHRHFQHHAKPNIFHKDPDVNMLHVFVLGEWQPIEYGKKKLKYLPYNHQHEYFFLIGPPLLIPMYFQYQIIMTMIVHKNWVDLAWAVSYYIRFFITYIPFYGILGALLFLNFIRFLESHWFVWVTQMNHIVMEIDQEAYRDWFSSQLTATCNVEQSFFNDWFSGHLNFQIEHQ

SEQ ID NO: 7159 - DNA, 2251 bp, Homo sapiens
attcgttgcccccaccgggatctcctctaggatctcctccggcgcccggggccggagagtgggggagggaggaggtcggacacgtagcctgcctcgcagcagggctcgactccacgcgggagggcgggggagccggggacccgccgctccagcccgctggccttcgaaagatcctcctgggccaatggcaggcggggcgacgcgaccggattggtgcaggcgctctgctgatcgctgtggaaactcgggcggcggggaacgcgggaggatgtggaacccgaggcggggggagccggaggggcgggcagaggaggtgtcgaggccctgagctcccggggagtttttactggaggcaaaagtccatagcgggagggctgagggaggggcggaggaaggggaccgcttgggggcactgggaagccagggatcctccgccaggaaggcagggacactcccgagcgcaggcgagaaggctgggggagggggcgcggtgggaggagtaggagaagacaaaagccgaaagcgaagagggcccgggctgcacacaccggctgggaggcagccgtctgtgcagcgagcagccggcgcggggaggccgcagtgcacggggcgtcacagtcggcaggcagcatggggaagggagggaaccagggcgagggggccgccgagcgcgaggtgtcggtgcccaccttcagctgggaggagattcagaagcataacctgcgcaccgacaggtggctggtcattgaccgcaaggtttacaacatcaccaaatggtccatccagcacccggggggccagcgggtcatcgggcactacgctggagaagatgcaacggatgccttccgcgccttccaccctgacctggaattcgtgggcaagttcttgaaacccctgctgattggtgaactggccccggaggagcccagccaggaccacggcaagaactcaaagatcactgaggacttccgggccctgaggaagacggctgaggacatgaacctgttcaagaccaaccacgtgttcttcctcctcctcctggcccacatcatcgccctggagagcattgcatggttcactgtcttttactttggcaatggctggattcctaccctcatcacggcctttgtccttgctacctctcaggcccaagctggatggctgcaacatgattatggccacctgtctgtctacagaaaacccaagtggaaccaccttgtccacaaattcgtcattggccacttaaagggtgcctctgccaactggtggaatcatcgccacttccagcaccacgccaagcctaacatcttccacaaggatcccgatgtgaacatgctgcacgtgtttgttctgggcgaatggcagcccatcgagtacggcaagaagaagctgaaatacctgccctacaatcaccagcacgaatacttcttcctgattgggccgccgctgctcatccccatgtatttccagtaccagatcatcatgaccatgatcgtccataagaactgggtggacctggcctgggccgtcagctactacatccggttcttcatcacctacatccctttctacggcatcctgggagccctccttttcctcaacttcatcaggttcctggagagccactggtttgtgtgggtcacacagatgaatcacatcgtcatggagattgaccaggaggcctaccgtgactggttcagtagccagctgacagccacctgcaacgtggagcagtccttcttcaacgactggttcagtggacaccttaacttccagattgagcaccagtgagcgcggggctgcggggaggcggggagacccacagcgggagggaagtggccgctatcccactgggcagaatgcagaatgtgggggccacctctttgtctctctgacaaggtctctgcccaatatagagcaaggctcccagccagccccgctgaggtcaggagaggggctcccctattccatctccctgagggtcatcctgtgcccctcatgctgtgccacttggtcatagtggttaccacctccctccatgtgggcctgggactttgtagttatggagcctgcacacgcacctcatgaccctgtgaggctagcagggcagggctacgtagcttgcctggaacatcggccgagggactgccctgctgccccttgtccttgcttcacctcttgtcactgtttttttttttttttattaaaaaataaaaaatgtagagacagagtctcaccctgtttcctgggc

SEQ ID NO: 7160 - protein, 386 aa, Homo sapiens; identical to SEQ ID NO: 7158

SEQ ID NO: 7161 - DNA, 3629 bp, Homo sapiens
attcgttgcccccaccgggatctcctctaggatctcctccggcgcccggggccggagagtgggggagggaggaggtcggacacgtagcctgcctcgcagcagggctcgactccacgcgggagggcgggggagccggggacccgccgctccagcccgctggccttcgaaagatcctcctgggccaatggcaggcggggcgacgcgaccggattggtgcaggcgctctgctgatcgctgtggaaactcgggcggcggggaacgcgggaggatgtggaacccgaggcggggggagccggaggggcgggcagaggaggtgtcgaggccctgagctcccggggagtttttactggaggcaaaagtccatagcgggagggctgagggaggggcggaggaaggggaccgcttgggggcactgggaagccagggatcctccgccaggaaggcagggacactcccgagcgcaggcgagaaggctgggggagggggcgcggtgggaggagtaggagaagacaaaagccgaaagcgaagagggcccgggctgcacacaccggctgggaggcagccgtctgtgcagcgagcagccggcgcggggaggccgcagtgcacggggcgtcacagtcggcaggcagcatggggaagggagggaaccagggcgagggggccgccgagcgcgaggtgtcggtgcccaccttcagctgggaggagattcagaagcataacctgcgcaccgacaggtggctggtcattgaccgcaaggtttacaacatcaccaaatggtccatccagcacccggggggccagcgggtcatcgggcactacgctggagaagatgcaacggatgccttccgcgccttccaccctgacctggaattcgtgggcaagttcttgaaacccctgctgattggtgaactggccccggaggagcccagccaggaccacggcaagaactcaaagatcactgaggacttccgggccctgaggaagacggctgaggacatgaacctgttcaagaccaaccacgtgttcttcctcctcctcctggcccacatcatcgccctggagagcattgcatggttcactgtcttttactttggcaatggctggattcctaccctcatcacggcctttgtccttgctacctctcaggcccaagctggatggctgcaacatgattatggccacctgtctgtctacagaaaacccaagtggaaccaccttgtccacaaattcgtcattggccacttaaagggtgcctctgccaactggtggaatcatcgccacttccagcaccacgccaagcctaacatcttccacaaggatcccgatgtgaacatgctgcacgtgtttgttctgggcgaatggcagcccatcgagtacggcaagaagaagctgaaatacctgccctacaatcaccagcacgaatacttcttcctgattgggccgccgctgctcatccccatgtatttccagtaccagatcatcatgaccatgatcgtccataagaactgggtggacctggcctgggccgtcagctactacatccggttcttcatcacctacatccctttctacggcatcctgggagccctccttttcctcaacttcatcaggttcctggagagccactggtttgtgtgggtcacacagatgaatcacatcgtcatggagattgaccaggaggcctaccgtgactggttcagtagccagctgacagccacctgcaacgtggagcagtccttcttcaacgactggttcagtggacaccttaacttccagattgagcaccacctcttccccaccatgccccggcacaacttacacaagatcgccccgctggtgaagtctctatgtgccaagcatggcattgaataccaggagaagccgctactgagggccctgctggacatcatcaggtccctgaagaagtctgggaagctgtggctggacgcctaccttcacaaatgaagccacagcccccgggacaccgtggggaaggggtgcaggtggggtgatggccagaggaatgatgggcttttgttctgaggggtgtccgagaggctggtgtatgcactgctcacggaccccatgttggatctttctccctttctcctctcctttttctcttcacatctcccccatagcaccctgccctcatgggacctgccctccctcagccgtcagccatcagccatggccctcccagtgcctcctagccccttcttccaaggagcagagaggtggccaccgggggtggctctgtcctacctccactctctgcccctaaagatgggaggagaccagcggtccatgggtctggcctgtgagtctccccttgcagcctggtcactaggcatcacccccgctttggttcttcagatgctcttggggttcataggggcaggtcctagtcgggcagggcccctgaccctcccggcctggcttcactctccctgacggctgccattggtccaccctttcatagagaggcctgctttgttacaaagctcgggtctccctcctgcagctcggttaagtacccgaggcctctcttaagatgtccagggccccaggcccgcgggcacagccagcccaaaccttgggccctggaagagtcctccaccccatcactagagtgctctgaccctgggctttcacgggccccattccaccgcctccccaacttgagcctgtgaccttgggaccaaagggggagtccctcgtctcttgtgactcagcagaggcagtggccacgttcagggaggggccggctggcctggaggctcagcccaccctccagcttttcctcagggtgtcctgaggtccaagattctggagcaatctgacccttctccaaaggctctgttatcagctgggcagtgccagccaatccctggccatttggccccaggggacgtgggccctgcaggctgcaggagggcactggagctgggaggtctcgtcccagccctccccatctcggggctgctgtgtggacggcgctgcctcaggcactctcctgtctgaacctgcccttactgtgtttaacctgttgctccaggatgcattctgataggagggggcggcagggctgggccttgtgacaatctgcctttcaccacatggccttgcctcggtggccctgactgtcagggagggccagggaggcagagcgggagggagtctcaggaggaggctgccctgaggggctggggagggggtacctcatgaggaccagggtggagctgagaagaggaggaggtgggggctggaggtgctggtagctgaggggacgggcaagtgagaggggagggagggaagtcctgggaggatcctgagctgctgttgcagtctaacccactaatcagttcttagattcaggggaagggcaggcaccaacaactcagaatgggggctttcggggagggcgcctagtccccccagctctaagcagccaggagggacctgcatctaagcatctgggttgccatggcaatggcatgccccccagctactgtatgcccccgacccccgcagaggcagaatgaacccatagggagctgatcgtaatgtttatcatgttacttccccacccctacattttttgaaataaaataaggaattttattctc

SEQ ID NO: 7162 - protein, 444 aa, Homo sapiens; identical to SEQ ID NO: 1002

SEQ ID NO: 7163 - DNA, 3761 bp, Homo sapiens
attcgttgcccccaccgggatctcctctaggatctcctccggcgcccggggccggagagtgggggagggaggaggtcggacacgtagcctgcctcgcagcagggctcgactccacgcgggagggcgggggagccggggacccgccgctccagcccgctggccttcgaaagatcctcctgggccaatggcaggcggggcgacgcgaccggattggtgcaggcgctctgctgatcgctgtggaaactcgggcggcggggaacgcgggaggatgtggaacccgaggcggggggagccggaggggcgggcagaggaggtgtcgaggccctgagctcccggggagtttttactggaggcaaaagtccatagcgggagggctgagggaggggcggaggaaggggaccgcttgggggcactgggaagccagggatcctccgccaggaaggcagggacactcccgagcgcaggcgagaaggctgggggagggggcgcggtgggaggagtaggagaagacaaaagccgaaagcgaagagggcccgggctgcacacaccggctgggaggcagccgtctgtgcagcgagcagccggcgcggggaggccgcagtgcacggggcgtcacagtcggcaggcagcatggggaagggagggaaccagggcgagggggccgccgagcgcgaggtgtcggtgcccaccttcagctgggaggagattcagaagcataacctgcgcaccgacaggtggctggtcattgaccgcaaggtttacaacatcaccaaatggtccatccagcacccggggggccagcgggtcatcgggcactacgctggagaagatgcaacggatgccttccgcgccttccaccctgacctggaattcgtgggcaagttcttgaaacccctgctgattggtgaactggccccggaggagcccagccaggaccacggcaagaactcaaagatcactgaggacttccgggccctgaggaagacggctgaggacatgaacctgttcaagaccaaccacgtgttcttcctcctcctcctggcccacatcatcgccctggagagcattgcatggttcactgtcttttactttggcaatggctggattcctaccctcatcacggcctttgtccttgctacctctcaggcccaagctggatggctgcaacatgattatggccacctgtctgtctacagaaaacccaagtggaaccaccttgtccacaaattcgtcattggccacttaaagggtgcctctgccaactggtggaatcatcgccacttccagcaccacgccaagcctaacatcttccacaaggatcccgatgtgaacatgctgcacgtgtttgttctgggcgaatggcagcccatcgagtacggcaagaagaagctgaaatacctgccctacaatcaccagcacgaatacttcttcctgattgggccgccgctgctcatccccatgtatttccagtaccagatcatcatgaccatgatcgtccataagaactgggtggacctggcctgggccgtcagctactacatccggttcttcatcacctacatccctttctacggcatcctgggagccctccttttcctcaacttcatcaggttcctggagagccactggtttgtgtgggtcacacagatgaatcacatcgtcatggagattgaccaggaggcctaccgtgactggttcagtagccagctgacagccacctgcaacgtggagcagtccttcttcaacgactggttcagtggacaccttaacttccagattgagcaccacctcttccccaccatgccccggcacaacttacacaagatcgccccgctggtgaagtctctatgtgccaagcatggcattgaataccaggagaagccgctactgagggccctgctggacatcatcaggtccctgaagaagtctgggaagctgtggctggacgcctaccttcacaaatgaagccacagcccccgggacaccgtggggaaggggtgcaggtggggtgatggccagaggaatgatgggcttttgttctgaggggtgtccgagaggctggtgtatgcactgctcacggaccccatgttggatctttctccctttctcctctcctttttctcttcacatctcccccatagcaccctgccctcatgggacctgccctccctcagccgtcagccatcagccatggccctcccagtgcctcctagccccttcttccaaggagcagagaggtggccaccgggggtggctctgtcctacctccactctctgcccctaaagatgggaggagaccagcggtccatgggtctggcctgtgagtctccccttgcagcctggtcactaggcatcacccccgctttggttcttcagatgctcttggggttcataggggcaggtcctagtcgggcagggcccctgaccctcccggcctggcttcactctccctgacggctgccattggtccaccctttcatagagaggcctgctttgttacaaagctcgggtctccctcctgcagctcggttaagtacccgaggcctctcttaagatgtccagggccccaggcccgcgggcacagccagcccaaaccttgggccctggaagagtcctccaccccatcactagagtgctctgaccctgggctttcacgggccccattccaccgcctccccaacttgagcctgtgaccttgggaccaaagggggagtccctcgtctcttgtgactcagcagaggcagtggccacgttcagggaggggccggctggcctggaggctcagcccaccctccagcttttcctcagggtgtcctgaggtccaagattctggagcaatctgacccttctccaaaggctctgttatcagctgggcagtgccagccaatccctggccatttggccccaggggacgtgggccctgcaggctgcaggagggcactggagctgggaggtctcgtcccagccctccccatctcggggctgctgtgtggacggcgctgcctcaggcactctcctgtctgaacctgcccttactgtgtttaacctgttgctccaggatgcattctgataggagggggcggcagggctgggccttgtgacaatctgcctttcaccacatggccttgcctcggtggccctgactgtcagggagggccagggaggcagagcgggagggagtctcaggaggaggctgccctgaggggctggggagggggtacctcatgaggaccagggtggagctgagaagaggaggaggtgggggctggaggtgctggtagctgaggggacgggcaagtgagaggggagggagggaagtcctgggaggatcctgagctgctgttgcagtctaacccactaatcagttcttagattcaggggaagggcaggcaccaacaactcagaatgggggctttcggggagggcgcctagtccccccagctctaagcagccaggagggacctgcatctaagcatctgggttgccatggcaatggcatgccccccagctactgtatgcccccgacccccgcagaggcagaatgaacccatagggagctgatcgtaatgtttatcatgttacttccccacccctacattttttgaaataaaataaggaattttattctcacttcctgtgtttcctgcacgccaatgccaggccatggtattgggtgatagatgaggcccttctagctgggcctgggcaccaggaggggtccccatgcttgcatctctctgtatcccctccctcccctgtgg

SEQ ID NO: 7164 - protein, 444 aa, Homo sapiens; identical to SEQ ID NO: 1002

SEQ ID NO: 7165 - DNA, 1769 bp, Homo sapiens
ggagccggaggggcgggcagaggaggtgtcgaggccctgctggacatcatcaggtccctgaagaagtctgggaagctgtggctggacgcctaccttcacaaatgaagccacagcccccgggacaccgtggggaaggggtgcaggtggggtgatggccagaggaatgatgggcttttgttctgaggggtgtccgagaggctggtgtatgcactgctcacggaccccatgttggatctttctccctttctcctctcctttttctcttcacatctcccccatagcaccctgccctcatgggacctgccctccctcagccgtcagccatcagccatggccctcccagtgcctcctagccccttcttccaaggagcagagaggtggccaccgggggtggctctgtcctacctccactctctgcccctaaagatgggaggagaccagcggtccatgggtctggcctgtgagtctccccttgcagcctggtcactaggcatcacccccgctttggttcttcagatgctcttggggttcataggggcaggtcctagtcgggcagggcccctgaccctcccggcctggcttcactctccctgacggctgccattggtccaccctttcatagagaggcctgctttgttacaaagctcgggtctccctcctgcagctcggttaagtacccgaggcctctcttaagatgtccagggccccaggcccgcgggcacagccagcccaaaccttgggccctggaagagtcctccaccccatcactagagtgctctgaccctgggctttcacgggccccattccaccgcctccccaacttgagcctgtgaccttgggaccaaagggggagtccctcgtctcttgtgactcagcagaggcagtggccacgttcagggaggggccggctggcctggaggctcagcccaccctccagcttttcctcagggtgtcctgaggtccaagattctggagcaatctgacccttctccaaaggctctgttatcagctgggcagtgccagccaatccctggccatttggccccaggggacgtgggccctgcaggctgcaggagggcactggagctgggaggtctcgtcccagccctccccatctcggggctgctgtgtggacggcgctgcctcaggcactctcctgtctgaacctgcccttactgtgtttaacctgttgctccaggatgcattctgataggagggggcggcagggctgggccttgtgacaatctgcctttcaccacatggccttgcctcggtggccctgactgtcagggagggccagggaggcagagcgggagggagtctcaggaggaggctgccctgaggggctggggagggggtacctcatgaggaccagggtggagctgagaagaggaggaggtgggggctggaggtgctggtagctgaggggacgggcaagtgagaggggagggagggaagtcctgggaggatcctgagctgctgttgcagtctaacccactaatcagttcttagattcaggggaagggcaggcaccaacaactcagaatgggggctttcggggagggcgcctagtccccccagctctaagcagccaggagggacctgcatctaagcatctgggttgccatggcaatggcatgccccccagctactgtatgcccccgacccccgcagaggcagaatgaacccatagggagctgatcgtaatgtttatcatgttacttccccacccctacattttttgaaataaaataaggaattttattctc

SEQ ID NO: 7166 - protein, 122 aa, Homo sapiens
MLDLSPFLLSFFSSHLPHSTLPSWDLPSLSRQPSAMALPVPPSPFFQGAERWPPGVALSYLHSLPLKMGGDQRSMGLACESPLAAWSLGITPALVLQMLLGFIGAGPSRAGPLTLPAWLHSP

SEQ ID NO: 7167 - DNA, 1901 bp, Homo sapiens
ggagccggaggggcgggcagaggaggtgtcgaggccctgctggacatcatcaggtccctgaagaagtctgggaagctgtggctggacgcctaccttcacaaatgaagccacagcccccgggacaccgtggggaaggggtgcaggtggggtgatggccagaggaatgatgggcttttgttctgaggggtgtccgagaggctggtgtatgcactgctcacggaccccatgttggatctttctccctttctcctctcctttttctcttcacatctcccccatagcaccctgccctcatgggacctgccctccctcagccgtcagccatcagccatggccctcccagtgcctcctagccccttcttccaaggagcagagaggtggccaccgggggtggctctgtcctacctccactctctgcccctaaagatgggaggagaccagcggtccatgggtctggcctgtgagtctccccttgcagcctggtcactaggcatcacccccgctttggttcttcagatgctcttggggttcataggggcaggtcctagtcgggcagggcccctgaccctcccggcctggcttcactctccctgacggctgccattggtccaccctttcatagagaggcctgctttgttacaaagctcgggtctccctcctgcagctcggttaagtacccgaggcctctcttaagatgtccagggccccaggcccgcgggcacagccagcccaaaccttgggccctggaagagtcctccaccccatcactagagtgctctgaccctgggctttcacgggccccattccaccgcctccccaacttgagcctgtgaccttgggaccaaagggggagtccctcgtctcttgtgactcagcagaggcagtggccacgttcagggaggggccggctggcctggaggctcagcccaccctccagcttttcctcagggtgtcctgaggtccaagattctggagcaatctgacccttctccaaaggctctgttatcagctgggcagtgccagccaatccctggccatttggccccaggggacgtgggccctgcaggctgcaggagggcactggagctgggaggtctcgtcccagccctccccatctcggggctgctgtgtggacggcgctgcctcaggcactctcctgtctgaacctgcccttactgtgtttaacctgttgctccaggatgcattctgataggagggggcggcagggctgggccttgtgacaatctgcctttcaccacatggccttgcctcggtggccctgactgtcagggagggccagggaggcagagcgggagggagtctcaggaggaggctgccctgaggggctggggagggggtacctcatgaggaccagggtggagctgagaagaggaggaggtgggggctggaggtgctggtagctgaggggacgggcaagtgagaggggagggagggaagtcctgggaggatcctgagctgctgttgcagtctaacccactaatcagttcttagattcaggggaagggcaggcaccaacaactcagaatgggggctttcggggagggcgcctagtccccccagctctaagcagccaggagggacctgcatctaagcatctgggttgccatggcaatggcatgccccccagctactgtatgcccccgacccccgcagaggcagaatgaacccatagggagctgatcgtaatgtttatcatgttacttccccacccctacattttttgaaataaaataaggaattttattctcacttcctgtgtttcctgcacgccaatgccaggccatggtattgggtgatagatgaggcccttctagctgggcctgggcaccaggaggggtccccatgcttgcatctctctgtatcccctccctcccctgtgg

SEQ ID NO: 7168 - protein, 122 aa, Homo sapiens; identical to SEQ ID NO: 7166

SEQ ID NO: 7169 - DNA, 2219 bp, Homo sapiens
gagggaggggcggaggaaggggaccgcttgggggcactgggaagccagggatcctccgccaggaaggcagggacactcccgagcgcaggcgagaaggctgggggagggggccctgaggaagacggctgaggacatgaacctgttcaagaccaaccacgtgttcttcctcctcctcctggcccacatcatcgccctggagagcattgcatggttcactgtcttttactttggcaatggctggattcctaccctcatcacggcctttgtccttgctacctctcaggcccaagctggatggctgcaacatgattatggccacctgtctgtctacagaaaacccaagtggaaccaccttgtccacaaattcgtcattggccacttaaagggtgcctctgccaactggtggaatcatcgccacttccagcaccacgccaagcctaacatcttccacaaggatcccgatgtgaacatgctgcacgtgtttgttctgggcgaatggcagcccatcgagtacggcaagaagaagctgaaatacctgcctaccttcacaaatgaagccacagcccccgggacaccgtggggaaggggtgcaggtggggtgatggccagaggaatgatgggcttttgttctgaggggtgtccgagaggctggtgtatgcactgctcacggaccccatgttggatctttctccctttctcctctcctttttctcttcacatctcccccatagcaccctgccctcatgggacctgccctccctcagccgtcagccatcagccatggccctcccagtgcctcctagccccttcttccaaggagcagagaggtggccaccgggggtggctctgtcctacctccactctctgcccctaaagatgggaggagaccagcggtccatgggtctggcctgtgagtctccccttgcagcctggtcactaggcatcacccccgctttggttcttcagatgctcttggggttcataggggcaggtcctagtcgggcagggcccctgaccctcccggcctggcttcactctccctgacggctgccattggtccaccctttcatagagaggcctgctttgttacaaagctcgggtctccctcctgcagctcggttaagtacccgaggcctctcttaagatgtccagggccccaggcccgcgggcacagccagcccaaaccttgggccctggaagagtcctccaccccatcactagagtgctctgaccctgggctttcacgggccccattccaccgcctccccaacttgagcctgtgaccttgggaccaaagggggagtccctcgtctcttgtgactcagcagaggcagtggccacgttcagggaggggccggctggcctggaggctcagcccaccctccagcttttcctcagggtgtcctgaggtccaagattctggagcaatctgacccttctccaaaggctctgttatcagctgggcagtgccagccaatccctggccatttggccccaggggacgtgggccctgcaggctgcaggagggcactggagctgggaggtctcgtcccagccctccccatctcggggctgctgtgtggacggcgctgcctcaggcactctcctgtctgaacctgcccttactgtgtttaacctgttgctccaggatgcattctgataggagggggcggcagggctgggccttgtgacaatctgcctttcaccacatggccttgcctcggtggccctgactgtcagggagggccagggaggcagagcgggagggagtctcaggaggaggctgccctgaggggctggggagggggtacctcatgaggaccagggtggagctgagaagaggaggaggtgggggctggaggtgctggtagctgaggggacgggcaagtgagaggggagggagggaagtcctgggaggatcctgagctgctgttgcagtctaacccactaatcagttcttagattcaggggaagggcaggcaccaacaactcagaatgggggctttcggggagggcgcctagtccccccagctctaagcagccaggagggacctgcatctaagcatctgggttgccatggcaatggcatgccccccagctactgtatgcccccgacccccgcagaggcagaatgaacccatagggagctgatcgtaatgtttatcatgttacttccccacccctacattttttgaaataaaataaggaattttattctc

SEQ ID NO: 7170 - protein, 246 aa, Homo sapiens
MNLFKTNHVFFLLLLAHIIALESIAWFTVFYFGNGWIPTLITAFVLATSQAQAGWLQHDYGHLSVYRKPKWNHLVHKFVIGHLKGASANWWNHRHFQHHAKPNIFHKDPDVNMLHVFVLGEWQPIEYGKKKLKYLPTFTNEATAPGTPWGRGAGGVMARGMMGFCSEGCPRGWCMHCSRTPCWIFLPFSSPFSLHISPIAPCPHGTCPPSAVSHQPWPSQCLLAPSSKEQRGGHRGWLCPTSTLCP

SEQ ID NO: 7171 - DNA, 2351 bp, Homo sapiens
gagggaggggcggaggaaggggaccgcttgggggcactgggaagccagggatcctccgccaggaaggcagggacactcccgagcgcaggcgagaaggctgggggagggggccctgaggaagacggctgaggacatgaacctgttcaagaccaaccacgtgttcttcctcctcctcctggcccacatcatcgccctggagagcattgcatggttcactgtcttttactttggcaatggctggattcctaccctcatcacggcctttgtccttgctacctctcaggcccaagctggatggctgcaacatgattatggccacctgtctgtctacagaaaacccaagtggaaccaccttgtccacaaattcgtcattggccacttaaagggtgcctctgccaactggtggaatcatcgccacttccagcaccacgccaagcctaacatcttccacaaggatcccgatgtgaacatgctgcacgtgtttgttctgggcgaatggcagcccatcgagtacggcaagaagaagctgaaatacctgcctaccttcacaaatgaagccacagcccccgggacaccgtggggaaggggtgcaggtggggtgatggccagaggaatgatgggcttttgttctgaggggtgtccgagaggctggtgtatgcactgctcacggaccccatgttggatctttctccctttctcctctcctttttctcttcacatctcccccatagcaccctgccctcatgggacctgccctccctcagccgtcagccatcagccatggccctcccagtgcctcctagccccttcttccaaggagcagagaggtggccaccgggggtggctctgtcctacctccactctctgcccctaaagatgggaggagaccagcggtccatgggtctggcctgtgagtctccccttgcagcctggtcactaggcatcacccccgctttggttcttcagatgctcttggggttcataggggcaggtcctagtcgggcagggcccctgaccctcccggcctggcttcactctccctgacggctgccattggtccaccctttcatagagaggcctgctttgttacaaagctcgggtctccctcctgcagctcggttaagtacccgaggcctctcttaagatgtccagggccccaggcccgcgggcacagccagcccaaaccttgggccctggaagagtcctccaccccatcactagagtgctctgaccctgggctttcacgggccccattccaccgcctccccaacttgagcctgtgaccttgggaccaaagggggagtccctcgtctcttgtgactcagcagaggcagtggccacgttcagggaggggccggctggcctggaggctcagcccaccctccagcttttcctcagggtgtcctgaggtccaagattctggagcaatctgacccttctccaaaggctctgttatcagctgggcagtgccagccaatccctggccatttggccccaggggacgtgggccctgcaggctgcaggagggcactggagctgggaggtctcgtcccagccctccccatctcggggctgctgtgtggacggcgctgcctcaggcactctcctgtctgaacctgcccttactgtgtttaacctgttgctccaggatgcattctgataggagggggcggcagggctgggccttgtgacaatctgcctttcaccacatggccttgcctcggtggccctgactgtcagggagggccagggaggcagagcgggagggagtctcaggaggaggctgccctgaggggctggggagggggtacctcatgaggaccagggtggagctgagaagaggaggaggtgggggctggaggtgctggtagctgaggggacgggcaagtgagaggggagggagggaagtcctgggaggatcctgagctgctgttgcagtctaacccactaatcagttcttagattcaggggaagggcaggcaccaacaactcagaatgggggctttcggggagggcgcctagtccccccagctctaagcagccaggagggacctgcatctaagcatctgggttgccatggcaatggcatgccccccagctactgtatgcccccgacccccgcagaggcagaatgaacccatagggagctgatcgtaatgtttatcatgttacttccccacccctacattttttgaaataaaataaggaattttattctcacttcctgtgtttcctgcacgccaatgccaggccatggtattgggtgatagatgaggcccttctagctgggcctgggcaccaggaggggtccccatgcttgcatctctctgtatcccctccctcccctgtgg

SEQ ID NO: 7172 - protein, 246 aa, Homo sapiens; identical to SEQ ID NO: 7170

SEQ ID NO: 7173 - DNA, 284 bp, Homo sapiens
tcaaagatcactgaggacttccgggccctgaggaagacggctgaggacatgaacctgttcaagaccaaccacgtgttcttcctcctcctcctggcccacatcatcgccctggagagcattgcatggttcactgtcttttactttggcaatggatgccccccagctactgtatgcccccgacccccgcagaggcagaatgaacccatagggagctgatcgtaatgtttatcatgttacttccccacccctacattttttgaaataaaataaggaattttattctc

SEQ ID NO: 7174 - protein, 55 aa, Homo sapiens
MNLFKTNHVFFLLLLAHIIALESIAWFTVFYFGNGCPPATVCPRPPQRQNEPIGS

SEQ ID NO: 7175 - DNA, 1252 bp, Homo sapiens
gaggaagacggctgaggacatgaacctgttcaagaccaaccacgtgttcttcctcctcctcctggcccacatcatcgccctggagagcattgcatggttcactgtcttttactttggcaatggctggattcctaccctcatcacggcctttgtccttgctacctctcaggcccaagctggatggctgcaacatgattatggccacctgtctgtctacagaaaacccaagtggaaccaccttgtccacaaattcgtcattggccacttaaagggtgcctctgccaactggtggaatcatcgccacttccagcaccacgccaagcctaacatcttccacaaggatcccgatgtgaacatgctgcacgtgtttgttctgggcgaatggcagcccatcgagtacggcaagaagaagctgaaatacctgccctacaatcaccagcacgaatacttcttcctgattgggccgccgctgctcatccccatgtatttccagtaccagatcatcatgaccatgatcgtccataagaactgggtggacctggcctgggccgtcagctactacatccggttcttcatcacctacatccctttctacggcatcctgggagccctccttttcctcaacttcatcaggttcctggagagccactggtttgtgtgggtcacacagatgaatcacatcgtcatggagattgaccaggaggcctaccgtgactggttcagtagccagctgacagccacctgcaacgtggagcagtccttcttcaacgactggttcagtggacaccttaacttccagattgagcaccagtgagcgcggggctgcggggaggcggggagacccacagcgggagggaagtggccgctatcccactgggcagaatgcagaatgtgggggccacctctttgtctctctgacaaggtctctgcccaatatagagcaaggctcccagccagccccgctgaggtcaggagaggggctcccctattccatctccctgagggtcatcctgtgcccctcatgctgtgccacttggtcatagtggttaccacctccctccatgtgggcctgggactttgtagttatggagcctgcacacgcacctcatgaccctgtgaggctagcagggcagggctacgtagcttgcctggaacatcggccgagggactgccctgctgccccttgtccttgcttcacctcttgtcactgtttttttttttttttattaaaaaataaaaaatgtagagacag

SEQ ID NO: 7176 - protein, 264 aa, Homo sapiens
MNLFKTNHVFFLLLLAHIIALESIAWFTVFYFGNGWIPTLITAFVLATSQAQAGWLQHDYGHLSVYRKPKWNHLVHKFVIGHLKGASANWWNHRHFQHHAKPNIFHKDPDVNMLHVFVLGEWQPIEYGKKKLKYLPYNHQHEYFFLIGPPLLIPMYFQYQIIMTMIVHKNWVDLAWAVSYYIRFFITYIPFYGILGALLFLNFIRFLESHWFVWVTQMNHIVMEIDQEAYRDWFSSQLTATCNVEQSFFNDWFSGHLNFQIEHQ

SEQ ID NO: 7177 - DNA, 1274 bp, Homo sapiens
gaggaagacggctgaggacatgaacctgttcaagaccaaccacgtgttcttcctcctcctcctggcccacatcatcgccctggagagcattgcatggttcactgtcttttactttggcaatggctggattcctaccctcatcacggcctttgtccttgctacctctcaggcccaagctggatggctgcaacatgattatggccacctgtctgtctacagaaaacccaagtggaaccaccttgtccacaaattcgtcattggccacttaaagggtgcctctgccaactggtggaatcatcgccacttccagcaccacgccaagcctaacatcttccacaaggatcccgatgtgaacatgctgcacgtgtttgttctgggcgaatggcagcccatcgagtacggcaagaagaagctgaaatacctgccctacaatcaccagcacgaatacttcttcctgattgggccgccgctgctcatccccatgtatttccagtaccagatcatcatgaccatgatcgtccataagaactgggtggacctggcctgggccgtcagctactacatccggttcttcatcacctacatccctttctacggcatcctgggagccctccttttcctcaacttcatcaggttcctggagagccactggtttgtgtgggtcacacagatgaatcacatcgtcatggagattgaccaggaggcctaccgtgactggttcagtagccagctgacagccacctgcaacgtggagcagtccttcttcaacgactggttcagtggacaccttaacttccagattgagcaccagtgagcgcggggctgcggggaggcggggagacccacagcgggagggaagtggccgctatcccactgggcagaatgcagaatgtgggggccacctctttgtctctctgacaaggtctctgcccaatatagagcaaggctcccagccagccccgctgaggtcaggagaggggctcccctattccatctccctgagggtcatcctgtgcccctcatgctgtgccacttggtcatagtggttaccacctccctccatgtgggcctgggactttgtagttatggagcctgcacacgcacctcatgaccctgtgaggctagcagggcagggctacgtagcttgcctggaacatcggccgagggactgccctgctgccccttgtccttgcttcacctcttgtcactgtttttttttttttttattaaaaaataaaaaatgtagagacagagtctcaccctgtttcctgggc

SEQ ID NO: 7178 - protein, 264 aa, Homo sapiens; identical to SEQ ID NO: 7176

SEQ ID NO: 7179 - DNA, 2652 bp, Homo sapiens
gaggaagacggctgaggacatgaacctgttcaagaccaaccacgtgttcttcctcctcctcctggcccacatcatcgccctggagagcattgcatggttcactgtcttttactttggcaatggctggattcctaccctcatcacggcctttgtccttgctacctctcaggcccaagctggatggctgcaacatgattatggccacctgtctgtctacagaaaacccaagtggaaccaccttgtccacaaattcgtcattggccacttaaagggtgcctctgccaactggtggaatcatcgccacttccagcaccacgccaagcctaacatcttccacaaggatcccgatgtgaacatgctgcacgtgtttgttctgggcgaatggcagcccatcgagtacggcaagaagaagctgaaatacctgccctacaatcaccagcacgaatacttcttcctgattgggccgccgctgctcatccccatgtatttccagtaccagatcatcatgaccatgatcgtccataagaactgggtggacctggcctgggccgtcagctactacatccggttcttcatcacctacatccctttctacggcatcctgggagccctccttttcctcaacttcatcaggttcctggagagccactggtttgtgtgggtcacacagatgaatcacatcgtcatggagattgaccaggaggcctaccgtgactggttcagtagccagctgacagccacctgcaacgtggagcagtccttcttcaacgactggttcagtggacaccttaacttccagattgagcaccacctcttccccaccatgccccggcacaacttacacaagatcgccccgctggtgaagtctctatgtgccaagcatggcattgaataccaggagaagccgctactgagggccctgctggacatcatcaggtccctgaagaagtctgggaagctgtggctggacgcctaccttcacaaatgaagccacagcccccgggacaccgtggggaaggggtgcaggtggggtgatggccagaggaatgatgggcttttgttctgaggggtgtccgagaggctggtgtatgcactgctcacggaccccatgttggatctttctccctttctcctctcctttttctcttcacatctcccccatagcaccctgccctcatgggacctgccctccctcagccgtcagccatcagccatggccctcccagtgcctcctagccccttcttccaaggagcagagaggtggccaccgggggtggctctgtcctacctccactctctgcccctaaagatgggaggagaccagcggtccatgggtctggcctgtgagtctccccttgcagcctggtcactaggcatcacccccgctttggttcttcagatgctcttggggttcataggggcaggtcctagtcgggcagggcccctgaccctcccggcctggcttcactctccctgacggctgccattggtccaccctttcatagagaggcctgctttgttacaaagctcgggtctccctcctgcagctcggttaagtacccgaggcctctcttaagatgtccagggccccaggcccgcgggcacagccagcccaaaccttgggccctggaagagtcctccaccccatcactagagtgctctgaccctgggctttcacgggccccattccaccgcctccccaacttgagcctgtgaccttgggaccaaagggggagtccctcgtctcttgtgactcagcagaggcagtggccacgttcagggaggggccggctggcctggaggctcagcccaccctccagcttttcctcagggtgtcctgaggtccaagattctggagcaatctgacccttctccaaaggctctgttatcagctgggcagtgccagccaatccctggccatttggccccaggggacgtgggccctgcaggctgcaggagggcactggagctgggaggtctcgtcccagccctccccatctcggggctgctgtgtggacggcgctgcctcaggcactctcctgtctgaacctgcccttactgtgtttaacctgttgctccaggatgcattctgataggagggggcggcagggctgggccttgtgacaatctgcctttcaccacatggccttgcctcggtggccctgactgtcagggagggccagggaggcagagcgggagggagtctcaggaggaggctgccctgaggggctggggagggggtacctcatgaggaccagggtggagctgagaagaggaggaggtgggggctggaggtgctggtagctgaggggacgggcaagtgagaggggagggagggaagtcctgggaggatcctgagctgctgttgcagtctaacccactaatcagttcttagattcaggggaagggcaggcaccaacaactcagaatgggggctttcggggagggcgcctagtccccccagctctaagcagccaggagggacctgcatctaagcatctgggttgccatggcaatggcatgccccccagctactgtatgcccccgacccccgcagaggcagaatgaacccatagggagctgatcgtaatgtttatcatgttacttccccacccctacattttttgaaataaaataaggaattttattctc

SEQ ID NO: 7180 - protein, 322 aa, Homo sapiens [sequence omitted]

SEQ ID NO: 7181 - DNA, 2784 bp, Homo sapiens
gaggaagacggctgaggacatgaacctgttcaagaccaaccacgtgttcttcctcctcctcctggcccacatcatcgccctggagagcattgcatggttcactgtcttttactttggcaatggctggattcctaccctcatcacggcctttgtccttgctacctctcaggcccaagctggatggctgcaacatgattatggccacctgtctgtctacagaaaacccaagtggaaccaccttgtccacaaattcgtcattggccacttaaagggtgcctctgccaactggtggaatcatcgccacttccagcaccacgccaagcctaacatcttccacaaggatcccgatgtgaacatgctgcacgtgtttgttctgggcgaatggcagcccatcgagtacggcaagaagaagctgaaatacctgccctacaatcaccagcacgaatacttcttcctgattgggccgccgctgctcatccccatgtatttccagtaccagatcatcatgaccatgatcgtccataagaactgggtggacctggcctgggccgtcagctactacatccggttcttcatcacctacatccctttctacggcatcctgggagccctccttttcctcaacttcatcaggttcctggagagccactggtttgtgtgggtcacacagatgaatcacatcgtcatggagattgaccaggaggcctaccgtgactggttcagtagccagctgacagccacctgcaacgtggagcagtccttcttcaacgactggttcagtggacaccttaacttccagattgagcaccacctcttccccaccatgccccggcacaacttacacaagatcgccccgctggtgaagtctctatgtgccaagcatggcattgaataccaggagaagccgctactgagggccctgctggacatcatcaggtccctgaagaagtctgggaagctgtggctggacgcctaccttcacaaatgaagccacagcccccgggacaccgtggggaaggggtgcaggtggggtgatggccagaggaatgatgggcttttgttctgaggggtgtccgagaggctggtgtatgcactgctcacggaccccatgttggatctttctccctttctcctctcctttttctcttcacatctcccccatagcaccctgccctcatgggacctgccctccctcagccgtcagccatcagccatggccctcccagtgcctcctagccccttcttccaaggagcagagaggtggccaccgggggtggctctgtcctacctccactctctgcccctaaagatgggaggagaccagcggtccatgggtctggcctgtgagtctccccttgcagcctggtcactaggcatcacccccgctttggttcttcagatgctcttggggttcataggggcaggtcctagtcgggcagggcccctgaccctcccggcctggcttcactctccctgacggctgccattggtccaccctttcatagagaggcctgctttgttacaaagctcgggtctccctcctgcagctcggttaagtacccgaggcctctcttaagatgtccagggccccaggcccgcgggcacagccagcccaaaccttgggccctggaagagtcctccaccccatcactagagtgctctgaccctgggctttcacgggccccattccaccgcctccccaacttgagcctgtgaccttgggaccaaagggggagtccctcgtctcttgtgactcagcagaggcagtggccacgttcagggaggggccggctggcctggaggctcagcccaccctccagcttttcctcagggtgtcctgaggtccaagattctggagcaatctgacccttctccaaaggctctgttatcagctgggcagtgccagccaatccctggccatttggccccaggggacgtgggccctgcaggctgcaggagggcactggagctgggaggtctcgtcccagccctccccatctcggggctgctgtgtggacggcgctgcctcaggcactctcctgtctgaacctgcccttactgtgtttaacctgttgctccaggatgcattctgataggagggggcggcagggctgggccttgtgacaatctgcctttcaccacatggccttgcctcggtggccctgactgtcagggagggccagggaggcagagcgggagggagtctcaggaggaggctgccctgaggggctggggagggggtacctcatgaggaccagggtggagctgagaagaggaggaggtgggggctggaggtgctggtagctgaggggacgggcaagtgagaggggagggagggaagtcctgggaggatcctgagctgctgttgcagtctaacccactaatcagttcttagattcaggggaagggcaggcaccaacaactcagaatgggggctttcggggagggcgcctagtccccccagctctaagcagccaggagggacctgcatctaagcatctgggttgccatggcaatggcatgccccccagctactgtatgcccccgacccccgcagaggcagaatgaacccatagggagctgatcgtaatgtttatcatgttacttccccacccctacattttttgaaataaaataaggaattttattctcacttcctgtgtttcctgcacgccaatgccaggccatggtattgggtgatagatgaggcccttctagctgggcctgggcaccaggaggggtccccatgcttgcatctctctgtatcccctccctcccctgtgg

SEQ ID NO: 7182 - protein, 322 aa, Homo sapiens [sequence omitted]

SEQ ID NO: 7183 - DNA, 2986 bp, Homo sapiens
ttagagcctctgggcatcaggctgcccaaggtgcaggctctgatggggaagaaaccggtgccgtcatggggacctcaggtagccagatgtggcctgaggagtctgtgctgtggcctcctctgtcctcaaggttaggctccagctggggaggagtgattcactcttgtaaattacagggaggctccagggaggcagatgctcccagcctgatgactggcagcaattctggggcccttacctaggttctccctgccactgcgggctccgggagctctccatggtgacctaggaactcccctgggtgcttatgctccgccgagagttgctctgttgcacattcattcaacaaacatttgtttagtgcctgtcacatgggctcagagtcagctttttgggttctgatcccagtcagggccacttcctgtggccttgggccatggcttaacgctgagcctcagcctcagaagtgccggccttgtagaggatcgatgccatcgggccagtgctcggctagggctgaggaagcgttggccgctgctggctgtagcatggggagcccagagggctggaggggccccaggcttggtgggcccagggtgcagattgacaggaaagggacagtggtgtgccctgagcagatagaagggatggtggctgcaggatgggttggggaacatgggaggctgggagctgaggctactgggtgctcatgatctctcctctctcctcagtacggcaagaagaagctgaaatacctgccctacaatcaccagcacgaatacttcttcctgattgggccgccgctgctcatccccatgtatttccagtaccagatcatcatgaccatgatcgtccataagaactgggtggacctggcctgggccgtcagctactacatccggttcttcatcacctacatccctttctacggcatcctgggagccctccttttcctcaacttcatcaggttcctggagagccactggtttgtgtgggtcacacagatgaatcacatcgtcatggagattgaccaggaggcctaccgtgactggttcagtagccagctgacagccacctgcaacgtggagcagtccttcttcaacgactggttcagtggacaccttaacttccagattgagcaccacctcttccccaccatgccccggcacaacttacacaagatcgccccgctggtgaagtctctatgtgccaagcatggcattgaataccaggagaagccgctactgagggccctgctggacatcatcaggtccctgaagaagtctgggaagctgtggctggacgcctaccttcacaaatgaagccacagcccccgggacaccgtggggaaggggtgcaggtggggtgatggccagaggaatgatgggcttttgttctgaggggtgtccgagaggctggtgtatgcactgctcacggaccccatgttggatctttctccctttctcctctcctttttctcttcacatctcccccatagcaccctgccctcatgggacctgccctccctcagccgtcagccatcagccatggccctcccagtgcctcctagccccttcttccaaggagcagagaggtggccaccgggggtggctctgtcctacctccactctctgcccctaaagatgggaggagaccagcggtccatgggtctggcctgtgagtctccccttgcagcctggtcactaggcatcacccccgctttggttcttcagatgctcttggggttcataggggcaggtcctagtcgggcagggcccctgaccctcccggcctggcttcactctccctgacggctgccattggtccaccctttcatagagaggcctgctttgttacaaagctcgggtctccctcctgcagctcggttaagtacccgaggcctctcttaagatgtccagggccccaggcccgcgggcacagccagcccaaaccttgggccctggaagagtcctccaccccatcactagagtgctctgaccctgggctttcacgggccccattccaccgcctccccaacttgagcctgtgaccttgggaccaaagggggagtccctcgtctcttgtgactcagcagaggcagtggccacgttcagggaggggccggctggcctggaggctcagcccaccctccagcttttcctcagggtgtcctgaggtccaagattctggagcaatctgacccttctccaaaggctctgttatcagctgggcagtgccagccaatccctggccatttggccccaggggacgtgggccctgcaggctgcaggagggcactggagctgggaggtctcgtcccagccctccccatctcggggctgctgtgtggacggcgctgcctcaggcactctcctgtctgaacctgcccttactgtgtttaacctgttgctccaggatgcattctgataggagggggcggcagggctgggccttgtgacaatctgcctttcaccacatggccttgcctcggtggccctgactgtcagggagggccagggaggcagagcgggagggagtctcaggaggaggctgccctgaggggctggggagggggtacctcatgaggaccagggtggagctgagaagaggaggaggtgggggctggaggtgctggtagctgaggggacgggcaagtgagaggggagggagggaagtcctgggaggatcctgagctgctgttgcagtctaacccactaatcagttcttagattcaggggaagggcaggcaccaacaactcagaatgggggctttcggggagggcgcctagtccccccagctctaagcagccaggagggacctgcatctaagcatctgggttgccatggcaatggcatgccccccagctactgtatgcccccgacccccgcagaggcagaatgaacccatagggagctgatcgtaatgtttatcatgttacttccccacccctacattttttgaaataaaataaggaattttattctc

SEQ ID NO: 7184 - protein, 168 aa, Homo sapiens
MYFQYQIIMTMIVHKNWVDLAWAVSYYIRFFITYIPFYGILGALLFLNFIRFLESHWFVWVTQMNHIVMEIDQEAYRDWFSSQLTATCNVEQSFFNDWFSGHLNFQIEHHLFPTMPRHNLHKIAPLVKSLCAKHGIEYQEKPLLRALLDIIRSLKKSGKLWLDAYLHK

SEQ ID NO: 7185 - DNA, 3118 bp, Homo sapiens
ttagagcctctgggcatcaggctgcccaaggtgcaggctctgatggggaagaaaccggtgccgtcatggggacctcaggtagccagatgtggcctgaggagtctgtgctgtggcctcctctgtcctcaaggttaggctccagctggggaggagtgattcactcttgtaaattacagggaggctccagggaggcagatgctcccagcctgatgactggcagcaattctggggcccttacctaggttctccctgccactgcgggctccgggagctctccatggtgacctaggaactcccctgggtgcttatgctccgccgagagttgctctgttgcacattcattcaacaaacatttgtttagtgcctgtcacatgggctcagagtcagctttttgggttctgatcccagtcagggccacttcctgtggccttgggccatggcttaacgctgagcctcagcctcagaagtgccggccttgtagaggatcgatgccatcgggccagtgctcggctagggctgaggaagcgttggccgctgctggctgtagcatggggagcccagagggctggaggggccccaggcttggtgggcccagggtgcagattgacaggaaagggacagtggtgtgccctgagcagatagaagggatggtggctgcaggatgggttggggaacatgggaggctgggagctgaggctactgggtgctcatgatctctcctctctcctcagtacggcaagaagaagctgaaatacctgccctacaatcaccagcacgaatacttcttcctgattgggccgccgctgctcatccccatgtatttccagtaccagatcatcatgaccatgatcgtccataagaactgggtggacctggcctgggccgtcagctactacatccggttcttcatcacctacatccctttctacggcatcctgggagccctccttttcctcaacttcatcaggttcctggagagccactggtttgtgtgggtcacacagatgaatcacatcgtcatggagattgaccaggaggcctaccgtgactggttcagtagccagctgacagccacctgcaacgtggagcagtccttcttcaacgactggttcagtggacaccttaacttccagattgagcaccacctcttccccaccatgccccggcacaacttacacaagatcgccccgctggtgaagtctctatgtgccaagcatggcattgaataccaggagaagccgctactgagggccctgctggacatcatcaggtccctgaagaagtctgggaagctgtggctggacgcctaccttcacaaatgaagccacagcccccgggacaccgtggggaaggggtgcaggtggggtgatggccagaggaatgatgggcttttgttctgaggggtgtccgagaggctggtgtatgcactgctcacggaccccatgttggatctttctccctttctcctctcctttttctcttcacatctcccccatagcaccctgccctcatgggacctgccctccctcagccgtcagccatcagccatggccctcccagtgcctcctagccccttcttccaaggagcagagaggtggccaccgggggtggctctgtcctacctccactctctgcccctaaagatgggaggagaccagcggtccatgggtctggcctgtgagtctccccttgcagcctggtcactaggcatcacccccgctttggttcttcagatgctcttggggttcataggggcaggtcctagtcgggcagggcccctgaccctcccggcctggcttcactctccctgacggctgccattggtccaccctttcatagagaggcctgctttgttacaaagctcgggtctccctcctgcagctcggttaagtacccgaggcctctcttaagatgtccagggccccaggcccgcgggcacagccagcccaaaccttgggccctggaagagtcctccaccccatcactagagtgctctgaccctgggctttcacgggccccattccaccgcctccccaacttgagcctgtgaccttgggaccaaagggggagtccctcgtctcttgtgactcagcagaggcagtggccacgttcagggaggggccggctggcctggaggctcagcccaccctccagcttttcctcagggtgtcctgaggtccaagattctggagcaatctgacccttctccaaaggctctgttatcagctgggcagtgccagccaatccctggccatttggccccaggggacgtgggccctgcaggctgcaggagggcactggagctgggaggtctcgtcccagccctccccatctcggggctgctgtgtggacggcgctgcctcaggcactctcctgtctgaacctgcccttactgtgtttaacctgttgctccaggatgcattctgataggagggggcggcagggctgggccttgtgacaatctgcctttcaccacatggccttgcctcggtggccctgactgtcagggagggccagggaggcagagcgggagggagtctcaggaggaggctgccctgaggggctggggagggggtacctcatgaggaccagggtggagctgagaagaggaggaggtgggggctggaggtgctggtagctgaggggacgggcaagtgagaggggagggagggaagtcctgggaggatcctgagctgctgttgcagtctaacccactaatcagttcttagattcaggggaagggcaggcaccaacaactcagaatgggggctttcggggagggcgcctagtccccccagctctaagcagccaggagggacctgcatctaagcatctgggttgccatggcaatggcatgccccccagctactgtatgcccccgacccccgcagaggcagaatgaacccatagggagctgatcgtaatgtttatcatgttacttccccacccctacattttttgaaataaaataaggaattttattctcacttcctgtgtttcctgcacgccaatgccaggccatggtattgggtgatagatgaggcccttctagctgggcctgggcaccaggaggggtccccatgcttgcatctctctgtatcccctccctcccctgtgg

SEQ ID NO: 7186 - protein, 168 aa, Homo sapiens; identical to SEQ ID NO: 7184

SEQ ID NO: 7187 - DNA, 645 bp, Homo sapiens
gggaggctgggagctgaggctactgggtgctcatgatctctcctctctcctcagtacggcaagaagaagctgaaatacctgccctacaatcaccagcacgaatacttcttcctgattgggccgccgctgctcatccccatgtatttccagtaccagatcatcatgaccatgatcgtccataagaactgggtggacctggcctgggccgtcagctactacatccggttcttcatcacctacatccctttctacggcatcctgggagccctccttttcctcaacttcatcaggttcctggagagccactggtttgtgtgggtcacacagatgaatcacatcgtcatggagattgaccaggaggcctaccgtgactggttcagtagccagctgacagccacctgcaacgtggagcagtccttcttcaacgactggttcagtggacaccttaacttccagctctaagcagccaggagggacctgcatctaagcatctgggttgccatggcaatggcatgccccccagctactgtatgcccccgacccccgcagaggcagaatgaacccatagggagctgatcgtaatgtttatcatgttacttccccacccctacattttttgaaataaaataaggaattttattctca

SEQ ID NO: 7188 - protein, 107 aa, Homo sapiens
MYFQYQIIMTMIVHKNWVDLAWAVSYYIRFFITYIPFYGILGALLFLNFIRFLESHWFVWVTQMNHIVMEIDQEAYRDWFSSQLTATCNVEQSFFNDWFSGHLNFQL

SEQ ID NO: 7189 - DNA, 2570 bp, Homo sapiens
atccctgggccctccactggcactgatgatggctttggcatgagaagaggctcggacggctccactttgcctggggacctcccatcctggccccttggcaggggctgtcctgggctggttgggagagtggatctgttcccactgtggctgggcccccggaggcccctgcgctgagctgtgttctcttgcaggttcctggagagccactggtttgtgtgggtcacacagatgaatcacatcgtcatggagattgaccaggaggcctaccgtgactggttcagtagccagctgacagccacctgcaacgtggagcagtccttcttcaacgactggttcagtggacaccttaacttccagattgagcaccacctcttccccaccatgccccggcacaacttacacaagatcgccccgctggtgaagtctctatgtgccaagcatggcattgaataccaggagaagccgctactgagggccctgctggacatcatcaggtgaggggtggaggtccacaggcgctgggccctgggatcacccgtggtgcagacagtgggatcacaagaggggctgggccctcctggcacagtcacccaccagggcacctgccttactcccgagcctgtgttaggagctgttgggcttttctccctgggctgcgagaagaccatccctttctgtgtggggttcctggtgggctctgagctgacagccccacaggcccagtggcagtggtaagccctggttagggccaaggggacatacatgccaccttaatgatggcctcctcagcccttgcactccctggggccactcccgtcctggtccctgaccctggtccatccccaactttgcaggtccctgaagaagtctgggaagctgtggctggacgcctaccttcacaaatgaagccacagcccccgggacaccgtggggaaggggtgcaggtggggtgatggccagaggaatgatgggcttttgttctgaggggtgtccgagaggctggtgtatgcactgctcacggaccccatgttggatctttctccctttctcctctcctttttctcttcacatctcccccatagcaccctgccctcatgggacctgccctccctcagccgtcagccatcagccatggccctcccagtgcctcctagccccttcttccaaggagcagagaggtggccaccgggggtggctctgtcctacctccactctctgcccctaaagatgggaggagaccagcggtccatgggtctggcctgtgagtctccccttgcagcctggtcactaggcatcacccccgctttggttcttcagatgctcttggggttcataggggcaggtcctagtcgggcagggcccctgaccctcccggcctggcttcactctccctgacggctgccattggtccaccctttcatagagaggcctgctttgttacaaagctcgggtctccctcctgcagctcggttaagtacccgaggcctctcttaagatgtccagggccccaggcccgcgggcacagccagcccaaaccttgggccctggaagagtcctccaccccatcactagagtgctctgaccctgggctttcacgggccccattccaccgcctccccaacttgagcctgtgaccttgggaccaaagggggagtccctcgtctcttgtgactcagcagaggcagtggccacgttcagggaggggccggctggcctggaggctcagcccaccctccagcttttcctcagggtgtcctgaggtccaagattctggagcaatctgacccttctccaaaggctctgttatcagctgggcagtgccagccaatccctggccatttggccccaggggacgtgggccctgcaggctgcaggagggcactggagctgggaggtctcgtcccagccctccccatctcggggctgctgtgtggacggcgctgcctcaggcactctcctgtctgaacctgcccttactgtgtttaacctgttgctccaggatgcattctgataggagggggcggcagggctgggccttgtgacaatctgcctttcaccacatggccttgcctcggtggccctgactgtcagggagggccagggaggcagagcgggagggagtctcaggaggaggctgccctgaggggctggggagggggtacctcatgaggaccagggtggagctgagaagaggaggaggtgggggctggaggtgctggtagctgaggggacgggcaagtgagaggggagggagggaagtcctgggaggatcctgagctgctgttgcagtctaacccactaatcagttcttagattcaggggaagggcaggcaccaacaactcagaatgggggctttcggggagggcgcctagtccccccagctctaagcagccaggagggacctgcatctaagcatctgggttgccatggcaatggcatgccccccagctactgtatgcccccgacccccgcagaggcagaatgaacccatagggagctgatcgtaatgtttatcatgttacttccccacccctacattttttgaaataaaataaggaattttattctc

SEQ ID NO: 7190 - protein, 89 aa, Homo sapiens [sequence omitted]

SEQ ID NO: 7191 - DNA, 2702 bp, Homo sapiens
atccctgggccctccactggcactgatgatggctttggcatgagaagaggctcggacggctccactttgcctggggacctcccatcctggccccttggcaggggctgtcctgggctggttgggagagtggatctgttcccactgtggctgggcccccggaggcccctgcgctgagctgtgttctcttgcaggttcctggagagccactggtttgtgtgggtcacacagatgaatcacatcgtcatggagattgaccaggaggcctaccgtgactggttcagtagccagctgacagccacctgcaacgtggagcagtccttcttcaacgactggttcagtggacaccttaacttccagattgagcaccacctcttccccaccatgccccggcacaacttacacaagatcgccccgctggtgaagtctctatgtgccaagcatggcattgaataccaggagaagccgctactgagggccctgctggacatcatcaggtgaggggtggaggtccacaggcgctgggccctgggatcacccgtggtgcagacagtgggatcacaagaggggctgggccctcctggcacagtcacccaccagggcacctgccttactcccgagcctgtgttaggagctgttgggcttttctccctgggctgcgagaagaccatccctttctgtgtggggttcctggtgggctctgagctgacagccccacaggcccagtggcagtggtaagccctggttagggccaaggggacatacatgccaccttaatgatggcctcctcagcccttgcactccctggggccactcccgtcctggtccctgaccctggtccatccccaactttgcaggtccctgaagaagtctgggaagctgtggctggacgcctaccttcacaaatgaagccacagcccccgggacaccgtggggaaggggtgcaggtggggtgatggccagaggaatgatgggcttttgttctgaggggtgtccgagaggctggtgtatgcactgctcacggaccccatgttggatctttctccctttctcctctcctttttctcttcacatctcccccatagcaccctgccctcatgggacctgccctccctcagccgtcagccatcagccatggccctcccagtgcctcctagccccttcttccaaggagcagagaggtggccaccgggggtggctctgtcctacctccactctctgcccctaaagatgggaggagaccagcggtccatgggtctggcctgtgagtctccccttgcagcctggtcactaggcatcacccccgctttggttcttcagatgctcttggggttcataggggcaggtcctagtcgggcagggcccctgaccctcccggcctggcttcactctccctgacggctgccattggtccaccctttcatagagaggcctgctttgttacaaagctcgggtctccctcctgcagctcggttaagtacccgaggcctctcttaagatgtccagggccccaggcccgcgggcacagccagcccaaaccttgggccctggaagagtcctccaccccatcactagagtgctctgaccctgggctttcacgggccccattccaccgcctccccaacttgagcctgtgaccttgggaccaaagggggagtccctcgtctcttgtgactcagcagaggcagtggccacgttcagggaggggccggctggcctggaggctcagcccaccctccagcttttcctcagggtgtcctgaggtccaagattctggagcaatctgacccttctccaaaggctctgttatcagctgggcagtgccagccaatccctggccatttggccccaggggacgtgggccctgcaggctgcaggagggcactggagctgggaggtctcgtcccagccctccccatctcggggctgctgtgtggacggcgctgcctcaggcactctcctgtctgaacctgcccttactgtgtttaacctgttgctccaggatgcattctgataggagggggcggcagggctgggccttgtgacaatctgcctttcaccacatggccttgcctcggtggccctgactgtcagggagggccagggaggcagagcgggagggagtctcaggaggaggctgccctgaggggctggggagggggtacctcatgaggaccagggtggagctgagaagaggaggaggtgggggctggaggtgctggtagctgaggggacgggcaagtgagaggggagggagggaagtcctgggaggatcctgagctgctgttgcagtctaacccactaatcagttcttagattcaggggaagggcaggcaccaacaactcagaatgggggctttcggggagggcgcctagtccccccagctctaagcagccaggagggacctgcatctaagcatctgggttgccatggcaatggcatgccccccagctactgtatgcccccgacccccgcagaggcagaatgaacccatagggagctgatcgtaatgtttatcatgttacttccccacccctacattttttgaaataaaataaggaattttattctcacttcctgtgtttcctgcacgccaatgccaggccatggtattgggtgatagatgaggcccttctagctgggcctgggcaccaggaggggtccccatgcttgcatctctctgtatcccctccctcccctgtgg

SEQ ID NO: 7192 - protein, 89 aa, Homo sapiens [sequence omitted]

SEQ ID NO: 7193 - DNA, 703 bp, Homo sapiens
actccctggggccactcccgtcctggtccctgaccctggtccatccccaactttgcaggtccctgaagaagtctgggaagctgtggctggacgcctaccttcacaaatgaagccacagcccccgggacaccgtggggaaggggtgcaggtggggtgatggccagaggaatgatgggcttttgttctgaggggtgtccgagaggctggtgtatgcactgctcacggaccccatgttggatctttctccctttctcctctcctttttctcttcacatctcccccatagcaccctgccctcatgaggaccagggtggagctgagaagaggaggaggtgggggctggaggtgctggtagctgaggggacgggcaagtgagaggggagggagggaagtcctgggaggatcctgagctgctgttgcagtctaacccactaatcagttcttagattcaggggaagggcaggcaccaacaactcagaatgggggctttcggggagggcgcctagtccccccagctctaagcagccaggagggacctgcatctaagcatctgggttgccatggcaatggcatgccccccagctactgtatgcccccgacccccgcagaggcagaatgaacccatagggagctgatcgtaatgtttatcatgttacttccccacccctacattttttgaaataaaataaggaattttattctc

SEQ ID NO: 7194 - protein, 72 aa, Homo sapiens
MARGMMGFCSEGCPRGWCMHCSRTPCWIFLPFSSPFSLHISPIAPCPHEDQGGAEKRRRWGLEVLVAEGTGK

SEQ ID NO: 7195 - DNA, 1613 bp, Homo sapiens
gaagaagtctgggaagctgtggctggacgcctaccttcacaaatgaagccacagcccccgggacaccgtggggaaggggtgcaggtggggtgatggccagaggaatgatgggcttttgttctgaggggtgtccgagaggctggtgtatgcactgctcacggaccccatgttggatctttctccctttctcctctcctttttctcttcacatctcccccatagcaccctgccctcatgggacctgccctccctcagccgtcagccatcagccatggccctcccagtgcctcctagccccttcttccaaggagcagagaggtggccaccgggggtggctctgtcctacctccactctctgcccctaaagatgggaggagaccagcggtccatgggtctggcctgtgagtctccccttgcagcctggtcactaggcatcacccccgctttggttcttcagatgctcttggggttcataggggcaggtcctagtcgggcagggcccctgaccctcccggcctggcttcactctccctgacggctgccattggtccaccctttcatagagaggcctgctttgttacaaagctcgggtctccctcctgcagctcggttaagtacccgaggcctctcttaagatgtccagggccccaggcccgcgggcacagccagcccaaaccttgggccctggaagagtcctccaccccatcactagagtgctctgaccctgggctttcacgggccccattccaccgcctccccaacttgagcctgtgaccttgggaccaaagggggagtccctcgtctcttgtgactcagcagaggcagtggccacgttcagggaggggccggctggcctggaggctcagcccaccctccagcttttcctcagggtgtcctgaggtccaagattctggagcaatctgacccttctccaaaggctctgttatcagcctccccatctcggggctgctgtgtggacggcgctgcctcaggcactctcctgtctgaacctgcccttactgtgtttaacctgttgctccaggatgcattctgataggagggggcggcagggctgggccttgtgacaatctgcctttcaccacatggccttgcctcggtggccctgactgtcagggagggccagggaggcagagcgggagggagtctcaggaggaggctgccctgaggggctggggagggggtacctcatgaggaccagggtggagctgagaagaggaggaggtgggggctggaggtgctggtagctgaggggacgggcaagtgagaggggagggagggaagtcctgggaggatcctgagctgctgttgcagtctaacccactaatcagttcttagattcaggggaagggcaggcaccaacaactcagaatgggggctttcggggagggcgcctagtccccccagctctaagcagccaggagggacctgcatctaagcatctgggttgccatggcaatggcatgccccccagctactgtatgcccccgacccccgcagaggcagaatgaacccatagggagctgatcgtaatgtttatcatgttacttccccacccctacattttttgaaataaaataaggaattttattctc

SEQ ID NO: 7196 - protein, 122 aa, Homo sapiens; identical to SEQ ID NO: 7166

SEQ ID NO: 7197 - DNA, 1745 bp, Homo sapiens
gaagaagtctgggaagctgtggctggacgcctaccttcacaaatgaagccacagcccccgggacaccgtggggaaggggtgcaggtggggtgatggccagaggaatgatgggcttttgttctgaggggtgtccgagaggctggtgtatgcactgctcacggaccccatgttggatctttctccctttctcctctcctttttctcttcacatctcccccatagcaccctgccctcatgggacctgccctccctcagccgtcagccatcagccatggccctcccagtgcctcctagccccttcttccaaggagcagagaggtggccaccgggggtggctctgtcctacctccactctctgcccctaaagatgggaggagaccagcggtccatgggtctggcctgtgagtctccccttgcagcctggtcactaggcatcacccccgctttggttcttcagatgctcttggggttcataggggcaggtcctagtcgggcagggcccctgaccctcccggcctggcttcactctccctgacggctgccattggtccaccctttcatagagaggcctgctttgttacaaagctcgggtctccctcctgcagctcggttaagtacccgaggcctctcttaagatgtccagggccccaggcccgcgggcacagccagcccaaaccttgggccctggaagagtcctccaccccatcactagagtgctctgaccctgggctttcacgggccccattccaccgcctccccaacttgagcctgtgaccttgggaccaaagggggagtccctcgtctcttgtgactcagcagaggcagtggccacgttcagggaggggccggctggcctggaggctcagcccaccctccagcttttcctcagggtgtcctgaggtccaagattctggagcaatctgacccttctccaaaggctctgttatcagcctccccatctcggggctgctgtgtggacggcgctgcctcaggcactctcctgtctgaacctgcccttactgtgtttaacctgttgctccaggatgcattctgataggagggggcggcagggctgggccttgtgacaatctgcctttcaccacatggccttgcctcggtggccctgactgtcagggagggccagggaggcagagcgggagggagtctcaggaggaggctgccctgaggggctggggagggggtacctcatgaggaccagggtggagctgagaagaggaggaggtgggggctggaggtgctggtagctgaggggacgggcaagtgagaggggagggagggaagtcctgggaggatcctgagctgctgttgcagtctaacccactaatcagttcttagattcaggggaagggcaggcaccaacaactcagaatgggggctttcggggagggcgcctagtccccccagctctaagcagccaggagggacctgcatctaagcatctgggttgccatggcaatggcatgccccccagctactgtatgcccccgacccccgcagaggcagaatgaacccatagggagctgatcgtaatgtttatcatgttacttccccacccctacattttttgaaataaaataaggaattttattctcacttcctgtgtttcctgcacgccaatgccaggccatggtattgggtgatagatgaggcccttctagctgggcctgggcaccaggaggggtccccatgcttgcatctctctgtatcccctccctcccctgtgg

SEQ ID NO: 7198 - protein, 122 aa, Homo sapiens; identical to SEQ ID NO: 7166

SEQ ID NO: 7199 - DNA, 1336 bp, Homo sapiens
gaagtctgggaagctgtggctggacgcctaccttcacaaatgaagccacagcccccgggacaccgtggggaaggggtgcaggtggggtgatggccagaggaatgatgggcttttgttctgaggggtgtccgagaggctggtgtatgcactgctcacggaccccatgttggatctttctccctttctcctctcctttttctcttcacatctcccccatagcaccctgccctcatgggacctgccctccctcagccgtcagccatcagccatggccctcccagtgcctcctagccccttcttccaaggagcagagaggtggccaccgggggtggctctgtcctacctccactctctgcccctaaagatgggaggagaccagcggtccatgggtctggcctgtgagtctccccttgcagcctggtcactaggcatcacccccgctttggttcttcagatgctcttggggttcataggggcaggtcctagtcgggcagggcccctgaccctcccggcctggcttcactctccctgacggctgccattggtccaccctttcatagagaggcctgctttgttacaaagctcgggtctccctcctgcagctcggttaagtacccgaggcctctcttaagatgtccagggccccaggcccgcgggcacagccagcccaaaccttgggccctggaagagtcctccaccccatcactagagtgctctgaccctgggctttcacgggccccattccaccgcctccccaacttgagcctgtgaccttgggaccaaagggggagtccctcgtctcttgtgacaatctgcctttcaccacatggccttgcctcggtggccctgactgtcagggagggccagggaggcagagcgggagggagtctcaggaggaggctgccctgaggggctggggagggggtacctcatgaggaccagggtggagctgagaagaggaggaggtgggggctggaggtgctggtagctgaggggacgggcaagtgagaggggagggagggaagtcctgggaggatcctgagctgctgttgcagtctaacccactaatcagttcttagattcaggggaagggcaggcaccaacaactcagaatgggggctttcggggagggcgcctagtccccccagctctaagcagccaggagggacctgcatctaagcatctgggttgccatggcaatggcatgccccccagctactgtatgcccccgacccccgcagaggcagaatgaacccatagggagctgatcgtaatgtttatcatgttacttccccacccctacattttttgaaataaaataaggaattttattctc

SEQ ID NO: 7200 - protein, 122 aa, Homo sapiens; identical to SEQ ID NO: 7166

SEQ ID NO: 7201 - DNA, 1468 bp, Homo sapiens
gaagtctgggaagctgtggctggacgcctaccttcacaaatgaagccacagcccccgggacaccgtggggaaggggtgcaggtggggtgatggccagaggaatgatgggcttttgttctgaggggtgtccgagaggctggtgtatgcactgctcacggaccccatgttggatctttctccctttctcctctcctttttctcttcacatctcccccatagcaccctgccctcatgggacctgccctccctcagccgtcagccatcagccatggccctcccagtgcctcctagccccttcttccaaggagcagagaggtggccaccgggggtggctctgtcctacctccactctctgcccctaaagatgggaggagaccagcggtccatgggtctggcctgtgagtctccccttgcagcctggtcactaggcatcacccccgctttggttcttcagatgctcttggggttcataggggcaggtcctagtcgggcagggcccctgaccctcccggcctggcttcactctccctgacggctgccattggtccaccctttcatagagaggcctgctttgttacaaagctcgggtctccctcctgcagctcggttaagtacccgaggcctctcttaagatgtccagggccccaggcccgcgggcacagccagcccaaaccttgggccctggaagagtcctccaccccatcactagagtgctctgaccctgggctttcacgggccccattccaccgcctccccaacttgagcctgtgaccttgggaccaaagggggagtccctcgtctcttgtgacaatctgcctttcaccacatggccttgcctcggtggccctgactgtcagggagggccagggaggcagagcgggagggagtctcaggaggaggctgccctgaggggctggggagggggtacctcatgaggaccagggtggagctgagaagaggaggaggtgggggctggaggtgctggtagctgaggggacgggcaagtgagaggggagggagggaagtcctgggaggatcctgagctgctgttgcagtctaacccactaatcagttcttagattcaggggaagggcaggcaccaacaactcagaatgggggctttcggggagggcgcctagtccccccagctctaagcagccaggagggacctgcatctaagcatctgggttgccatggcaatggcatgccccccagctactgtatgcccccgacccccgcagaggcagaatgaacccatagggagctgatcgtaatgtttatcatgttacttccccacccctacattttttgaaataaaataaggaattttattctcacttcctgtgtttcctgcacgccaatgccaggccatggtattgggtgatagatgaggcccttctagctgggcctgggcaccaggaggggtccccatgcttgcatctctctgtatcccctccctcccctgtgg

SEQ ID NO: 7202 - protein, 122 aa, Homo sapiens; identical to SEQ ID NO: 7166

SEQ ID NO: 7203 - DNA, 643 bp, Homo sapiens
ccgggacaccgtggggaaggggtgcaggtggggtgatggccagaggaatgatgggcttttgttctgaggggtgtccgagaggctggtgtatgcactgctcacggaccccatgttggatctttctccctttctcctctcctttttctcttcacatctcccccatagcaccctgccctcatgggacctgccctccctcagccgtcagccatcagccatggccctcccagtgcctcctagccccttcttccaaggagcagagaggtggccaccgggggtggctctgtcctacctccactctctgcccctaaagatgggaggagaccagcggtccatgggtctggcctgtgagtctccccttgcatctaacccactaatcagttcttagattcaggggaagggcaggcaccaacaactcagaatgggggctttcggggagggcgcctagtccccccagctctaagcagccaggagggacctgcatctaagcatctgggttgccatggcaatggcatgccccccagctactgtatgcccccgacccccgcagaggcagaatgaacccatagggagctgatcgtaatgtttatcatgttacttccccacccctacattttttgaaataaaataaggaattttattctca

SEQ ID NO: 7204 - protein, 91 aa, Homo sapiens
MLDLSPFLLSFFSSHLPHSTLPSWDLPSLSRQPSAMALPVPPSPFFQGAERWPPGVALSYLHSLPLKMGGDQRSMGLACESPLASNPLISS

SEQ ID NO: 7205 - DNA, 1312 bp, Homo sapiens
ctgccctcatgggacctgccctccctcagccgtcagccatcagccatggccctcccagtgcctcctagccccttcttccaaggagcagagaggtggccaccgggggtggctctgtcctacctccactctctgcccctaaagatgggaggagaccagcggtccatgggtctggcctgtgagtctccccttgcagcctggtcactaggcatcacccccgctttggttcttcagatgctcttggggttcataggggcaggtcctagtcgggcagggcccctgaccctcccggcctggcttcactctccctgacggctgccattggtccaccctttcatagagaggcctgctttgttacaaagctcgggtctccctcctgcagctcggttaagtacccgaggcctctcttaagatgtccagggccccaggcccgcgggcacagccagcccaaaccttgggccctggaagagtcctccaccccatcactagagtgctctgaccctgggctttcacgggccccattccaccgcctccccaacttgagcctgtgaccttgggaccaaagggggagtccctcgtctcttgtgactcagcagaggcagtggccacgttcagggaggggccggctggcctggaggctcagcccaccctccagcttttcctcagggtgtcctgaggtccaagattctggagcaatctgacccttctccaaaggctctgttatcagctgggcagtgccagccaatccctggccatttggccccaggggacgtgggccctgcaggctgcaggagggcactggagctgggaggtctcgtcccagccctccccatctcggggctgctgtgtggacggcgctgcctcaggcactctcctgtctgaacctgcccttactgtgtttaacctgttgctccaggatgcattctgataggagggggcggcagggctgggccttgtgacaatctgcctttcaccacatggccttgcctcggtggccctgactgtcagggaggatcctgagctgctgttgcagtctaacccactaatcagttcttagattcaggggaagggcaggcaccaacaactcagaatgggggctttcggggagggcgcctagtccccccagctctaagcagccaggagggacctgcatctaagcatctgggttgccatggcaatggcatgccccccagctactgtatgcccccgacccccgcagaggcagaatgaacccatagggagctgatcgtaatgtttatcatgttacttccccacccctacattttttgaaataaaataaggaattttattctca

SEQ ID NO: 7206 - protein, 87 aa, Homo sapiens
MALPVPPSPFFQGAERWPPGVALSYLHSLPLKMGGDQRSMGLACESPLAAWSLGITPALVLQMLLGFIGAGPSRAGPLTLPAWLHSP

SEQ ID NO: 7207 - DNA, 1144 bp, Homo sapiens
gtcctagtcgggcagggcccctgaccctcccggcctggcttcactctccctgacggctgccattggtccaccctttcatagagaggcctgctttgttacaaagctcgggtctccctcctgcagctcggttaagtacccgaggcctctcttaagatgtccagggccccaggcccgcgggcacagccagcccaaaccttgggccctggaagagtcctccaccccatcactagagtgctctgaccctgggctttcacgggccccattccaccgcctccccaacttgagcctgtgaccttgggaccaaagggggagtccctcgtctcttgtgactcagcagaggcagtggccacgttcagggaggggccggctggcctggaggctcagcccaccctccagcttttcctcagggtgtcctgaggtccaagattctggagcaatctgacccttctccaaaggctctgttatcagctgggcagtgccagccaatccctggccatttggccccaggggacgtgggccctgcaggctgcaggagggcactggagctgggaggtctcgtcccagccctccccatctcggggctgctgtgtggacggcgctgcctcaggcactctcctgtctgaacctgcccttactgtgtttaacctgttgctccaggatgcattctgataggagggggcggcagggctgggccttgtgacaatctgcctttcaccacatggccttgcctcggtggccctgactgtcagggagggccagggaggcagagcgggagggagtctcaggaggaggctgccctgaggggctggggagggggtacctcatgaggaccagggtggagctgagaagaggaggaggtgggggctggaggtgctggtagctgaggggacgggcaagtgagaggggagggagggaagtcctgggaggatcctgagctgctgttgcatccccccagctctaagcagccaggagggacctgcatctaagcatctgggttgccatggcaatggcatgccccccagctactgtatgcccccgacccccgcagaggcagaatgaacccatagggagctgatcgtaatgtttatcatgttacttccccacccctacattttttgaaataaaataaggaattttattctca

SEQ ID NO: 7208 - protein, 33 aa, Homo sapiens [sequence omitted]

SEQ ID NO: 7209 - DNA, 2381 bp, Homo sapiens
caagtgtcttccttgcaaacccccaaggactcaatgtgtgtcgcccttgactgatccccccgccccgtgacccagtggtcctcagttccaggttttcccacctacccttcacccactgcttatgtttataaaaacggggtaaatcaaatgttcgtgacccagatcttattctacatgcagtggaaacttgtatgacttaagctttttggaaaagcagaaccttttttcgtggttcaagaaatcaaagtcttcccgggaggtctttctgtaaatccagagctgcagatgtttgaccgtgttcagagaggggcccttgtgctgggtgaagtggatggggcacagcaggcaatgggtgaaaagcaggacaacctggggccctgggaggaccagggagggcccatgtctttgactgttcatcagccggctgacttcctgtccgcctgtcgtctgctctgcccatccatccgtagtccttccgcctgtctctgctggttgccgctgtgctactcagctgtgtctgtctgtccgcctgactgtctgctctccttcaggatgccttccgtgccttccatcaagatctcaattttgtgcgcaagttcctacagcccctgttgattggagagctggctccggaagaacccagccaggatggacccctgaatgcgcagctggtcgaggacttccgagccctgcaccaggcagccgaggacatgaagctgtttgatgccagtcccaccttctttgctttcctactgggccacatcctggccatggaggtgctggcctggctccttatctacctcctgggtcctggctgggtgcccagtgccctggccgccttcatcctggccatctctcaggctcagtcctggtgtctgcagcatgacctgggccatgcctccatcttcaagaagtcctggtggaaccacgtggcccagaagttcgtgatggggcagctaaagggcttctccgcccactggtggaacttccgccacttccagcaccacgccaagcccaacatcttccacaaagacccagacgtgacggtggcgcccgtcttcctcctgggggagtcatccgtcgagtatggcaagaagaaacgcagatacctaccctacaaccagcagcacctgtacttcttcctgatcggcccgccgctgctcaccctggtgaactttgaagtggaaaatctggcgtacatgctggtgtgcatgcagtgggcggatttgctctgggccgccagcttctatgcccgcttcttcttatcctacctccccttctacggcgtccctggggtgctgctcttctttgttgctgtcaggtatggcagggagtggcgaggtcacacacaggcgacaggtgacccccactgcagccccccaccagagcttcccttttcccgtctgcagaatggggccagtggtactgcctccctggcttgctggtggaatcacataaacacaagcgtggcaggagcccagggtcggtgggtttagggagcgtggcctggcttgtaagtggcccggtgggtgtcggagctgctctggactcagcctcacagtggacactgctccattcagattctttaaacactggcaagggggcgatggccacaatcctattgtacagataaggaagtcaaggccacttggggacagctgctctccagcctccactcagggtgcctaagtggtgagctggacctagggcagtgcccgagcctccccacagggtcctggaaagccactggttcgtgtggatcacacagatgaaccacatccccaaggagatcggccacgagaagcaccgggactgggtcagctctcagctggcagccacctgcaacgtggagccctcacttttcaccaactggttcagcgggcacctcaacttccagatcgagcaccacctcttccccaggatgccgagacacaactacagccgggtggccccgctggtcaagtcgctgtgtgccaagcacggcctcagctacgaagtgaagcccttcctcaccgcgctggtggacatcgtcaggtccctgaagaagtctggtgacatctggctggacgcctacctccatcagtgaaggcaacacccaggcgggcagagaagggctcagggcaccagcaaccaagccagcccccggcgggatcgataccctcacccctccactggccagcctgggggtgccctgcctgccctcctggtactgttgtcttcccctcggccccctcacatgtgtattcagcagccctatggccttggctctgggcctgatgggacaggggtagagggaaggtgagcatagcacattttcctagagcgagaattgggggaaagctgttatttttatattaaaatacattcagatgtattatgga

SEQ ID NO: 7210 - protein, 261 aa, Homo sapiens
MKLFDASPTFFAFLLGHILAMEVLAWLLIYLLGPGWVPSALAAFILAISQAQSWCLQHDLGHASIFKKSWWNHVAQKFVMGQLKGFSAHWWNFRHFQHHAKPNIFHKDPDVTVAPVFLLGESSVEYGKKKRRYLPYNQQHLYFFLIGPPLLTLVNFEVENLAYMLVCMQWADLLWAASFYARFFLSYLPFYGVPGVLLFFVAVRYGREWRGHTQATGDPHCSPPPELPFSRLQNGASGTASLACWWNHINTSVAGAQGRWV

SEQ ID NO: 7211 - DNA, 5319 bp, Homo sapiens
gatcacttacgaccaggatttcaaggctgcagtgagctgtgattgcatcactgcactccagcctggtgacagagtgaggccctgtctcaaaaaaatttttcagtgtttttctgggctgggcgtggtggctcattcctgtaattccagcactttgggaggctgaggtgggtggattgcttgagcccaggagtttaagaccagctgggcaacatggcaaacctcatctctacaaaaaataaaaataaaaaattagctgggcatggtggtgcacacctgtactaacagctacgagagaggctaaggtgggaggatcacctgagcccgggaggttgaggctgcagtgagccatgattgcaccactgcactctagcctgggcgatacagcaagaccctatctcaaaaaaaaaaaaaaaaaaaaaaaaaaaaaacacccagtggggtcagtagaaccccaagagtcttcttccctcccagctcccctgtacaccagccccagctctgcaggtagctgggggcccagacagcttcctggggacccccagccttccctctgcccttttttctaccagttttgctgcccctccttcaagactcatgtccagagggggtgagatctgcacttatacagccccctcctctgtaatgagtgagccaagtcagcccaggttattccagaaggggcaccctaccagccccccagtccccaagctgccctgggcctataaaagcaggcaaggggacccctagtagatcatgtaggtgttacctcttagtgggtgctggaggggcctgaagtgctttcttcccccagggtggtaggagaatgtcctggcagtgacttcagggcccgctgtcacttccgttttaagactcaccagctggtaggctcattagcaagaggacaataggaggcccctgtcctcagtcagctttcttcaaaggtgtttcctttagcaactgggaggcctcccttctccagacccatggggacaacaccacccagctactggttctataagctgctgtatggctctggctagcccattcagagaaagcctctgaaagtacaaggaaaaaaatcagtccaagagctgtgaacaattagtgagccgattacaataccaagaccacaggcagacctggaaggctaagtgagcccaggtgtgaagttcaagcttactttacttctgggccacttcctggctggtctctttccctggcccttatctttctcctggtctgtcttctcttctcaccccctttctttactctttcttccttctcctgcatcgtactccacccccactccagctattacacagaatcgcgagaatgttggattattcattttatttatgatgttttcttttttgtaaaaatagagacaaggtctcactatgtggcccaggctggtcttgaactcctggcctcaagcaatcctcgtgccttggcctcttacagtgctgggattacagatgtgagccaccatgcctggcccattttatttactttaaaaaaaaaattaggctgggcgcggtggctcacacctataattccagcactttgggaggccaaggtgggcagatcaactgaggtcaggagttaaagaccagcttggccacctggggtcaggagtttgagaccagctactccggaggctgagaccggagaattgcttgaacccaggaggtagaggttgcaatgaactgagatcatgccattgcatgccagcctgggcaacagagcaagactgtctcaaaaaaaaaaaaaattatgttttgtgctcctgcttcctgctttgtaagtcaaatcagtttaactgttcaagtgtcttccttgcaaacccccaaggactcaatgtgtgtcgcccttgactgatccccccgccccgtgacccagtggtcctcagttccaggttttcccacctacccttcacccactgcttatgtttataaaaacggggtaaatcaaatgttcgtgacccagatcttattctacatgcagtggaaacttgtatgacttaagctttttggaaaagcagaaccttttttcgtggttcaagaaatcaaagtcttcccgggaggtctttctgtaaatccagagctgcagatgtttgaccgtgttcagagaggggcccttgtgctgggtgaagtggatggggcacagcaggcaatgggtgaaaagcaggacaacctggggccctgggaggaccagggagggcccatgtctttgactgttcatcagccggctgacttcctgtccgcctgtcgtctgctctgcccatccatccgtagtccttccgcctgtctctgctggttgccgctgtgctactcagctgtgtctgtctgtccgcctgactgtctgctctccttcaggatgccttccgtgccttccatcaagatctcaattttgtgcgcaagttcctacagcccctgttgattggagagctggctccggaagaacccagccaggatggacccctgaatgcgcagctggtcgaggacttccgagccctgcaccaggcagccgaggacatgaagctgtttgatgccagtcccaccttctttgctttcctactgggccacatcctggccatggaggtgctggcctggctccttatctacctcctgggtcctggctgggtgcccagtgccctggccgccttcatcctggccatctctcaggctcagtcctggtgtctgcagcatgacctgggccatgcctccatcttcaagaagtcctggtggaaccacgtggcccagaagttcgtgatggggcagctaaagggcttctccgcccactggtggaacttccgccacttccagcaccacgccaagcccaacatcttccacaaagacccagacgtgacggtggcgcccgtcttcctcctgggggagtcatccgtcgagtatggcaagaagaaacgcagatacctaccctacaaccagcagcacctgtacttcttcctgagtgagtgtccatctgtccttctggggtgggggagtgcctgggcctgcactgtcctccctgctgtcctggaccactcccagccacttcctggggcggggcacgtctgtcaggtctccctggtcatggcatcctcccagcctctgcagtctgtacacactctcccagcagcatgcctttgccccagctgtctcccgtgcctgggacaccttgcagccacgggccatcacagccctgctgggagcttccccaagccccacgtagaatttcttcttgccctcactagagtggtccggagccctagagtctttgggcagttgttggggcggacagagtgaggactcaagtctggccctgacttgcggtgaagggtggtgggaggtggtggggtaagggcagcctggggaggcttggacacagaattgggggtgatatggggtcattcagctggatgtgaccagcaccaacgtcccaggggcattcctggagtaacagagcccctcactctggcgcccactcaccttggcagcccagccccactcctgaacactctcatgccccttcttgcagtcggcccgccgctgctcaccctggtgaactttgaagtggaaaatctggcgtacatgctggtgtgcatgcagtgggcggtgagtggggttgcccaggaccccgggcatacggctgccgtggcaggaggtggtgcctcgggggacagtacctgcccatgaaggcaaacagggtgcacatgtgcgtgcaacagtgtggctcacatgtatgcgtgcaacagtgtggctcacatgtgtgcgcgcagcaggagagcgagtgtgcccgtgactgtacgtgtggtgggggggggttgaggaacagggggggtgtgggtctctctcggtgagggtgtcttcccaggaggagttgctgggctgactctgccaggcatctgtgtccctggcagggtcttccccaacacaccctgcatgacaccttcgtcactaaaatcagcctcgtgagctggcagggcaaggaccctgttcctttactcagctgagaaaaccagagagggtggtggcctgtcctgggctctgaggcaaatcaggcagaagggttggatgcctgaggtcctcctcccacccaccaggcctccagacctccgggcacctggagacctctcggtatcgcctctgccctcctctgcaggatttgctctgggccgccagcttctatgcccgcttcttcttatcctacctccccttctacggcgtccctggggtgctgctcttctttgttgctgtcaggtatggcagggagtggcgaggtcacacacaggcgacaggtgacccccactgcagccccccaccagagcttcccttttcccgtctgcagaatggggccagtggtactgcctccctggcttgctggtggaatcacataaacacaagcgtggcaggagcccagggtcggtgggtttagggagcgtggcctggcttgtaagtggcccggtgggtgtcggagctgctctggactcagcctcacagtggacactgctccattcagattctttaaacactggcaagggggcgatggccacaatcctattgtacagataaggaagtcaaggccacttggggacagctgctctccagcctccactcagggtgcctaagtggtgagctggacctagggcagtgcccgagcctccccacagggtcctggaaagccactggttcgtgtggatcacacagatgaaccacatccccaaggagatcggccacgagaagcaccgggactgggtcagctctcagctggcagccacctgcaacgtggagccctcacttttcaccaactggttcagcgggcacctcaacttccagatcgagcaccacctcttccccaggatgccgagacacaactacagccgggtggccccgctggtcaagtcgctgtgtgccaagcacggcctcagctacgaagtgaagcccttcctcaccgcgctggtggacatcgtcaggtccctgaagaagtctggtgacatctggctggacgcctacctccatcagtgaaggcaacacccaggcgggcagagaagggctcagggcaccagcaaccaagccagcccccggcgggatcgataccctcacccctccactggccagcctgggggtgccctgcctgccctcctggtactgttgtcttcccctcggccccctcacatgtgtattcagcagccctatggccttggctctgggcctgatgggacaggggtagagggaaggtgagcatagcacattttcctagagcgagaattgggggaaagctgttatttttatattaaaatacattcagatgtattatgga

SEQ ID NO: 7212 - protein, 256 aa, Homo sapiens
MKLFDASPTFFAFLLGHILAMEVLAWLLIYLLGPGWVPSALAAFILAISQAQSWCLQHDLGHASIFKKSWWNHVAQKFVMGQLKGFSAHWWNFRHFQHHAKPNIFHKDPDVTVAPVFLLGESSVEYGKKKRRYLPYNQQHLYFFLSECPSVLLGWGSAWACTVLPAVLDHSQPLPGAGHVCQVSLVMASSQPLQSVHTLPAACLCPSCLPCLGHLAATGHHSPAGSFPKPHVEFLLALTRVVRSPRVFGQLLGRTE

SEQ ID NO: 7213 - DNA, 1804 bp, Homo sapiens
gcgccgcgagccgggaggcgcacgctcgctcgtacggcggccgcggcggcagggcggggccggagcagcgggcggcggcggaggcggcgcccgggagcgctcttcgcttccctcggggtcttgctcggacctcggccaccgcctgggatccccaggactcgtgcgtgcagcatgggcggcgtcggggagccgggaccgcgggagggacccgcgcagccgggggcgccgctgcccaccttctgctgggagcagatccgcgcgcacgaccagcccggcgacaagtggctggtcatcgagcgccgcgtctacgacatcagccgctgggcacagcggcacccagggggcagccgcctcatcggccaccacggcgctgaggacgccacggatgccttccgtgccttccatcaagatctcaattttgtgcgcaagttcctacagcccctgttgattggagagctggctccggaagaacccagccaggatggacccctgaatgcgcagctggtcgaggacttccgagccctgcaccaggcagccgaggacatgaagctgtttgatgccagtcccaccttctttgctttcctactgggccacatcctggccatggaggtgctggcctggctccttatctacctcctgggtcctggctgggtgcccagtgccctggccgccttcatcctggccatctctcaggctcagtcctggtgtctgcagcatgacctgggccatgcctccatcttcaagaagtcctggtggaaccacgtggcccagaagttcgtgatggggcagctaaagggcttctccgcccactggtggaacttccgccacttccagcaccacgccaagcccaacatcttccacaaagacccagacgtgacggtggcgcccgtcttcctcctgggggagtcatccgtcgagtatggcaagaagaaacgcagatacctaccctacaaccagcagcacctgtacttcttcctgatcggcccgccgctgctcaccctggtgaactttgaagtggaaaatctggcgtacatgctggtgtgcatgcagtgggcggatttgctctgggccgccagcttctatgcccgcttcttcttatcctacctccccttctacggcgtccctggggtgctgctcttctttgttgctgtcagggtcctggaaagccactggttcgtgtggatcacacagatgaaccacatccccaaggagatcggccacgagaagcaccgggactgggtcagctctcagctggcagccacctgcaacgtggagccctcacttttcaccaactggttcagcgggcacctcaacttccagatcgagcaccacctcttccccaggatgccgagacacaactacagccgggtggccccgctggtcaagtcgctgtgtgccaagcacggcctcagctacgaagtgaagcccttcctcaccgcgctggtggacatcgtcaggtccctgaagaagtctggtgacatctggctggacgcctacctccatcagtgaaggcaacacccaggcgggcagagaagggctcagggcaccagcaaccaagccagcccccggcgggatcgataccctcacccctccactggccagcctgggggtgccctgcctgccctcctggtactgttgtcttcccctcggccccctcacatgtgtattcagcagccctatggccttggctctgggcctgatgggacaggggtagagggaaggtgagcatagcacattttcctagagcgagaattgggggaaagctgttatttttatattaaaatacattcagatgtattatgga

SEQ ID NO: 7214 - protein, 445 aa, Homo sapiens; identical to SEQ ID NO: 1004

SEQ ID NO: 7215 - DNA, 1613 bp, Homo sapiens
gccccgcagagattggggcccatggtttgaaggctgttcacaggcaccccgagacagcgtcccccctctgggcgcactggatttgacgttgcaggacgcgcggctggaagccccccaggccccgctgctcacagaccgggactccgcctccggttcccgagggcgtggcgaggcgctgcgggacgcccaacaggatgccttccgtgccttccatcaagatctcaattttgtgcgcaagttcctacagcccctgttgattggagagctggctccggaagaacccagccaggatggacccctgaatgcgcagctggtcgaggacttccgagccctgcaccaggcagccgaggacatgaagctgtttgatgccagtcccaccttctttgctttcctactgggccacatcctggccatggaggtgctggcctggctccttatctacctcctgggtcctggctgggtgcccagtgccctggccgccttcatcctggccatctctcaggctcagtcctggtgtctgcagcatgacctgggccatgcctccatcttcaagaagtcctggtggaaccacgtggcccagaagttcgtgatggggcagctaaagggcttctccgcccactggtggaacttccgccacttccagcaccacgccaagcccaacatcttccacaaagacccagacgtgacggtggcgcccgtcttcctcctgggggagtcatccgtcgagtatggcaagaagaaacgcagatacctaccctacaaccagcagcacctgtacttcttcctgatcggcccgccgctgctcaccctggtgaactttgaagtggaaaatctggcgtacatgctggtgtgcatgcagtgggcggatttgctctgggccgccagcttctatgcccgcttcttcttatcctacctccccttctacggcgtccctggggtgctgctcttctttgttgctgtcagggtcctggaaagccactggttcgtgtggatcacacagatgaaccacatccccaaggagatcggccacgagaagcaccgggactgggtcagctctcagctggcagccacctgcaacgtggagccctcacttttcaccaactggttcagcgggcacctcaacttccagatcgagcaccacctcttccccaggatgccgagacacaactacagccgggtggccccgctggtcaagtcgctgtgtgccaagcacggcctcagctacgaagtgaagcccttcctcaccgcgctggtggacatcgtcaggtccctgaagaagtctggtgacatctggctggacgcctacctccatcagtgaaggcaacacccaggcgggcagagaagggctcagggcaccagcaaccaagccagcccccggcgggatcgataccctcacccctccactggccagcctgggggtgccctgcctgccctcctggtactgttgtcttcccctcggccccctcacatgtgtattcagcagccctatggccttggctctgggcctgatgggacaggggtagagggaaggtgagcatagcacattttcctagagcgagaattgggggaaagctgttatttttatattaaaatacattcagatgtattatgga

SEQ ID NO: 7216 - protein, 321 aa, Homo sapiens
MKLFDASPTFFAFLLGHILAMEVLAWLLIYLLGPGWVPSALAAFILAISQAQSWCLQHDLGHASIFKKSWWNHVAQKFVMGQLKGFSAHWWNFRHFQHHAKPNIFHKDPDVTVAPVFLLGESSVEYGKKKRRYLPYNQQHLYFFLIGPPLLTLVNFEVENLAYMLVCMQWADLLWAASFYARFFLSYLPFYGVPGVLLFFVAVRVLESHWFVWITQMNHIPKEIGHEKHRDWVSSQLAATCNVEPSLFTNWFSGHLNFQIEHHLFPRMPRHNYSRVAPLVKSLCAKHGLSYEVKPFLTALVDIVRSLKKSGDIWLDAYLHQ

SEQ ID NO: 7217 - DNA, 176 bp, Homo sapiens
gtgaaggcaacacccaggcgggcagagaagggctcagggcaccacagccctatggccttggctctgggcctgatgggacaggggtagagggaaggtgagcatagcacattttcctagagcgagaattgggggaaagctgttatttttatattaaaatacattcagatgtattatgg

SEQ ID NO: 7218 - protein, 31 aa, Homo sapiens
EGNTQAGREGLRAPQPYGLGSGPDGTGVEGR

SEQ ID NO: 7219 - DNA, 505 bp, Homo sapiens
cagccctttagagcgcctggcacagggcttcctagcagattgttgacatttctggctccactgaccaatatcaggcccaagatcgggtgggcaggttccacgtcctctctgtccttgggttgcagcgcccagcaggaggcagcaatggagaactgggtgcaggagggacaggcccacccaggctcatgcctggacttggccttggctgccctccagctcccctacccgacacccgtcaccccggtctagattccattccagagaatgagcattcagctgttctcccaacccaccctccagcccgcatcgctgcctgcccccagggaagggaacccacagggaatggggatctccgctcacaatgtgtattcagcagccctatggccttggctctgggcctgatgggacaggggtagagggaaggtgagcatagcacattttcctagagcgagaattgggggaaagctgttatttttatattaaaatacattcagatgtattatgg

SEQ ID NO: 7220 - protein, 76 aa, Homo sapiens [sequence omitted]

SEQ ID NO: 7221 - DNA, 979 bp, Homo sapiens
gcgccgcgagccgggaggcgcacgctcgctcgtacggcggccgcggcggcagggcggggccggagcagcgggcggcggcggaggcggcgcccgggagcgctcttcgcttccctcggggtcttgctcggacctcggccaccgcctgggatccccaggactcgtgcgtgcagcatgggcggcgtcggggagccgggaccgcgggagggacccgcgcagccgggggcgccgctgcccaccttctgctgggagcagatccgcgcgcacgaccagcccggcgacaagtggctggtcatcgagcgccgcgtctacgacatcagccgctgggcacagcggcacccagggggcagccgcctcatcggccaccacggcgctgaggacgccacggatgccttccgtgccttccatcaagatctcaattttgtgcgcaagttcctacagcccctgttgattggagagctggctccggaagaacccagccaggatggacccctgaatgcgcagctggtcgaggacttccgagccctgcaccaggcagccgaggacatgaagctgtttgatgccagtcccaccttctttgctttcctactgggccacatcctggccatggaggtgctggcctggctccttatctacctcctgggtcctggctgggtgcccagtgccctggccgccttcatcctggccatctctcaggctcagtcctggtgtctgcagcatgacctgggccatgcctccatcttcaagaagtcctggtggaaccacgtggcccagaagttcgtgatggggcagctaaagggcttctccgcccactggtggaacttccgccacttccagcaccacgccaagcccaacatcttccacaaagacccagacgtgacggtggcgcccgtcttcctcctgggggagtcatccgtcgagtatggcaagaagaaacgcagatacctaccctacaaccagcagcacctgtacttcttcctga

SEQ ID NO: 7222 - protein, 268 aa, Homo sapiens
MGGVGEPGPREGPAQPGAPLPTFCWEQIRAHDQPGDKWLVIERRVYDISRWAQRHPGGSRLIGHHGAEDATDAFRAFHQDLNFVRKFLQPLLIGELAPEEPSQDGPLNAQLVEDFRALHQAAEDMKLFDASPTFFAFLLGHILAMEVLAWLLIYLLGPGWVPSALAAFILAISQAQSWCLQHDLGHASIFKKSWWNHVAQKFVMGQLKGFSAHWWNFRHFQHHAKPNIFHKDPDVTVAPVFLLGESSVEYGKKKRRYLPYNQQHLYFF

SEQ ID NO: 7223 - DNA, 1067 bp, Homo sapiens
caagtgtcttccttgcaaacccccaaggactcaatgtgtgtcgcccttgactgatccccccgccccgtgacccagtggtcctcagttccaggttttcccacctacccttcacccactgcttatgtttataaaaacggggtaaatcaaatgttcgtgacccagatcttattctacatgcagtggaaacttgtatgacttaagctttttggaaaagcagaaccttttttcgtggttcaagaaatcaaagtcttcccgggaggtctttctgtaaatccagagctgcagatgtttgaccgtgttcagagaggggcccttgtgctgggtgaagtggatggggcacagcaggcaatgggtgaaaagcaggacaacctggggccctgggaggaccagggagggcccatgtctttgactgttcatcagccggctgacttcctgtccgcctgtcgtctgctctgcccatccatccgtagtccttccgcctgtctctgctggttgccgctgtgctactcagctgtgtctgtctgtccgcctgactgtctgctctccttcaggatgccttccgtgccttccatcaagatctcaattttgtgcgcaagttcctacagcccctgttgattggagagctggctccggaagaacccagccaggatggacccctgaatgcgcagctggtcgaggacttccgagccctgcaccaggcagccgaggacatgaagctgtttgatgccagtcccaccttctttgctttcctactgggccacatcctggccatggaggtgctggcctggctccttatctacctcctgggtcctggctgggtgcccagtgccctggccgccttcatcctggccatctctcaggctcagtcctggtgtctgcagcatgacctgggccatgcctccatcttcaagaagtcctggtggaaccacgtggcccagaagttcgtgatggggcagctaaaggtgagggtggggtgggtggtcagccaggtgctgggtggcgctgggtctgcccaagtgtgtgggcacagtcgggggcacagcctgccctgagagccccctcctcct

SEQ ID NO: 7224 - protein, 113 aa, Homo sapiens [sequence omitted]

SEQ ID NO: 7225 - DNA, 633 bp, Homo sapiens
gagccgggaggcgcacgctcgctcgtacggcggccgcggcggcagggcggggccggagcagcgggcggcggcggaggcggcgcccgggagcgctcttcgcttccctcggggtcttgctcggacctcggccaccgcctgggatccccaggactcgtgcgtgcagcatgggcggcgtcggggagccgggaccgcgggagggacccgcgcagccgggggcgccgctgcccaccttctgctgggagcagatccgcgcgcacgaccagcccggcgacaagtggctggtcatcgagcgccgcgtctacgacatcagccgctgggcacagcggcacccagggggcagccgcctcatcggccaccacggcgctgaggacgccacggttggccacactgggtatcaggaaggtcttcaagacccgaggacatgaatcctgaatgctggctttttgggcagcagcggaggttctgtccagtcccaggactgtcggcgtccctcttgacagggccacctgctctctgccgattgccatctccagcatgttggacaatcttcactggactctttgaggaagaaagcccctcttttccccttccaccccatgaagctgaggagtgagaataagaatcctcctgaaa

SEQ ID NO: 7226 - protein, 86 aa, Homo sapiens
MGGVGEPGPREGPAQPGAPLPTFCWEQIRAHDQPGDKWLVIERRVYDISRWAQRHPGGSRLIGHHGAEDATVGHTGYQEGLQDPRT

SEQ ID NO: 7227 - DNA, 1618 bp, Homo sapiens
ccggttcatctcacagctctgctgcatgctggttcattagctccgccatctccgtgatggatgtcagcggctttccccgggtggctccgctttcccccatgtaagatggaataataagcgcgtctgctccgttcgctgcaggcgcttgatgaaatggctgctgctgctgctgctgctattacagcagggctagtcatgctgttgttgattactacttgaaagcccagtcccagctgagtcagggagcactgcctggctctgcagggacctggggcctcctgctctggactcagatccgcctgtcaggggacccccagcgtggggctggcaggtcacaccgtccccacctctgcccacagatcaccgcagtgtgcaacttcttcacctacatccgctacatccagcaaggcctggtgcggcaggacgcagagcccatgttctgggagatcatgaggttgcggaaggagatgtcactggccaagctcggcttcttcccccaggaggcttagggcgcggcccaggcctgaaggggagctctgagacagagcaaacacccaccccagaacaagccgacacacagggagacgggggcctggagccagccctgagccagaggcagaatggatggacagacaggccatggaggcagcactgagccagcaccacacgtccatcctgggacagacgggcctggacttcacggcaagacccccctctcttccccactgggttctgccaccaccaggaggatttcaagaaagcaccaaagaccagggagctcggatccatactcggggggcctcagcccttgggaggggacacctgaggcagccagcgccccctccccagtccccagaactgcctgcaggtgccttgttgctggcttgtcttcagaaagggactgttctgggtggctggatctccagggtaccctccaccccagctgccaagccctgggccagcagcacccccttgtggccatcctgtgccttgttcccggtggcctccctattggactactaggaggggctggcagggcctccatagcacagaattgccccaaagccttgttaagatgagtcaagacccctcccccgcttcctcccttcctttcccccttcctccctcccccttcataaaggcctcccttgtcaccttccctcccaccccgtctcagccctgtgctcctggaggccctgctcccaaaaccgctggaaggactggggcactttctgccacagtagaacacagacagggcttcagatcacccacgcctgttttcagctgtgggtggccatgcagacacgcgccctggcatgtggggcctgggtgggcaggcaggacctgggccctcccacccatcagagcccactcaggaccagcgttcggagctcccacctggacgcatccctcaccacgtccggatttccttctttggatggaatgtaacgcgatctctatttaataaaggcaggctttgttggtacaggctgggtggccacgcgccctcactcctgcaccctggggctctggccaaggcttgggcatctgaaggaatgaaaccaaatcctttccctgcccgccctcgtgcttgggattaaacccaaatcctgaagcc

SEQ ID NO: 7228 - protein, 152 aa, Homo sapiens [sequence omitted]

SEQ ID NO: 7229 - DNA, 2497 bp, Homo sapiens
ggccgggcacgtgtcctcgggccgctcccccctccgccacgtgacccgcccagggcagggtcggggctgggctgggggccgcgagcccaggcgtctgagacctactgaccggccgcgggcagggctgacaggcggtggggcggctcggcccctggcggagtcggcggcgggcggggacgcggcgctgggaggacgcggcggcgctgggaacggacgcctgggcgccccgaggcgccgggatgtggagcggcccaccccagccagaccagggcctcccgccgccccttgcagctgtcccggtcccctggaagagcacggacccctgccaaggccacagggagtccccaggagccctggtggagacctctgcaggggaggaggcccaaggccaggagggccccgcagccgcccagctggacgtgttgcgcctgcgcagctcttccatggagatccgagagaagggctccgagttcctgaaggaggagctgcacagagcgcagaaggagctgaagctaaaggacgaggaatgtgagcggctgtccaaggtgcgggagcagctagaacaggagctggaagagctgacggccagcctgtttgaggaagctcacaagatggttcgagaagccaacatgaagcaggcggcatcagaaaagcagctgaaggaggctcggggcaagatcgacatgctgcaggcagaggtgacagccttgaagacgctggtcatcacgtccacaccagcctctcccaaccgcgagcttcacccccagctgctgagccccaccaaggccgggccccgaaagggccactctcgccacaagagcaccagcagcaccctctgccccgccgtgtgtcccgctgcgggacacaccctcaccccagacagagagggcaaggaggtggacacaatcctgtttgcagagttccaggcctggagggaatcccccaccctggacaagacctgccccttcctggaaagggtgtaccgagaggacgtgggcccctgcctggacttcacaatgcaggagctctcggtgctggtacgggccgccgtggaggacaacacgctcaccattgagccggtggcttcgcagacgctgcccacagtgaaggtggccgaggttgactgtagcagcaccaacacatgtgccctgagcgggctgacccgcacctgccgccaccgaatccggctcggggactccaaaagccattactacatctcgccatcttcccgggccaggatcaccgcagtgtgcaacttcttcacctacatccgctacatccagcaaggcctggtgcggcaggacgcagagcccatgttctgggagatcatgaggttgcggaaggagatgtcactggccaagctcggcttcttcccccaggaggcttagggcgcggcccaggcctgaaggggagctctgagacagagcaaacacccaccccagaacaagccgacacacagggagacgggggcctggagccagccctgagccagaggcagaatggatggacagacaggccatggaggcagcactgagccagcaccacacgtccatcctgggacagacgggcctggacttcacggcaagacccccctctcttccccactgggttctgccaccaccaggaggatttcaagaaagcaccaaagaccagggagctcggatccatactcggggggcctcagcccttgggaggggacacctgaggcagccagcgccccctccccagtccccagaactgcctgcaggtgccttgttgctggcttgtcttcagaaagggactgttctgggtggctggatctccagggtaccctccaccccagctgccaagccctgggccagcagcacccccttgtggccatcctgtgccttgttcccggtggcctccctattggactactaggaggggctggcagggcctccatagcacagaattgccccaaagccttgttaagatgagtcaagacccctcccccgcttcctcccttcctttcccccttcctccctcccccttcataaaggcctcccttgtcaccttccctcccaccccgtctcagccctgtgctcctggaggccctgctcccaaaaccgctggaaggactggggcactttctgccacagtagaacacagacagggcttcagatcacccacgcctgttttcagctgtgggtggccatgcagacacgcgccctggcatgtggggcctgggtgggcaggcaggacctgggccctcccacccatcagagcccactcaggaccagcgttcggagctcccacctggacgcatccctcaccacgtccggatttccttctttggatggaatgtaacgcgatctctatttaataaaggcaggctttgttggtacaggctgggtggccacgcgccctcactcctgcaccctggggctctggccaaggcttgggcatctgaaggaatgaaaccaaatcctttccctgcccgccctcgtgcttgggattaaacccaaatcctgaagcc

SEQ ID NO: 7230 - protein, 382 aa, Homo sapiens; identical to SEQ ID NO: 1006

SEQ ID NO: 7231 - DNA, 558 bp, Homo sapiens
ctgggttctgccaccaccaggaggatttcaagaaagcaccaaagaccagggagctcggatccatactcggggggcctcagcccttgggaggggacacctgaggcagccagcgccccctccccagtccccagaactgcctgcaggtgccttgttgctggcttgtcttcagaaagggactgttctgggtggctggatctccagggtaccctccaccccagctgccaagccctgggccagcagcacccccttgtggccatcctgccctgctcccaaaaccgctggaaggactggggcactttctgccacagtagaacacagacagggcttcagatcacccacgcctgttttcagctgtgggtggccatgcagacacgcgccctggcatgtggggcctgggtgggcaggcaggacctgggccctcccacccatcagagcccactcaggaccagcgttcggagctcccacctggacgcatccctcaccacgtccggatttccttctttggatggaatgtaacgcgatctctatttaataaaggcaggctttgttggtacaggc

SEQ ID NO: 7232 - protein, 57 aa, Homo sapiens
MWGLGGQAGPGPSHPSEPTQDQRSELPPGRIPHHVRISFFGWNVTRSLFNKGRLCWY

SEQ ID NO: 7233 - DNA, 1491 bp, Homo sapiens
ccggttcatctcacagctctgctgcatgctggttcattagctccgccatctccgtgatggatgtcagcggctttccccgggtggctccgctttcccccatgtaagatggaataataagcgcgtctgctccgttcgctgcaggcgcttgatgaaatggctgctgctgctgctgctgctattacagcagggctagtcatgctgttgttgattactacttgaaagcccagtcccagctgagtcagggagcactgcctggctctgcagggacctggggcctcctgctctggactcagatccgcctgtcaggggacccccagcgtggggctggcaggtcacaccgtccccacctctgcccacagatcaccgcagtgtgcaacttcttcacctacatccgctacatccagcaaggcctggtgcggcaggacgcagagcccatgttctgggagatcatgaggttgcggaaggagatgtcactggccaagctcggcttcttcccccaggaggcttagggcgcggcccaggcctgaaggggagctctgagacagagcaaacacccaccccagaacaagccgacacacagggagacgggggcctggagccagccctgagccagaggcagaatggatggacagacaggccatggaggcagcactgagccagcaccacacgtccatcctgggacagacgggcctggacttcacggcaagacccccctctcttccccactgggttctgccaccaccaggaggatttcaagaaagcaccaaagaccagggagctcggatccatactcggggggcctcagcccttgggaggggacacctgaggcagccagcgccccctccccagtccccagaactgcctgcaggtgccttgttgctggcttgtcttcagaaagggactgttctgggtggctggatctccagggtaccctccaccccagctgccaagccctgggccagcagcacccccttgtggccatcctgtgccttgttcccggtggcctccctattggactactaggaggggctggcagggcctccatagcacagaattgccccaaagccttgttaagatgagtcaagacccctcccccgcttcctcccttcctttcccccttcctccctcccccttcataaaggcctcccttgtcaccttccctcccaccccgtctcagccctgtgctcctggaggccctgctcccaaaaccgctggaaggactggggcactttctgccacagtagaacacagacagggcttcagatcacccacgcctgttttcagctgtgggtggccatgcagacacgcgccctggcatgtggggcctgggtgggcaggcaggacctgggccctcccacccatcagagcccactcaggaccagcgttcggagctcccacctggacgcatccctcaccacgtccggatttccttctttggatggaatgtaacgcgatctctatttaataaaggcaggctttgttggtacaggc

SEQ ID NO: 7234 - protein, 152 aa, Homo sapiens [sequence omitted]

SEQ ID NO: 7235 - DNA, 2370 bp, Homo sapiens
ggccgggcacgtgtcctcgggccgctcccccctccgccacgtgacccgcccagggcagggtcggggctgggctgggggccgcgagcccaggcgtctgagacctactgaccggccgcgggcagggctgacaggcggtggggcggctcggcccctggcggagtcggcggcgggcggggacgcggcgctgggaggacgcggcggcgctgggaacggacgcctgggcgccccgaggcgccgggatgtggagcggcccaccccagccagaccagggcctcccgccgccccttgcagctgtcccggtcccctggaagagcacggacccctgccaaggccacagggagtccccaggagccctggtggagacctctgcaggggaggaggcccaaggccaggagggccccgcagccgcccagctggacgtgttgcgcctgcgcagctcttccatggagatccgagagaagggctccgagttcctgaaggaggagctgcacagagcgcagaaggagctgaagctaaaggacgaggaatgtgagcggctgtccaaggtgcgggagcagctagaacaggagctggaagagctgacggccagcctgtttgaggaagctcacaagatggttcgagaagccaacatgaagcaggcggcatcagaaaagcagctgaaggaggctcggggcaagatcgacatgctgcaggcagaggtgacagccttgaagacgctggtcatcacgtccacaccagcctctcccaaccgcgagcttcacccccagctgctgagccccaccaaggccgggccccgaaagggccactctcgccacaagagcaccagcagcaccctctgccccgccgtgtgtcccgctgcgggacacaccctcaccccagacagagagggcaaggaggtggacacaatcctgtttgcagagttccaggcctggagggaatcccccaccctggacaagacctgccccttcctggaaagggtgtaccgagaggacgtgggcccctgcctggacttcacaatgcaggagctctcggtgctggtacgggccgccgtggaggacaacacgctcaccattgagccggtggcttcgcagacgctgcccacagtgaaggtggccgaggttgactgtagcagcaccaacacatgtgccctgagcgggctgacccgcacctgccgccaccgaatccggctcggggactccaaaagccattactacatctcgccatcttcccgggccaggatcaccgcagtgtgcaacttcttcacctacatccgctacatccagcaaggcctggtgcggcaggacgcagagcccatgttctgggagatcatgaggttgcggaaggagatgtcactggccaagctcggcttcttcccccaggaggcttagggcgcggcccaggcctgaaggggagctctgagacagagcaaacacccaccccagaacaagccgacacacagggagacgggggcctggagccagccctgagccagaggcagaatggatggacagacaggccatggaggcagcactgagccagcaccacacgtccatcctgggacagacgggcctggacttcacggcaagacccccctctcttccccactgggttctgccaccaccaggaggatttcaagaaagcaccaaagaccagggagctcggatccatactcggggggcctcagcccttgggaggggacacctgaggcagccagcgccccctccccagtccccagaactgcctgcaggtgccttgttgctggcttgtcttcagaaagggactgttctgggtggctggatctccagggtaccctccaccccagctgccaagccctgggccagcagcacccccttgtggccatcctgtgccttgttcccggtggcctccctattggactactaggaggggctggcagggcctccatagcacagaattgccccaaagccttgttaagatgagtcaagacccctcccccgcttcctcccttcctttcccccttcctccctcccccttcataaaggcctcccttgtcaccttccctcccaccccgtctcagccctgtgctcctggaggccctgctcccaaaaccgctggaaggactggggcactttctgccacagtagaacacagacagggcttcagatcacccacgcctgttttcagctgtgggtggccatgcagacacgcgccctggcatgtggggcctgggtgggcaggcaggacctgggccctcccacccatcagagcccactcaggaccagcgttcggagctcccacctggacgcatccctcaccacgtccggatttccttctttggatggaatgtaacgcgatctctatttaataaaggcaggctttgttggtacaggc

SEQ ID NO: 7236 - protein, 382 aa, Homo sapiens; identical to SEQ ID NO: 1006

SEQ ID NO: 7237 - DNA, 2130 bp, Homo sapiens
ctggtggggggaagaaggctcctgctacctcccttcccggcaccctccagagggaccctcagtctggccttgcaagcatggactcttctgaggagcacgctgggtgccccgcccgagggacatgtcccgtgttcctggccatgagtgcagggactgtccgctacgccccatcaggcctgtgccctgtacttgaggggaacttgagagaagagccctggggcacagacagcccaccccagccagaccagggcctcccgccgccccttgcagctgtcccggtcccctggaagagcacggacccctgccaaggccacagggagtccccaggagccctggtggagacctctgcaggggaggaggcccaaggccaggagggccccgcagccgcccagctggacgtgttgcgcctgcgcagctcttccatggagatccgagagaagggctccgagttcctgaaggaggagctgcacagagcgcagaaggagctgaagctaaaggacgaggaatgtgagcggctgtccaaggtgcgggagcagctagaacaggagctggaagagctgacggccagcctgtttgaggaagctcacaagatggttcgagaagccaacatgaagcaggcggcatcagaaaagcagctgaaggaggctcggggcaaggtggacacaatcctgtttgcagagttccaggcctggagggaatcccccaccctggacaagacctgccccttcctggaaagggtgtaccgagaggacgtgggcccctgcctggacttcacaatgcaggagctctcggtgctggtacgggccgccgtggaggacaacacgctcaccattgagccggtggcttcgcagacgctgcccacagtgaaggtggccgaggttgactgtagcagcaccaacacatgtgccctgagcgggctgacccgcacctgccgccaccgaatccggctcggggactccaaaagccattactacatctcgccatcttcccgggccaggatcaccgcagtgtgcaacttcttcacctacatccgctacatccagcaaggcctggtgcggcaggacgcagagcccatgttctgggagatcatgaggttgcggaaggagatgtcactggccaagctcggcttcttcccccaggaggcttagggcgcggcccaggcctgaaggggagctctgagacagagcaaacacccaccccagaacaagccgacacacagggagacgggggcctggagccagccctgagccagaggcagaatggatggacagacaggccatggaggcagcactgagccagcaccacacgtccatcctgggacagacgggcctggacttcacggcaagacccccctctcttccccactgggttctgccaccaccaggaggatttcaagaaagcaccaaagaccagggagctcggatccatactcggggggcctcagcccttgggaggggacacctgaggcagccagcgccccctccccagtccccagaactgcctgcaggtgccttgttgctggcttgtcttcagaaagggactgttctgggtggctggatctccagggtaccctccaccccagctgccaagccctgggccagcagcacccccttgtggccatcctgtgccttgttcccggtggcctccctattggactactaggaggggctggcagggcctccatagcacagaattgccccaaagccttgttaagatgagtcaagacccctcccccgcttcctcccttcctttcccccttcctccctcccccttcataaaggcctcccttgtcaccttccctcccaccccgtctcagccctgtgctcctggaggccctgctcccaaaaccgctggaaggactggggcactttctgccacagtagaacacagacagggcttcagatcacccacgcctgttttcagctgtgggtggccatgcagacacgcgccctggcatgtggggcctgggtgggcaggcaggacctgggccctcccacccatcagagcccactcaggaccagcgttcggagctcccacctggacgcatccctcaccacgtccggatttccttctttggatggaatgtaacgcgatctctatttaataaaggcaggctttgttggtacaggc

SEQ ID NO: 7238 - protein, 356 aa, Homo sapiens
MDSSEEHAGCPARGTCPVFLAMSAGTVRYAPSGLCPVLEGNLREEPWGTDSPPQPDQGLPPPLAAVPVPWKSTDPCQGHRESPGALVETSAGEEAQGQEGPAAAQLDVLRLRSSSMEIREKGSEFLKEELHRAQKELKLKDEECERLSKVREQLEQELEELTASLFEEAHKMVREANMKQAASEKQLKEARGKVDTILFAEFQAWRESPTLDKTCPFLERVYREDVGPCLDFTMQELSVLVRAAVEDNTLTIEPVASQTLPTVKVAEVDCSSTNTCALSGLTRTCRHRIRLGDSKSHYYISPSSRARITAVCNFFTYIRYIQQGLVRQDAEPMFWEIMRLRKEMSLAKLGFFPQEA

SEQ ID NO: 7239 - DNA, 164 bp, Homo sapiens
ccttcataaaggcctcccttgtcaccttccctcccacccatcagagcccactcaggaccagcgttcggagctcccacctggacgcatccctcaccacgtccggatttccttctttggatggaatgtaacgcgatctctatttaataaaggcaggctttgttggt

SEQ ID NO: 7240 - protein, 53 aa, Homo sapiens
LHKGLPCHLPSHPSEPTQDQRSELPPGRIPHHVRISFFGWNVTRSLFNKGRLC

SEQ ID NO: 7241 - DNA, 633 bp, Homo sapiens
taccttggctatccccctctgagttcttgccttgattctcctgttactgtcccgcgaacccacatccctacaaagcaggaaagtatgcttgggagaggccaagtgagtggggaatcagcccaaagccaggcgtccagggtctccctcacctgaagctgactttttccccaccttggacagagggcgggagatgccatccccactgaacccagtgctttcaccagccatattagctcccactcaccccccgtcgtggaagcctcggccgtcacacctgcagggccggggcgtgcatggcctcagggatggcctgttcagctgctgggtgactcgggtccaggtgcctcaccacctgctgagctctgtgtgatttctggacacttctgctcgttgcctttgggctcagtgaagagtctggagtttatctggagtgaggtggccggttcttggtgggatctgagcaggtggaggcaatgcccagagctgtggcagccaccttgcagccgtgaagcaccagtgggaatgacagtcaagagaaccacggagatgccagcccctggacccacagcagcagcacctgcttccagactcagagtgtgagaaaaaaataaactcctatttgtttatggcaag

SEQ ID NO: 7242 - protein, 59 aa, Homo sapiens
MPSPLNPVLSPAILAPTHPPSWKPRPSHLQGRGVHGLRDGLFSCWVTRVQVPHHLLSSV

SEQ ID NO: 7243 - DNA, 1104 bp, Homo sapiens
gtgactgcatgaggctgtacgtatctgcagcctgccccttttcatggtgtttatccactcacacagtgatgagcagtggtggaggcaatgcccagagctgtggcagccaccttgcagccgtgaagcaccagtgggaatgacagtcaagagaaccacggagatgccagcccctggacccacagcagcagcacctgcttccagactcagagtgtgagaaaaaaataaactcctatttgtttatggcaagagacaaggtctagctctgtgatgcaggccggaggacagtggtgtgatcacagctcactgcagccttgaactcctgggttccagcaatcctcccacctcagcctccttagtaggcgtggctacagtaatggaagacagcaaaagaagtttggagattcctggtttaaagcatttaaagcctctgtgaaaatttgcccaggccaacaacttcactttccacactcagtgccacgaagtgcagctctaagctggggatttctgtgcagagatgatccactgagtgcaacccaccaccgtgcggacaccacccctgcagaatcatctgtgaaaacaaccccaggcccagacataggggccagctaagcttcgtagccctcgaaatacagggagtgccccctctggaccctcgagcccacagtccatccaccacagaggtgtctgctgctcatcagatagttcctaccaagaaaatgctgtgtgaacccatctgtgtggcaaaccggcacggggagaaagctgacttccaaggacgtctaccaactgtcacttgcaaaccagaacttgcctctttgtagatgaagactggcagggctgaagaaatgatctcatgttgaaattaatgatgagcttcagggtgaggtgactcagttcgaatgctgttgaatgttggtgtcatgggacttttacaagaagtaaaactgggctataaaaatgatccccttcccctcactagagaagggaggttctattcctctctctgtctttccctctctctatatataccaaaggtcaaatctttggtattttgcattgagtctttaattattcattcactttgacctagtaattgcacttcag

SEQ ID NO: 7244 - protein, 56 aa, Homo sapiens
MVFIHSHSDEQWWRQCPELWQPPCSREAPVGMTVKRTTEMPAPGPTAAAPASRLRV

SEQ ID NO: 7245 - DNA, 4310 bp, Homo sapiens
gccgcgcagccgggcccgctcctcctccgctccgccagtgtccggccgcgggccggccttagtgactggggcggcgggccccggggccgcggcgtggggcgggcaggcggacgccggccgcgggctgctttcgtcggctcccaagctctcccggagcgagcagccgcccgcgagccgccgcggagcctcctcgcccgctcccgccggcgagcaagatgatgtgcgaggtgatgccgaccatcagcgaagcagaaggcccccctggaggaggtggaggccatggttccggctccccttcacagccagatgcagattcacattttgaacagttgatggtctccatgctagaagaaagggaccgccttcttgatacactgagagagactcaagaaacgctggccttaacccaggggaagttacacgaggttggtcatgaaagagattccttgcagagacagctcaacacggcacttccacaggagttcgcagcacttactaaagaactcaatgtatgcagggaacagctccttgaaagggaagaagaaattgctgaactgaaagcagaaaggaataacaccaggctgctgttagagcatttggaatgccttgtctccaggcatgagcggtctcttaggatgaccgtggtgaagagacaagcgcagtctccagcaggcgtgtccagcgaagtggaagtgctgaaagcactgaagtccttatttgaacaccacaaagctctggatgaaaaggtgagagagcgattacgagtagcacttgaaagatgtagtttgttagaagaggaattaggtgccacacacaaagagctaatgattcttaaagaacagaataatcagaaaaaaactctaacagatggagtgctggacataaaccatgaacaagaaaatacaccaagcacgagtggaaaggcaaatcttctgatggttctttaagccacgaggaagaccttgctaaagtaattgagctccaagaaatcataagtaagcagtcaagggaacagagccaaatgaaagaacgcctggcttccctttccagtcatgtgacagaactggaagaggatctggacacggctagaaaagatctcatcaaatctgaagaaatgaacacaaaattgcaacgagatgtccgtgaagccatggcccaaaaggaagatatggaagagagaatcactactcttgaaaaacgctacctcgctgcacagcgtgaagccacatctgtgcatgacctcaatgataaacttgaaaatgaaattgcaaataaagattctatgcatcgacagactgaagataaaaaccgccagttacaggagcgcttggaattggcagagcaaaagctgcaacagacactgaggaaggcagagacgctcccggaggtggaggcggagctggcccagagggtggcagcgctttccaaggctgaagagagacacggcaacattgaagaaaggttacgacagatggaagcacagttggaggagaagaatcaagaactgcagcgggcaaggcaaagagaaaaaatgaacgaagaacataataaacgtttatcagacactgttgacaagctgctttcagaatctaatgagaggcttcaacttcatcttaaagagagaatggctgctttggaagataagaactctcttttaagagaagttgaaagtgcaaaaaagcagttagaagaaacacaacacgataaggatcagcttgtcctaaacattgaagcactgagggctgaactagaccacatgagactaagaggtgcttcacttcatcatggccgaccccacttgggcagtgtcccagatttcaggttccccatggcagacggccacacagactcctacagcaccagtgcagtgctgcggcgcccacagaaaggccggctggcagccctgcgagatgagccttccaaggcaaggtacaaactcttaatgagcaggattgggaacgtgcccagcaagctagtgtcttggcaaatgtagcacaagcattcgagagtgatgctgacgtgtctgatggtgaagatgacagggacactctcctcagctcagttgacctgctatcgcccagcgggcaggccgacgcgcacacactagccatgatgcttcaggagcagctggacgccatcaacaaagagatcaggttgattcaggaagaaaaagaaaatacagagcagcgggcagaggagattgaaagtcgagttggcagtggaagtctagacaatcttggtcgttttagatcaatgagctccattcccccctaccctgcttcctcgcttgctagctcctcccctccgggcagtgggcgctccaccccacgaaggatccctcacagcccagctcgggaagtggacagactgggcgtcatgacccttttgccaccttccagagaagaggtacgagatgacaagacaaccataaagtgtgaaacctccccgccttcctccccgagagcccttcggttagaccggctgcacaaaggggcgctgcacaccgtcagccacgaggacatcagggacataaggaactccacaggctcccaggatggtcccgtgagcaaccccagcagtagcaacagtagccaggactcgctccacaaagccccaaagaagaaaggcattaagtcctccattggccgcttgtttggcaagaaagaaaagggccgacctggacaaactggcaaagaagcattaggacaagctggtgtttccgagacggataactcatctcaggatgccttgggacttagcaaattggggggacaggctgaaaaaaatcgtaaacttcaaaaaaagcatgaattgctggaggaagcccggagacaaggtttaccttttgcccaatgggacgggccaacggttgtggtctggctagagctctgggttgggatgccagcctggtatgtggctgcctgccgagcaaacgtgaaaagcggggccatcatgtcggccctgtccgacacagagatccagcgtgagattggcatcagcaaccccctgcacaggctgaagctgaggctggccatccaggagatcatgtcgctgaccagcccgtctgccccgcccacatctagaacgacactcgcctatggggacatgaaccacgagtggatcggcaacgagtggctccccagcctgggcctcccccagtaccgcagctacttcatggagtgccttgtagacgccaggatgctggaccacttgaccaagaaagaccttcgagggcagctgaaaatggtcgacagttttcacagaaacagtttccagtgtggaattatgtgcctgagaaggttaaattatgaccggaaagaactggaaagaaaaagagaagaaagtcagagtgaaataaaagacgtgcttgtttggagcaatgatcgagtgattcgctggatcctgtcaattggccttaaagaatatgcaaacaatcttatagagagtggtgttcacggagcacttctggccttagatgaaaccttcgacttcagtgcactggcactgctgttacagatcccgacgcagaacacacaggctcgtgctgtcttggaaagagaatttaacaaccttttggtcatggggactgatagaaggtttgatgaagatgatgataaaagctttaggagagcaccttcatggagaaaaaagtttagaccaaaggacattcgtggcttagctgctgggtcagcagagactctccctgcaaacttccgggtgacttcttctatgtcttccccctctatgcagccaaagaagatgcagatggacggtatgtgatgggtcacactaacctgtcacttgttgggagcatgagcagctttctgtctggaacattaataatgatctaaaacggcctatttaatatgttacaaggcacttgagtatggttgcatgtccaaatataaatgtttttaaattaactctaacatttgtttataaaagtttaaccataataatagaatttttaaaacacgcttgtctggttgaatcttagcatatttttccaactaataaagctcagtattcgtctgtgttctcagagagagactgaggcatacttgtaaatttgtgtctgtgacaggccgtgctagaaagctctttcaggaaatagtagtgtagtagtagcttccaaaccacataatttactgctctccacaccagagaaaataactgagtacatttttaagaacacacagtttccagcttgtgtgagctctgcctatgctttctgccctccctgctgctgctgttccgtgcagtcacatgtctacccattagagggcagggaagggaggaaggtgaacctc

SEQ ID NO: 7246 - protein, 556 aa, Homo sapiens
MMLQEQLDAINKEIRLIQEEKENTEQRAEEIESRVGSGSLDNLGRFRSMSSIPPYPASSLASSSPPGSGRSTPRRIPHSPAREVDRLGVMTLLPPSREEVRDDKTTIKCETSPPSSPRALRLDRLHKGALHTVSHEDIRDIRNSTGSQDGPVSNPSSSNSSQDSLHKAPKKKGIKSSIGRLFGKKEKGRPGQTGKEALGQAGVSETDNSSQDALGLSKLGGQAEKNRKLQKKHELLEEARRQGLPFAQWDGPTVVVWLELWVGMPAWYVAACRANVKSGAIMSALSDTEIQREIGISNPLHRLKLRLAIQEIMSLTSPSAPPTSRTTLAYGDMNHEWIGNEWLPSLGLPQYRSYFMECLVDARMLDHLTKKDLRGQLKMVDSFHRNSFQCGIMCLRRLNYDRKELERKREESQSEIKDVLVWSNDRVIRWILSIGLKEYANNLIESGVHGALLALDETFDFSALALLLQIPTQNTQARAVLEREFNNLLVMGTDRRFDEDDDKSFRRAPSWRKKFRPKDIRGLAAGSAETLPANFRVTSSMSSPSMQPKKMQMDGM

SEQ ID NO: 7247 - DNA, 5269 bp, Homo sapiens
gccgcgcagccgggcccgctcctcctccgctccgccagtgtccggccgcgggccggccttagtgactggggcggcgggccccggggccgcggcgtggggcgggcaggcggacgccggccgcgggctgctttcgtcggctcccaagctctcccggagcgagcagccgcccgcgagccgccgcggagcctcctcgcccgctcccgccggcgagcaagatgatgtgcgaggtgatgccgaccatcagcgaagcagaaggcccccctggaggaggtggaggccatggttccggctccccttcacagccagatgcagattcacattttgaacagttgatggtctccatgctagaagaaagggaccgccttcttgatacactgagagagactcaagaaacgctggccttaacccaggggaagttacacgaggttggtcatgaaagagattccttgcagagacagctcaacacggcacttccacaggagttcgcagcacttactaaagaactcaatgtatgcagggaacagctccttgaaagggaagaagaaattgctgaactgaaagcagaaaggaataacaccaggctgctgttagagcatttggaatgccttgtctccaggcatgagcggtctcttaggatgaccgtggtgaagagacaagcgcagtctccagcaggcgtgtccagcgaagtggaagtgctgaaagcactgaagtccttatttgaacaccacaaagctctggatgaaaaggtgagagagcgattacgagtagcacttgaaagatgtagtttgttagaagaggaattaggtgccacacacaaagagctaatgattcttaaagaacagaataatcagaaaaaaactctaacagatggagtgctggacataaaccatgaacaagaaaatacaccaagcacgagtggaaaggcaaatcttctgatggttctttaagccacgaggaagaccttgctaaagtaattgagctccaagaaatcataagtaagcagtcaagggaacagagccaaatgaaagaacgcctggcttccctttccagtcatgtgacagaactggaagaggatctggacacggctagaaaagatctcatcaaatctgaagaaatgaacacaaaattgcaacgagatgtccgtgaagccatggcccaaaaggaagatatggaagagagaatcactactcttgaaaaacgctacctcgctgcacagcgtgaagccacatctgtgcatgacctcaatgataaacttgaaaatgaaattgcaaataaagattctatgcatcgacagactgaagataaaaaccgccagttacaggagcgcttggaattggcagagcaaaagctgcaacagacactgaggaaggcagagacgctcccggaggtggaggcggagctggcccagagggtggcagcgctttccaaggctgaagagagacacggcaacattgaagaaaggttacgacagatggaagcacagttggaggagaagaatcaagaactgcagcgggcaaggcaaagagaaaaaatgaacgaagaacataataaacgtttatcagacactgttgacaagctgctttcagaatctaatgagaggcttcaacttcatcttaaagagagaatggctgctttggaagataagaactctcttttaagagaagttgaaagtgcaaaaaagcagttagaagaaacacaacacgataaggatcagcttgtcctaaacattgaagcactgagggctgaactagaccacatgagactaagaggtgcttcacttcatcatggccgaccccacttgggcagtgtcccagatttcaggttccccatggcagacggccacacagactcctacagcaccagtgcagtgctgcggcgcccacagaaaggccggctggcagccctgcgagatgagccttccaaggcaaggtacaaactcttaatgagcaggattgggaacgtgcccagcaagctagtgtcttggcaaatgtagcacaagcattcgagagtgatgctgacgtgtctgatggtgaagatgacagggacactctcctcagctcagttgacctgctatcgcccagcgggcaggccgacgcgcacacactagccatgatgcttcaggagcagctggacgccatcaacaaagagatcaggttgattcaggaagaaaaagaaaatacagagcagcgggcagaggagattgaaagtcgagttggcagtggaagtctagacaatcttggtcgttttagatcaatgagctccattcccccctaccctgcttcctcgcttgctagctcctcccctccgggcagtgggcgctccaccccacgaaggatccctcacagcccagctcgggaagtggacagactgggcgtcatgacccttcctagtgatttaaggaaacatcgtagaaagttgccaccttccagagaagaggtacgagatgacaagacaaccataaagtgtgaaacctccccgccttcctccccgagagcccttcggttagaccggctgcacaaaggggcgctgcacaccgtcagccacgaggacatcagggacataaggaactccacaggctcccaggatggtcccgtgagcaaccccagcagtagcaacagtagccaggactcgctccacaaagccccaaagaagaaaggcattaagtcctccattggccgcttgtttggcaagaaagaaaagggccgacctggacaaactggcaaagaagcattaggacaagctggtgtttccgagacggataactcatctcaggatgccttgggacttagcaaattggggggacaggctgaaaaaaatcgtaaacttcaaaaaaagcatgaattgctggaggaagcccggagacaaggtttaccttttgcccaatgggacgggccaacggttgtggtctggctagagctctgggttgggatgccagcctggtatgtggctgcctgccgagcaaacgtgaaaagcggggccatcatgtcggccctgtccgacacagagatccagcgtgagattggcatcagcaaccccctgcacaggctgaagctgaggctggccatccaggagatcatgtcgctgaccagcccgtctgccccgcccacatctagaacgacactcgcctatggggacatgaaccacgagtggatcggcaacgagtggctccccagcctgggcctcccccagtaccgcagctacttcatggagtgccttgtagacgccaggatgctggaccacttgaccaagaaagaccttcgagggcagctgaaaatggtcgacagttttcacagaaacagtttccagtgtggaattatgtgcctgagaaggttaaattatgaccggaaagaactggaaagaaaaagagaagaaagtcagagtgaaataaaagacgtgcttgtttggagcaatgatcgagtgattcgctggatcctgtcaattggccttaaagaatatgcaaacaatcttatagagagtggtgttcacggagcacttctggccttagatgaaaccttcgacttcagtgcactggcactgctgttacagatcccgacgcagaacacacaggctcgtgctgtcttggaaagagaatttaacaaccttttggtcatggggactgatagaaggtttgatgaagatgatgataaaagctttaggagagcaccttcatggagaaaaaagtttagaccaaaggacattcgtggcttagctgctgggtcagcagagactctccctgcaaacttccgggtgacttcttctatgtcttccccctctatgcagccaaagaagatgcagatggacggcaatgtatcaggaacacagaggttggattctgctacagtcaggacttactcctgctaaagtctcctgttgtttacccacactacttctacagatgattatgcagcatttgaatccaacaaagactacattttggaatccagtggaatctttaatcttgttaatacttgttatatggaccctaagatattttattacagagtttttaattagtgaaaaattcatgaataccatagagaaaatattttagaatttaatgtttcttatatttatgtaaacttatgactcttcatttatatagttacttactttttcatgtatatccaggctataaatatcctttcaaatcatgttcttatacctaattttagtctttcaaatgaatgtactgtaatgcttgtatgtataaatcctatgaatagagggcttttgtaaattatgcatttattgtaattatcattaattttttaatgataaaccatgacaaaggattttacgtttataaaattatgacagaagccatgtgcattatcctttacggacgcagcctagctctacagcaatcatcctgaaataagcatacctaatttcaagcaattgttgtattttcatgactgaccttaactgtactttttctagcaagagatgctttattctgcagcatgaacagatttaaaatggctggtgttaaatatcagctcctaataagatgtggactgaaaacactatcacaacactatgagaagcccctagcactggttaacgctttcctagcctagtctctggatttggggagcttgtcttcagtggctgagactgtgagctgggagcagttctctcagctggagagactcgggatggggtaacctggggaccagtctagcccctgcaccctcttccctgcctctgctccttgggagcgggtggagagacacccatgtggctccccttagggccagcaccaagcaccacgctctcatcctgcaagtcggcgcacacagtggatgaaggcaggagacccagaaagcagtgcagtgcagctctaataaaggccttatttttcttatgtaaatcatctttttacatttgtttgtaaacatgtttaaagaacgaacctagtgggacatttttagactttgatgctctagccattttggattgtgtaagttgcagatgtggcttttactttttaaatggcatattaacaagccagcaaagtgtgtcagaccatggcgtggtatttattgtgcagcagatccagagacagaggcagcctgtcttttcagttggtttctgcttttaatttacttgtacaattcattgttactgttctgtttttctattaatcttttgtcaacttcctgattatgtaacaaagtatgtacagtctacttttgaactatttttatcacagtattatttattgctttctttcaataaagtactgaagcattttccactgccaatg

SEQ ID NO: 7248 - protein, 583 aa, Homo sapiens
MMLQEQLDAINKEIRLIQEEKENTEQRAEEIESRVGSGSLDNLGRFRSMSSIPPYPASSLASSSPPGSGRSTPRRIPHSPAREVDRLGVMTLPSDLRKHRRKLPPSREEVRDDKTTIKCETSPPSSPRALRLDRLHKGALHTVSHEDIRDIRNSTGSQDGPVSNPSSSNSSQDSLHKAPKKKGIKSSIGRLFGKKEKGRPGQTGKEALGQAGVSETDNSSQDALGLSKLGGQAEKNRKLQKKHELLEEARRQGLPFAQWDGPTVVVWLELWVGMPAWYVAACRANVKSGAIMSALSDTEIQREIGISNPLHRLKLRLAIQEIMSLTSPSAPPTSRTTLAYGDMNHEWIGNEWLPSLGLPQYRSYFMECLVDARMLDHLTKKDLRGQLKMVDSFHRNSFQCGIMCLRRLNYDRKELERKREESQSEIKDVLVWSNDRVIRWILSIGLKEYANNLIESGVHGALLALDETFDFSALALLLQIPTQNTQARAVLEREFNNLLVMGTDRRFDEDDDKSFRRAPSWRKKFRPKDIRGLAAGSAETLPANFRVTSSMSSPSMQPKKMQMDGNVSGTQRLDSATVRTYSC

SEQ ID NO: 7249 - DNA, 5239 bp, Homo sapiens
gccgcgcagccgggcccgctcctcctccgctccgccagtgtccggccgcgggccggccttagtgactggggcggcgggccccggggccgcggcgtggggcgggcaggcggacgccggccgcgggctgctttcgtcggctcccaagctctcccggagcgagcagccgcccgcgagccgccgcggagcctcctcgcccgctcccgccggcgagcaagatgatgtgcgaggtgatgccgaccatcagcgaagcagaaggcccccctggaggaggtggaggccatggttccggctccccttcacagccagatgcagattcacattttgaacagttgatggtctccatgctagaagaaagggaccgccttcttgatacactgagagagactcaagaaacgctggccttaacccaggggaagttacacgaggttggtcatgaaagagattccttgcagagacagctcaacacggcacttccacaggagttcgcagcacttactaaagaactcaatgtatgcagggaacagctccttgaaagggaagaagaaattgctgaactgaaagcagaaaggaataacaccaggctgctgttagagcatttggaatgccttgtctccaggcatgagcggtctcttaggatgaccgtggtgaagagacaagcgcagtctccagcaggcgtgtccagcgaagtggaagtgctgaaagcactgaagtccttatttgaacaccacaaagctctggatgaaaaggtgagagagcgattacgagtagcacttgaaagatgtagtttgttagaagaggaattaggtgccacacacaaagagctaatgattcttaaagaacagaataatcagaaaaaaactctaacagatggagtgctggacataaaccatgaacaagaaaatacaccaagcacgagtggaaaggcaaatcttctgatggttctttaagccacgaggaagaccttgctaaagtaattgagctccaagaaatcataagtaagcagtcaagggaacagagccaaatgaaagaacgcctggcttccctttccagtcatgtgacagaactggaagaggatctggacacggctagaaaagatctcatcaaatctgaagaaatgaacacaaaattgcaacgagatgtccgtgaagccatggcccaaaaggaagatatggaagagagaatcactactcttgaaaaacgctacctcgctgcacagcgtgaagccacatctgtgcatgacctcaatgataaacttgaaaatgaaattgcaaataaagattctatgcatcgacagactgaagataaaaaccgccagttacaggagcgcttggaattggcagagcaaaagctgcaacagacactgaggaaggcagagacgctcccggaggtggaggcggagctggcccagagggtggcagcgctttccaaggctgaagagagacacggcaacattgaagaaaggttacgacagatggaagcacagttggaggagaagaatcaagaactgcagcgggcaaggcaaagagaaaaaatgaacgaagaacataataaacgtttatcagacactgttgacaagctgctttcagaatctaatgagaggcttcaacttcatcttaaagagagaatggctgctttggaagataagaactctcttttaagagaagttgaaagtgcaaaaaagcagttagaagaaacacaacacgataaggatcagcttgtcctaaacattgaagcactgagggctgaactagaccacatgagactaagaggtgcttcacttcatcatggccgaccccacttgggcagtgtcccagatttcaggttccccatggcagacggccacacagactcctacagcaccagtgcagtgctgcggcgcccacagaaaggccggctggcagccctgcgagatgagccttccaaggcaaggtacaaactcttaatgagcaggattgggaacgtgcccagcaagctagtgtcttggcaaatgtagcacaagcattcgagagtgatgctgacgtgtctgatggtgaagatgacagggacactctcctcagctcagttgacctgctatcgcccagcgggcaggccgacgcgcacacactagccatgatgcttcaggagcagctggacgccatcaacaaagagatcaggttgattcaggaagaaaaagaaaatacagagcagcgggcagaggagattgaaagtcgagttggcagtggaagtctagacaatcttggtcgttttagatcaatgagctccattcccccctaccctgcttcctcgcttgctagctcctcccctccgggcagtgggcgctccaccccacgaaggatccctcacagcccagctcgggaagtggacagactgggcgtcatgacccttttgccaccttccagagaagaggtacgagatgacaagacaaccataaagtgtgaaacctccccgccttcctccccgagagcccttcggttagaccggctgcacaaaggggcgctgcacaccgtcagccacgaggacatcagggacataaggaactccacaggctcccaggatggtcccgtgagcaaccccagcagtagcaacagtagccaggactcgctccacaaagccccaaagaagaaaggcattaagtcctccattggccgcttgtttggcaagaaagaaaagggccgacctggacaaactggcaaagaagcattaggacaagctggtgtttccgagacggataactcatctcaggatgccttgggacttagcaaattggggggacaggctgaaaaaaatcgtaaacttcaaaaaaagcatgaattgctggaggaagcccggagacaaggtttaccttttgcccaatgggacgggccaacggttgtggtctggctagagctctgggttgggatgccagcctggtatgtggctgcctgccgagcaaacgtgaaaagcggggccatcatgtcggccctgtccgacacagagatccagcgtgagattggcatcagcaaccccctgcacaggctgaagctgaggctggccatccaggagatcatgtcgctgaccagcccgtctgccccgcccacatctagaacgacactcgcctatggggacatgaaccacgagtggatcggcaacgagtggctccccagcctgggcctcccccagtaccgcagctacttcatggagtgccttgtagacgccaggatgctggaccacttgaccaagaaagaccttcgagggcagctgaaaatggtcgacagttttcacagaaacagtttccagtgtggaattatgtgcctgagaaggttaaattatgaccggaaagaactggaaagaaaaagagaagaaagtcagagtgaaataaaagacgtgcttgtttggagcaatgatcgagtgattcgctggatcctgtcaattggccttaaagaatatgcaaacaatcttatagagagtggtgttcacggagcacttctggccttagatgaaaccttcgacttcagtgcactggcactgctgttacagatcccgacgcagaacacacaggctcgtgctgtcttggaaagagaatttaacaaccttttggtcatggggactgatagaaggtttgatgaagatgatgataaaagctttaggagagcaccttcatggagaaaaaagtttagaccaaaggacattcgtggcttagctgctgggtcagcagagactctccctgcaaacttccgggtgacttcttctatgtcttccccctctatgcagccaaagaagatgcagatggacggcaatgtatcaggaacacagaggttggattctgctacagtcaggacttactcctgctaaagtctcctgttgtttacccacactacttctacagatgattatgcagcatttgaatccaacaaagactacattttggaatccagtggaatctttaatcttgttaatacttgttatatggaccctaagatattttattacagagtttttaattagtgaaaaattcatgaataccatagagaaaatattttagaatttaatgtttcttatatttatgtaaacttatgactcttcatttatatagttacttactttttcatgtatatccaggctataaatatcctttcaaatcatgttcttatacctaattttagtctttcaaatgaatgtactgtaatgcttgtatgtataaatcctatgaatagagggcttttgtaaattatgcatttattgtaattatcattaattttttaatgataaaccatgacaaaggattttacgtttataaaattatgacagaagccatgtgcattatcctttacggacgcagcctagctctacagcaatcatcctgaaataagcatacctaatttcaagcaattgttgtattttcatgactgaccttaactgtactttttctagcaagagatgctttattctgcagcatgaacagatttaaaatggctggtgttaaatatcagctcctaataagatgtggactgaaaacactatcacaacactatgagaagcccctagcactggttaacgctttcctagcctagtctctggatttggggagcttgtcttcagtggctgagactgtgagctgggagcagttctctcagctggagagactcgggatggggtaacctggggaccagtctagcccctgcaccctcttccctgcctctgctccttgggagcgggtggagagacacccatgtggctccccttagggccagcaccaagcaccacgctctcatcctgcaagtcggcgcacacagtggatgaaggcaggagacccagaaagcagtgcagtgcagctctaataaaggccttatttttcttatgtaaatcatctttttacatttgtttgtaaacatgtttaaagaacgaacctagtgggacatttttagactttgatgctctagccattttggattgtgtaagttgcagatgtggcttttactttttaaatggcatattaacaagccagcaaagtgtgtcagaccatggcgtggtatttattgtgcagcagatccagagacagaggcagcctgtcttttcagttggtttctgcttttaatttacttgtacaattcattgttactgttctgtttttctattaatcttttgtcaacttcctgattatgtaacaaagtatgtacagtctacttttgaactatttttatcacagtattatttattgctttctttcaataaagtactgaagcattttccactgccaatg

SEQ ID NO: 7250 - protein, 573 aa, Homo sapiens
MMLQEQLDAINKEIRLIQEEKENTEQRAEEIESRVGSGSLDNLGRFRSMSSIPPYPASSLASSSPPGSGRSTPRRIPHSPAREVDRLGVMTLLPPSREEVRDDKTTIKCETSPPSSPRALRLDRLHKGALHTVSHEDIRDIRNSTGSQDGPVSNPSSSNSSQDSLHKAPKKKGIKSSIGRLFGKKEKGRPGQTGKEALGQAGVSETDNSSQDALGLSKLGGQAEKNRKLQKKHELLEEARRQGLPFAQWDGPTVVVWLELWVGMPAWYVAACRANVKSGAIMSALSDTEIQREIGISNPLHRLKLRLAIQEIMSLTSPSAPPTSRTTLAYGDMNHEWIGNEWLPSLGLPQYRSYFMECLVDARMLDHLTKKDLRGQLKMVDSFHRNSFQCGIMCLRRLNYDRKELERKREESQSEIKDVLVWSNDRVIRWILSIGLKEYANNLIESGVHGALLALDETFDFSALALLLQIPTQNTQARAVLEREFNNLLVMGTDRRFDEDDDKSFRRAPSWRKKFRPKDIRGLAAGSAETLPANFRVTSSMSSPSMQPKKMQMDGNVSGTQRLDSATVRTYSC

SEQ ID NO: 7251 - DNA, 5408 bp, Homo sapiens
gccgcgcagccgggcccgctcctcctccgctccgccagtgtccggccgcgggccggccttagtgactggggcggcgggccccggggccgcggcgtggggcgggcaggcggacgccggccgcgggctgctttcgtcggctcccaagctctcccggagcgagcagccgcccgcgagccgccgcggagcctcctcgcccgctcccgccggcgagcaagatgatgtgcgaggtgatgccgaccatcagcgaagcagaaggcccccctggaggaggtggaggccatggttccggctccccttcacagccagatgcagattcacattttgaacagttgatggtctccatgctagaagaaagggaccgccttcttgatacactgagagagactcaagaaacgctggccttaacccaggggaagttacacgaggttggtcatgaaagagattccttgcagagacagctcaacacggcacttccacaggagttcgcagcacttactaaagaactcaatgtatgcagggaacagctccttgaaagggaagaagaaattgctgaactgaaagcagaaaggaataacaccaggctgctgttagagcatttggaatgccttgtctccaggcatgagcggtctcttaggatgaccgtggtgaagagacaagcgcagtctccagcaggcgtgtccagcgaagtggaagtgctgaaagcactgaagtccttatttgaacaccacaaagctctggatgaaaaggtgagagagcgattacgagtagcacttgaaagatgtagtttgttagaagaggaattaggtgccacacacaaagagctaatgattcttaaagaacagaataatcagaaaaaaactctaacagatggagtgctggacataaaccatgaacaagaaaatacaccaagcacgagtggaaaggcaaatcttctgatggttctttaagccacgaggaagaccttgctaaagtaattgagctccaagaaatcataagtaagcagtcaagggaacagagccaaatgaaagaacgcctggcttccctttccagtcatgtgacagaactggaagaggatctggacacggctagaaaagatctcatcaaatctgaagaaatgaacacaaaattgcaacgagatgtccgtgaagccatggcccaaaaggaagatatggaagagagaatcactactcttgaaaaacgctacctcgctgcacagcgtgaagccacatctgtgcatgacctcaatgataaacttgaaaatgaaattgcaaataaagattctatgcatcgacagactgaagataaaaaccgccagttacaggagcgcttggaattggcagagcaaaagctgcaacagacactgaggaaggcagagacgctcccggaggtggaggcggagctggcccagagggtggcagcgctttccaaggctgaagagagacacggcaacattgaagaaaggttacgacagatggaagcacagttggaggagaagaatcaagaactgcagcgggcaaggcaaagagaaaaaatgaacgaagaacataataaacgtttatcagacactgttgacaagctgctttcagaatctaatgagaggcttcaacttcatcttaaagagagaatggctgctttggaagataagaactctcttttaagagaagttgaaagtgcaaaaaagcagttagaagaaacacaacacgataaggatcagcttgtcctaaacattgaagcactgagggctgaactagaccacatgagactaagaggtgcttcacttcatcatggccgaccccacttgggcagtgtcccagatttcaggttccccatggcagacggccacacagactcctacagcaccagtgcagtgctgcggcgcccacagaaaggccggctggcagccctgcgagatgagccttccaaggcaaggtacaaactcttaatgagcaggattgggaacgtgcccagcaagctagtgtcttggcaaatgtagcacaagcattcgagagtgatgctgacgtgtctgatggtgaagatgacagggacactctcctcagctcagttgacctgctatcgcccagcgggcaggccgacgcgcacacactagccatgatgcttcaggagcagctggacgccatcaacaaagagatcaggttgattcaggaagaaaaagaaaatacagagcagcgggcagaggagattgaaagtcgagttggcagtggaagtctagacaatcttggtcgttttagatcaatgagctccattcccccctaccctgcttcctcgcttgctagctcctcccctccgggcagtgggcgctccaccccacgaaggatccctcacagcccagctcgggaagtggacagactgggcgtcatgacccttttgccaccttccagagaagaggtacgagatgacaagacaaccataaagtgtgaaacctccccgccttcctccccgagagcccttcggttagaccggctgcacaaaggggcgctgcacaccgtcagccacgaggacatcagggacataaggaactccacaggctcccaggatggtcccgtgagcaaccccagcagtagcaacagtagccaggactcgctccacaaagccccaaagaagaaaggcattaagtcctccattggccgcttgtttggcaagaaagaaaagggccgacctggacaaactggcaaagaagcattaggacaagctggtgtttccgagacggataactcatctcaggatgccttgggacttagcaaattggggggacaggctgaaaaaaatcgtaaacttcaaaaaaagcatgaattgctggaggaagcccggagacaaggtttaccttttgcccaatgggacgggccaacggttgtggtctggctagagctctgggttgggatgccagcctggtatgtggctgcctgccgagcaaacgtgaaaagcggggccatcatgtcggccctgtccgacacagagatccagcgtgagattggcatcagcaaccccctgcacaggctgaagctgaggctggccatccaggagatcatgtcgctgaccagcccgtctgccccgcccacatctagaacgacactcgcctatggggacatgaaccacgagtggatcggcaacgagtggctccccagcctgggcctcccccagtaccgcagctacttcatggagtgccttgtagacgccaggatgctggaccacttgaccaagaaagaccttcgagggcagctgaaaatggtcgacagttttcacagaaacagtttccagtgtggaattatgtgcctgagaaggttaaattatgaccggaaagaactggaaagaaaaagagaagaaagtcagagtgaaataaaagacgtgcttgtttggagcaatgatcgagtgattcgctggatcctgtcaattggccttaaagaatatgcaaacaatcttatagagagtggtgttcacggagcacttctggccttagatgaaaccttcgacttcagtgcactggcactgctgttacagatcccgacgcagaacacacaggctcgtgctgtcttggaaagagaatttaacaaccttttggtcatggggactgatagaaggtttgatgaagatgatgataaaagctttaggagagcaccttcatggagaaaaaagtttagaccaaaggacattcgtggcttagctgctgggtcagcagagactctccctgcaaacttccgggtgacttcttctatgtcttccccctctatgcagccaaagaagatgcagatggacggcaatgtatcaggaacacagaggttggattctgctacagtcaggacttactcctgctaaagtctcctgttgtttacccacactacttctacagatgattatgcagcatttgaatccaacaaagactacattttggaatccagtggaatctttaatcttgttaatacttgttatatggaccctaagatattttattacagagtttttaattagtgaaaaattcatgaataccatagagaaaatattttagaatttaatgtttcttatatttatgtaaacttatgactcttcatttatatagttacttactttttcatgtatatccaggctataaatatcctttcaaatcatgttcttatacctaattttagtctttcaaatgaatgtactgtaatgcttgtatgtataaatcctatgaatagagggcttttgtaaattatgcatttattgtaattatcattaattttttaatgataaaccatgacaaaggattttacgtttataaaattatgacagaagccatgtgcattatcctttacggacgcagcctagctctacagcaatcatcctgaaataagcatacctaatttcaagcaattgttgtattttcatgactgaccttaactgtactttttctagcaagagatgctttattctgcagcatgaacagatttaaaatggctggtgttaaatatcagctcctaataagatgtggactgaaaacactatcacaacactatgagaagcccctagcactggttaacgctttcctagcctagtctctggatttggggagcttgtcttcagtggctgagactgtgagctgggagcagttctctcagctggagagactcgggatggggtaacctggggaccagtctagcccctgcaccctcttccctgcctctgctccttgggagcgggtggagagacacccatgtggctccccttagggccagcaccaagcaccacgctctcatcctgcaagtcggcgcacacagtggatgaaggcaggagacccagaaagcagtgcagtgcagctctaataaaggccttatttttcttatgtaaatcatctttttacatttgtttgtaaacatgtttaaagaacgaacctagtgggacatttttagactttgatgctctagccattttggattgtgtaagttgcagatgtggcttttactttttaaatggcatattaacaagccagcaaagtgtgtcagaccatggcgtggtatttattgtgcagcagatccagagacagaggcagcctgtcttttcagttggtttctgcttttaatttacttgtacaattcattgttactgttctgtttttctattaatcttttgtcaacttcctgattatgtaacaaagtatgtacagtctacttttgaactatttttatcacagtattatttattgctttctttcaataaagtactgaagcattttccactgccaatgaagaatactgagaataagctctaactgttttggaaggcagtgtcaccatatggaaattgtattacagaagtcaattgacagaataaagcagccaggagatgaagtgcaggttcagggcgtcatcctgcccgctgctctggaggtcccgagcctgcatcactgcaggaga

SEQ ID NO: 7252 - protein, 573 aa, Homo sapiens; identical to SEQ ID NO: 7250

SEQ ID NO: 7253 - DNA, 5438 bp, Homo sapiens
gccgcgcagccgggcccgctcctcctccgctccgccagtgtccggccgcgggccggccttagtgactggggcggcgggccccggggccgcggcgtggggcgggcaggcggacgccggccgcgggctgctttcgtcggctcccaagctctcccggagcgagcagccgcccgcgagccgccgcggagcctcctcgcccgctcccgccggcgagcaagatgatgtgcgaggtgatgccgaccatcagcgaagcagaaggcccccctggaggaggtggaggccatggttccggctccccttcacagccagatgcagattcacattttgaacagttgatggtctccatgctagaagaaagggaccgccttcttgatacactgagagagactcaagaaacgctggccttaacccaggggaagttacacgaggttggtcatgaaagagattccttgcagagacagctcaacacggcacttccacaggagttcgcagcacttactaaagaactcaatgtatgcagggaacagctccttgaaagggaagaagaaattgctgaactgaaagcagaaaggaataacaccaggctgctgttagagcatttggaatgccttgtctccaggcatgagcggtctcttaggatgaccgtggtgaagagacaagcgcagtctccagcaggcgtgtccagcgaagtggaagtgctgaaagcactgaagtccttatttgaacaccacaaagctctggatgaaaaggtgagagagcgattacgagtagcacttgaaagatgtagtttgttagaagaggaattaggtgccacacacaaagagctaatgattcttaaagaacagaataatcagaaaaaaactctaacagatggagtgctggacataaaccatgaacaagaaaatacaccaagcacgagtggaaaggcaaatcttctgatggttctttaagccacgaggaagaccttgctaaagtaattgagctccaagaaatcataagtaagcagtcaagggaacagagccaaatgaaagaacgcctggcttccctttccagtcatgtgacagaactggaagaggatctggacacggctagaaaagatctcatcaaatctgaagaaatgaacacaaaattgcaacgagatgtccgtgaagccatggcccaaaaggaagatatggaagagagaatcactactcttgaaaaacgctacctcgctgcacagcgtgaagccacatctgtgcatgacctcaatgataaacttgaaaatgaaattgcaaataaagattctatgcatcgacagactgaagataaaaaccgccagttacaggagcgcttggaattggcagagcaaaagctgcaacagacactgaggaaggcagagacgctcccggaggtggaggcggagctggcccagagggtggcagcgctttccaaggctgaagagagacacggcaacattgaagaaaggttacgacagatggaagcacagttggaggagaagaatcaagaactgcagcgggcaaggcaaagagaaaaaatgaacgaagaacataataaacgtttatcagacactgttgacaagctgctttcagaatctaatgagaggcttcaacttcatcttaaagagagaatggctgctttggaagataagaactctcttttaagagaagttgaaagtgcaaaaaagcagttagaagaaacacaacacgataaggatcagcttgtcctaaacattgaagcactgagggctgaactagaccacatgagactaagaggtgcttcacttcatcatggccgaccccacttgggcagtgtcccagatttcaggttccccatggcagacggccacacagactcctacagcaccagtgcagtgctgcggcgcccacagaaaggccggctggcagccctgcgagatgagccttccaaggcaaggtacaaactcttaatgagcaggattgggaacgtgcccagcaagctagtgtcttggcaaatgtagcacaagcattcgagagtgatgctgacgtgtctgatggtgaagatgacagggacactctcctcagctcagttgacctgctatcgcccagcgggcaggccgacgcgcacacactagccatgatgcttcaggagcagctggacgccatcaacaaagagatcaggttgattcaggaagaaaaagaaaatacagagcagcgggcagaggagattgaaagtcgagttggcagtggaagtctagacaatcttggtcgttttagatcaatgagctccattcccccctaccctgcttcctcgcttgctagctcctcccctccgggcagtgggcgctccaccccacgaaggatccctcacagcccagctcgggaagtggacagactgggcgtcatgacccttcctagtgatttaaggaaacatcgtagaaagttgccaccttccagagaagaggtacgagatgacaagacaaccataaagtgtgaaacctccccgccttcctccccgagagcccttcggttagaccggctgcacaaaggggcgctgcacaccgtcagccacgaggacatcagggacataaggaactccacaggctcccaggatggtcccgtgagcaaccccagcagtagcaacagtagccaggactcgctccacaaagccccaaagaagaaaggcattaagtcctccattggccgcttgtttggcaagaaagaaaagggccgacctggacaaactggcaaagaagcattaggacaagctggtgtttccgagacggataactcatctcaggatgccttgggacttagcaaattggggggacaggctgaaaaaaatcgtaaacttcaaaaaaagcatgaattgctggaggaagcccggagacaaggtttaccttttgcccaatgggacgggccaacggttgtggtctggctagagctctgggttgggatgccagcctggtatgtggctgcctgccgagcaaacgtgaaaagcggggccatcatgtcggccctgtccgacacagagatccagcgtgagattggcatcagcaaccccctgcacaggctgaagctgaggctggccatccaggagatcatgtcgctgaccagcccgtctgccccgcccacatctagaacgacactcgcctatggggacatgaaccacgagtggatcggcaacgagtggctccccagcctgggcctcccccagtaccgcagctacttcatggagtgccttgtagacgccaggatgctggaccacttgaccaagaaagaccttcgagggcagctgaaaatggtcgacagttttcacagaaacagtttccagtgtggaattatgtgcctgagaaggttaaattatgaccggaaagaactggaaagaaaaagagaagaaagtcagagtgaaataaaagacgtgcttgtttggagcaatgatcgagtgattcgctggatcctgtcaattggccttaaagaatatgcaaacaatcttatagagagtggtgttcacggagcacttctggccttagatgaaaccttcgacttcagtgcactggcactgctgttacagatcccgacgcagaacacacaggctcgtgctgtcttggaaagagaatttaacaaccttttggtcatggggactgatagaaggtttgatgaagatgatgataaaagctttaggagagcaccttcatggagaaaaaagtttagaccaaaggacattcgtggcttagctgctgggtcagcagagactctccctgcaaacttccgggtgacttcttctatgtcttccccctctatgcagccaaagaagatgcagatggacggcaatgtatcaggaacacagaggttggattctgctacagtcaggacttactcctgctaaagtctcctgttgtttacccacactacttctacagatgattatgcagcatttgaatccaacaaagactacattttggaatccagtggaatctttaatcttgttaatacttgttatatggaccctaagatattttattacagagtttttaattagtgaaaaattcatgaataccatagagaaaatattttagaatttaatgtttcttatatttatgtaaacttatgactcttcatttatatagttacttactttttcatgtatatccaggctataaatatcctttcaaatcatgttcttatacctaattttagtctttcaaatgaatgtactgtaatgcttgtatgtataaatcctatgaatagagggcttttgtaaattatgcatttattgtaattatcattaattttttaatgataaaccatgacaaaggattttacgtttataaaattatgacagaagccatgtgcattatcctttacggacgcagcctagctctacagcaatcatcctgaaataagcatacctaatttcaagcaattgttgtattttcatgactgaccttaactgtactttttctagcaagagatgctttattctgcagcatgaacagatttaaaatggctggtgttaaatatcagctcctaataagatgtggactgaaaacactatcacaacactatgagaagcccctagcactggttaacgctttcctagcctagtctctggatttggggagcttgtcttcagtggctgagactgtgagctgggagcagttctctcagctggagagactcgggatggggtaacctggggaccagtctagcccctgcaccctcttccctgcctctgctccttgggagcgggtggagagacacccatgtggctccccttagggccagcaccaagcaccacgctctcatcctgcaagtcggcgcacacagtggatgaaggcaggagacccagaaagcagtgcagtgcagctctaataaaggccttatttttcttatgtaaatcatctttttacatttgtttgtaaacatgtttaaagaacgaacctagtgggacatttttagactttgatgctctagccattttggattgtgtaagttgcagatgtggcttttactttttaaatggcatattaacaagccagcaaagtgtgtcagaccatggcgtggtatttattgtgcagcagatccagagacagaggcagcctgtcttttcagttggtttctgcttttaatttacttgtacaattcattgttactgttctgtttttctattaatcttttgtcaacttcctgattatgtaacaaagtatgtacagtctacttttgaactatttttatcacagtattatttattgctttctttcaataaagtactgaagcattttccactgccaatgaagaatactgagaataagctctaactgttttggaaggcagtgtcaccatatggaaattgtattacagaagtcaattgacagaataaagcagccaggagatgaagtgcaggttcagggcgtcatcctgcccgctgctctggaggtcccgagcctgcatcactgcaggaga

SEQ ID NO: 7254 - protein, 583 aa, Homo sapiens; identical to SEQ ID NO: 7248

SEQ ID NO: 7255 - DNA, 575 bp, Homo sapiens
aaacgacccgggacctgggagggagcaaagacgtttcccgccggcgggagctgtggctgtgattgagagaggggttagaggcgggtcccagcgctgccgcaccatggcggaccagctttatctggaaaatatagacgagttcgtcacggaccaaaacaagatcgtgacatacaaatggctgagctatacactaggggttcatgttaaccaggccaaacaacttctcatggatgaactcttttttttttttttttttttttttgagatggggtttcactatgttgcccaggctggatttgaactcaaggatcctcccgcctcagcctaccaactagctctacaggtgtacatcaccacacctggcaaaaactttttattatgtcttattttaaccatcctagtggatgtgaagtggtatctcataaattatgttgattggcattttcctaatgactaatgttgctgaatatcttttcatatgctgcttggccatatctttggagaaatagatattcaaaattatgcccatttttgtcattgggtatttttggttgttgttgagttttaagagttct

SEQ ID NO: 7256 - protein, 117 aa, Homo sapiens
MADQLYLENIDEFVTDQNKIVTYKWLSYTLGVHVNQAKQLLMDELFFFFFFFFEMGFHYVAQAGFELKDPPASAYQLALQVYITTPGKNFLLCLILTILVDVKWYLINYVDWHFPND

SEQ ID NO: 7257 - DNA, 1243 bp, Homo sapiens
gggagcaaagacgtttcccgccggcgggagctgtggctgtgattgagagaggggttagaggcgggtcccagcgctgccgcaccatggcggaccagctttatctggaaaatatagacgagttcgtcacggaccaaaacaagatcgtgacatacaaatggctgagctatacactaggggttcatgttaaccaggccaaacagatgctgtatgattatgttgaaaggaaacgaaaagaaaattcaggagcccaactgcatgttacctacttggtgtctggcagtctcattcagaatggacattcctgccacaaggttgcagtagtgagagaagataaattggaagcagtgaagtccaagctagctgtgactgccagcatccatgtgtacagcatccagaaagccatgctaaaggacagtgggcctctgttcaatactgactatgacatccttaaaagcaacttgcagaactgcagcaaatttagtgctatacaatgtgcagctgccgtccctagagctcctgctgaatcctcttcgtcttccaaaaagtttgagcagtcacatcttcacatgtcaagtgagacacaagccaacaatgagctgaccaccaatggtcatggcccacctgcatccaagcaggtttcccagcagcccaaaggaattatgggaatgtttgcctccaaagctgctgctaaaacccaagaaaccaacaaggaaacgaaaacagaggctaaagaagtaacaaatgcatctgcagcaggcaacaaggcaccagggaaagggaatatgatgagcaacttttttggaaaagctgctatgaataaatttaaagtcaatttggactcagaacaagcagtgaaagaagaaaaaatagtggagcagcctacagtgtctgtcacggaaccaaagctggcaactcctgcaggcctgaaaaaatccagcaaaaaagcagagcctgttaaggtgctgcagaaggaaaaaaaaagggggaagcgagtagcattatctgatgatgagacaaaggaaactgaaaacatgaggaaaaagaggagaagaatcaaacttcctgaatctgatagcagtgaagatgaagtctttccagactctcctggggcttatgaagctgagtcaccatccccacctcctcctccgtctccacctcttgaaccagtgccaaagactgagcctgaacctccttctgtcaagagctcaagtggagaaaacaaaagaaaacgaaaacgcgtact

SEQ ID NO: 7258 - protein, 385 aa, Homo sapiens
MADQLYLENIDEFVTDQNKIVTYKWLSYTLGVHVNQAKQMLYDYVERKRKENSGAQLHVTYLVSGSLIQNGHSCHKVAVVREDKLEAVKSKLAVTASIHVYSIQKAMLKDSGPLFNTDYDILKSNLQNCSKFSAIQCAAAVPRAPAESSSSSKKFEQSHLHMSSETQANNELTTNGHGPPASKQVSQQPKGIMGMFASKAAAKTQETNKETKTEAKEVTNASAAGNKAPGKGNMMSNFFGKAAMNKFKVNLDSEQAVKEEKIVEQPTVSVTEPKLATPAGLKKSSKKAEPVKVLQKEKKRGKRVALSDDETKETENMRKKRRRIKLPESDSSEDEVFPDSPGAYEAESPSPPPPPSPPLEPVPKTEPEPPSVKSSSGENKRKRKR

SEQ ID NO: 7259 - DNA, 3455 bp, Homo sapiens
gggagcaaagacgtttcccgccggcgggagctgtggctgtgattgagagaggggttagaggcgggtcccagcgctgccgcaccatggcggaccagctttatctggaaaatatagacgagttcgtcacggaccaaaacaagatcgtgacatacaaatggctgagctatacactaggggttcatgttaaccaggccaaacagatgctgtatgattatgttgaaaggaaacgaaaagaaaattcaggagcccaactgcatgttacctacttggtgtctggcagtctcattcagaatggacattcctgccacaaggttgcagtagtgagagaagataaattggaagcagtgaagtccaagctagctgtgactgccagcatccatgtgtacagcatccagaaagccatgctaaaggacagtgggcctctgttcaatactgactatgacatccttaaaagcaacttgcagaactgcagcaaatttagtgctatacaatgtgcagctgccgtccctagagctcctgctgaatcctcttcgtcttccaaaaagtttgagcagtcacatcttcacatgtcaagtgagacacaagccaacaatgagctgaccaccaatggtcatggcccacctgcatccaagcaggtttcccagcagcccaaaggaattatgggaatgtttgcctccaaagctgctgctaaaacccaagaaaccaacaaggaaacgaaaacagaggctaaagaagtaacaaatgcatctgcagcaggcaacaaggcaccagggaaagggaatatgatgagcaacttttttggaaaagctgctatgaataaatttaaagtcaatttggactcagaacaagcagtgaaagaagaaaaaatagtggagcagcctacagtgtctgtcacggaaccaaagctggcaactcctgcaggcctgaaaaaatccagcaaaaaagcagagcctgttaaggtgctgcagaaggaaaaaaaaagggggaagcgagtagcattatctgatgatgagacaaaggaaactgaaaacatgaggaaaaagaggagaagaatcaaacttcctgaatctgatagcagtgaagatgaagtctttccagactctcctggggcttatgaagctgagtcaccatccccacctcctcctccgtctccacctcttgaaccagtgccaaagactgagcctgaacctccttctgtcaagagctcaagtggagaaaacaaaagaaaacgaaaacgcgtactaaaatctaaaacttacctggatggggaaggctgcatagtgactgaaaaagtctacgagagtgaatcctgcacagatagtgaagaggagcttaacatgaagacatcctcagtacacagaccccctgccatgactgtgaaaaaagaacccagagaggaacgaaagggccccaagaaagggactgctgctctgggcaaagccaacagacaggtgtccattactggcttcttccagaggaaataaactgccatctctggtagatcagagacttggagtggtcaagggagaagaccaagaaatgtactcctcacttactatgtaagttcatctagatctccacctcacctgtatcaaaagactgttctttcatcctgtgaggtttatactatttctggtttttaaccaaaaggaaatcatctggaagcaggaggcaaaaagctgttaccttctaatgacatttaaaaagcacagtctttgacctgtccaggagaaggatttactccaaaattatactggaacagttttcagaattctcactgaagccatttagtggctaacccactgtgctccactcaccctatgccctggtccgcatatggcacaggaattattccttcttgttcctctgtattctaagaattcatgtgggtgtttcttatccttacattctgctggatacgtttacccctcttgtcttcctgcagtaccacacttctgtcccctaacctcctgaggctgttctctgtaagtcttttaagttttggttggactaaaggctgaagtgaaaatctccctgtaatcctcttcctccattatgcagtacacggacacctggctacagaccaggacgtggcttgtgttctgttcctttcacaaaagctctctgggaccttcacttgcaattagtggttagggaaaagcctcaggcagaacacaaatagaaatttaatgatgtgttcaactccaccagaaattacctcgagtcagcattgacgatattggaggagctgccgtgctgctgatacggggtgtgctttatgctgctctttgcggtttgttgatcccctcctcccccactctcaatacctagagagtgaaacccgtacaatgagataaagactaaaaagagaaatcccttcctatatacagtgtgctacatttacaaaaaatttctccttaagaaaacagaatattcaaaaacagcacttttccaggaagttagtgaggaagataaggcacacatttatttataaatggatgttgctcctttgtatttttagcttccctatttgcttaaaagtacaggctccctaagagaggatggagagggagagactgaattgttagtaggtctaaacatcaaagaaaacatttttattagttacttatggaaaatcatctattacaatgataaccttcaagtgacttccattatggctggacaggcggtgagctcagtggattgcagtggtgtgctggtgattttgcacagtgagctctgcggaaggggtcaggctcaactgctgatgtgtctcacacgtagcagacaaggggtgtctgactggcttcttttgcctcaagatggtgtatgtcgtaagtgatgcaatcagctgtctgctttttaaggttgggattgtgctgactttgggattaacatgagcttctttagcaaccaagcatgaacttgattaagaccagaagtttgggagatgagtcctggcattatgtctaggactaaagcagtggctttgtatagcaagctgagtaaaggttgacatattccaaaacccttctttttaaaaggaaaaaggatggagagaaggatggaaagcctggacttaaacctttagaaaaaacttctggagagaaatcccttttaaacagttacttttgtcattgcctctggtcatttgtctaaataggaatggaaaattaaaagaaaagcaacaatccaatcttttttctaaaaattatgctggggtctcgactaaaactgaatttgaattggaaaattctggtgttggttggagttccatcttgcaagggataatacaaatcctatgatctctatgcccaatatgctgcctcaactctgagctgtctgcaaggcttagtaagtattgagtggtgttttttttttctttttatacaataccatgttaaccacatgagttaaataaatttgagaagttgttttaaaacagtgcttcaaac

SEQ ID NO: 7260 - protein, 466 aa, Homo sapiens; identical to SEQ ID NO: 1015

SEQ ID NO: 7261 - DNA, 3776 bp, Homo sapiens
gggagcaaagacgtttcccgccggcgggagctgtggctgtgattgagagaggggttagaggcgggtcccagcgctgccgcaccatggcggaccagctttatctggaaaatatagacgagttcgtcacggaccaaaacaagatcgtgacatacaaatggctgagctatacactaggggttcatgttaaccaggccaaacagatgctgtatgattatgttgaaaggaaacgaaaagaaaattcaggagcccaactgcatgttacctacttggtgtctggcagtctcattcagaatggacattcctgccacaaggttgcagtagtgagagaagataaattggaagcagtgaagtccaagctagctgtgactgccagcatccatgtgtacagcatccagaaagccatgctaaaggacagtgggcctctgttcaatactgactatgacatccttaaaagcaacttgcagaactgcagcaaatttagtgctatacaatgtgcagctgccgtccctagagctcctgctgaatcctcttcgtcttccaaaaagtttgagcagtcacatcttcacatgtcaagtgagacacaagccaacaatgagctgaccaccaatggtcatggcccacctgcatccaagcaggtttcccagcagcccaaaggaattatgggaatgtttgcctccaaagctgctgctaaaacccaagaaaccaacaaggaaacgaaaacagaggctaaagaagtaacaaatgcatctgcagcaggcaacaaggcaccagggaaagggaatatgatgagcaacttttttggaaaagctgctatgaataaatttaaagtcaatttggactcagaacaagcagtgaaagaagaaaaaatagtggagcagcctacagtgtctgtcacggaaccaaagctggcaactcctgcaggcctgaaaaaatccagcaaaaaagcagagcctgttaaggtgctgcagaaggaaaaaaaaagggggaagcgagtagcattatctgatgatgagacaaaggaaactgaaaacatgaggaaaaagaggagaagaatcaaacttcctgaatctgatagcagtgaagatgaagtctttccagactctcctggggcttatgaagctgagtcaccatccccacctcctcctccgtctccacctcttgaaccagtgccaaagactgagcctgaacctccttctgtcaagagctcaagtggagaaaacaaaagaaaacgaaaacgcgtactaaaatctaaaacttacctggatggggaaggctgcatagtgactgaaaaagtctacgagagtgaatcctgcacagatagtgaagaggagcttaacatgaagacatcctcagtacacagaccccctgccatgactgtgaaaaaagaacccagagaggaacgaaagggccccaagaaagggactgctgctctgggcaaagccaacagacaggtgtccattactggcttcttccagaggaaataaactgccatctctggtagatcagagacttggagtggtcaagggagaagaccaagaaatgtactcctcacttactatgtaagttcatctagatctccacctcacctgtatcaaaagactgttctttcatcctgtgaggtttatactatttctggtttttaaccaaaaggaaatcatctggaagcaggaggcaaaaagctgttaccttctaatgacatttaaaaagcacagtctttgacctgtccaggagaaggatttactccaaaattatactggaacagttttcagaattctcactgaagccatttagtggctaacccactgtgctccactcaccctatgccctggtccgcatatggcacaggaattattccttcttgttcctctgtattctaagaattcatgtgggtgtttcttatccttacattctgctggatacgtttacccctcttgtcttcctgcagtaccacacttctgtcccctaacctcctgaggctgttctctgtaagtcttttaagttttggttggactaaaggctgaagtgaaaatctccctgtaatcctcttcctccattatgcagtacacggacacctggctacagaccaggacgtggcttgtgttctgttcctttcacaaaagctctctgggaccttcacttgcaattagtggttagggaaaagcctcaggcagaacacaaatagaaatttaatgatgtgttcaactccaccagaaattacctcgagtcagcattgacgatattggaggagctgccgtgctgctgatacggggtgtgctttatgctgctctttgcggtttgttgatcccctcctcccccactctcaatacctagagagtgaaacccgtacaatgagataaagactaaaaagagaaatcccttcctatatacagtgtgctacatttacaaaaaatttctccttaagaaaacagaatattcaaaaacagcacttttccaggaagttagtgaggaagataaggcacacatttatttataaatggatgttgctcctttgtatttttagcttccctatttgcttaaaagtacaggctccctaagagaggatggagagggagagactgaattgttagtaggtctaaacatcaaagaaaacatttttattagttacttatggaaaatcatctattacaatgataaccttcaagtgacttccattatggctggacaggcggtgagctcagtggattgcagtggtgtgctggtgattttgcacagtgagctctgcggaaggggtcaggctcaactgctgatgtgtctcacacgtagcagacaaggggtgtctgactggcttcttttgcctcaagatggtgtatgtcgtaagtgatgcaatcagctgtctgctttttaaggttgggattgtgctgactttgggattaacatgagcttctttagcaaccaagcatgaacttgattaagaccagaagtttgggagatgagtcctggcattatgtctaggactaaagcagtggctttgtatagcaagctgagtaaaggttgacatattccaaaacccttctttttaaaaggaaaaaggatggagagaaggatggaaagcctggacttaaacctttagaaaaaacttctggagagaaatcccttttaaacagttacttttgtcattgcctctggtcatttgtctaaataggaatggaaaattaaaagaaaagcaacaatccaatcttttttctaaaaattatgctggggtctcgactaaaactgaatttgaattggaaaattctggtgttggttggagttccatcttgcaagggataatacaaatcctatgatctctatgcccaatatgctgcctcaactctgagctgtctgcaaggcttagtaagtattgagtggtgttttttttttctttttatacaataccatgttaaccacatgagttaaataaatttgagaagttgttttaaaacagtgcttcaaactgagtatctgatgagtctcttatttgatggatggtaacagtgttgcaattatttaagctctgaatgggaagaaggctggttttcagttgatattgttaaaactgcatacccacagtctgagatgaacaagttatttgctgccttcatcgtttttttcagcactggggaaatgttagtttcagccaacctcattttttagttcatctagaagaaaatctagcacattgtattagtttggcttcatcacttgctagctgtatgactgtgggcaagtttcacagcctcaagttctttatcaaaataaaactaaaatgagttacc

SEQ ID NO: 7262 - protein, 466 aa, Homo sapiens; identical to SEQ ID NO: 1015

SEQ ID NO: 7263 - DNA, 848 bp, Homo sapiens
aaagacgtttcccgccggcgggagctgtggctgtgattgagagaggggttagaggcgggtcccagcgctgccgcaccatggcggaccagctttatctggaaaatatagacgagttcgtcacggaccaaaacaagatcgtgacatacaaatggctgagctatacactaggggttcatgttaaccaggccaaacagatgctgtatgattatgttgaaaggaaacgaaaagaaaattcaggagcccaactgcatgttacctacttggtgtctggcagtctcattcagaatggacattcctgccacaaggttgcagtagtgagagaagataaattggaagcagtgaagtccaagctagctgtgactgccagcatccatgtgtacagcatccagaaagccatgctaaaggacagtgggcctctgttcaatactgactatgacatccttaaaagcaacttgcagaactgcagcaaatttagtgctatacaatgtgcagctgccgtccctagagctcctgctgaatcctcttcgtcttccaaaaagtttgagcagtcacatcttcacatgtcaagtgagacacaagccaacaatgagctgaccaccaatggtcatggcccacctgcatccaagcaggtttcccagcagcccaaaggaattatgggaatgtttgcctccaaagctgctgctaaaacccaagaaaccaacaaggaaacgaaaacagaggctaaagaagtaacaaatgcatctgcagcaggcaacaaggcaccagggaaagggaatatgatgagcaacttttttggaaaagctgctatgaataaatttaaagtcaatttggactcagaacaagcagtg

SEQ ID NO: 7264 - protein, 256 aa, Homo sapiens
MADQLYLENIDEFVTDQNKIVTYKWLSYTLGVHVNQAKQMLYDYVERKRKENSGAQLHVTYLVSGSLIQNGHSCHKVAVVREDKLEAVKSKLAVTASIHVYSIQKAMLKDSGPLFNTDYDILKSNLQNCSKFSAIQCAAAVPRAPAESSSSSKKFEQSHLHMSSETQANNELTTNGHGPPASKQVSQQPKGIMGMFASKAAAKTQETNKETKTEAKEVTNASAAGNKAPGKGNMMSNFFGKAAMNKFKVNLDSEQA

SEQ ID NO: 7265 - DNA, 3330 bp, Homo sapiens
ggcgggagctgtggctgtgattgagagaggggttagaggcgggtcccagcgctgccgcaccatggcggaccagctttatctggaaaatatagacgagttcgtcacggaccaaaacaagatcgtgacatacaaatggctgagctatacactaggggttcatgttaaccaggccaaacatgccacaaggttgcagtagtgagagaagataaattggaagcagtgaagtccaagctagctgtgactgccagcatccatgtgtacagcatccagaaagccatgctaaaggacagtgggcctctgttcaatactgactatgacatccttaaaagcaacttgcagaactgcagcaaatttagtgctatacaatgtgcagctgccgtccctagagctcctgctgaatcctcttcgtcttccaaaaagtttgagcagtcacatcttcacatgtcaagtgagacacaagccaacaatgagctgaccaccaatggtcatggcccacctgcatccaagcaggtttcccagcagcccaaaggaattatgggaatgtttgcctccaaagctgctgctaaaacccaagaaaccaacaaggaaacgaaaacagaggctaaagaagtaacaaatgcatctgcagcaggcaacaaggcaccagggaaagggaatatgatgagcaacttttttggaaaagctgctatgaataaatttaaagtcaatttggactcagaacaagcagtgaaagaagaaaaaatagtggagcagcctacagtgtctgtcacggaaccaaagctggcaactcctgcaggcctgaaaaaatccagcaaaaaagcagagcctgttaaggtgctgcagaaggaaaaaaaaagggggaagcgagtagcattatctgatgatgagacaaaggaaactgaaaacatgaggaaaaagaggagaagaatcaaacttcctgaatctgatagcagtgaagatgaagtctttccagactctcctggggcttatgaagctgagtcaccatccccacctcctcctccgtctccacctcttgaaccagtgccaaagactgagcctgaacctccttctgtcaagagctcaagtggagaaaacaaaagaaaacgaaaacgcgtactaaaatctaaaacttacctggatggggaaggctgcatagtgactgaaaaagtctacgagagtgaatcctgcacagatagtgaagaggagcttaacatgaagacatcctcagtacacagaccccctgccatgactgtgaaaaaagaacccagagaggaacgaaagggccccaagaaagggactgctgctctgggcaaagccaacagacaggtgtccattactggcttcttccagaggaaataaactgccatctctggtagatcagagacttggagtggtcaagggagaagaccaagaaatgtactcctcacttactatgtaagttcatctagatctccacctcacctgtatcaaaagactgttctttcatcctgtgaggtttatactatttctggtttttaaccaaaaggaaatcatctggaagcaggaggcaaaaagctgttaccttctaatgacatttaaaaagcacagtctttgacctgtccaggagaaggatttactccaaaattatactggaacagttttcagaattctcactgaagccatttagtggctaacccactgtgctccactcaccctatgccctggtccgcatatggcacaggaattattccttcttgttcctctgtattctaagaattcatgtgggtgtttcttatccttacattctgctggatacgtttacccctcttgtcttcctgcagtaccacacttctgtcccctaacctcctgaggctgttctctgtaagtcttttaagttttggttggactaaaggctgaagtgaaaatctccctgtaatcctcttcctccattatgcagtacacggacacctggctacagaccaggacgtggcttgtgttctgttcctttcacaaaagctctctgggaccttcacttgcaattagtggttagggaaaagcctcaggcagaacacaaatagaaatttaatgatgtgttcaactccaccagaaattacctcgagtcagcattgacgatattggaggagctgccgtgctgctgatacggggtgtgctttatgctgctctttgcggtttgttgatcccctcctcccccactctcaatacctagagagtgaaacccgtacaatgagataaagactaaaaagagaaatcccttcctatatacagtgtgctacatttacaaaaaatttctccttaagaaaacagaatattcaaaaacagcacttttccaggaagttagtgaggaagataaggcacacatttatttataaatggatgttgctcctttgtatttttagcttccctatttgcttaaaagtacaggctccctaagagaggatggagagggagagactgaattgttagtaggtctaaacatcaaagaaaacatttttattagttacttatggaaaatcatctattacaatgataaccttcaagtgacttccattatggctggacaggcggtgagctcagtggattgcagtggtgtgctggtgattttgcacagtgagctctgcggaaggggtcaggctcaactgctgatgtgtctcacacgtagcagacaaggggtgtctgactggcttcttttgcctcaagatggtgtatgtcgtaagtgatgcaatcagctgtctgctttttaaggttgggattgtgctgactttgggattaacatgagcttctttagcaaccaagcatgaacttgattaagaccagaagtttgggagatgagtcctggcattatgtctaggactaaagcagtggctttgtatagcaagctgagtaaaggttgacatattccaaaacccttctttttaaaaggaaaaaggatggagagaaggatggaaagcctggacttaaacctttagaaaaaacttctggagagaaatcccttttaaacagttacttttgtcattgcctctggtcatttgtctaaataggaatggaaaattaaaagaaaagcaacaatccaatcttttttctaaaaattatgctggggtctcgactaaaactgaatttgaattggaaaattctggtgttggttggagttccatcttgcaagggataatacaaatcctatgatctctatgcccaatatgctgcctcaactctgagctgtctgcaaggcttagtaagtattgagtggtgttttttttttctttttatacaataccatgttaaccacatgagttaaataaatttgagaagttgttttaaaacagtgcttcaaac

SEQ ID NO: 7266 - protein, 360 aa, Homo sapiens
MLKDSGPLFNTDYDILKSNLQNCSKFSAIQCAAAVPRAPAESSSSSKKFEQSHLHMSSETQANNELTTNGHGPPASKQVSQQPKGIMGMFASKAAAKTQETNKETKTEAKEVTNASAAGNKAPGKGNMMSNFFGKAAMNKFKVNLDSEQAVKEEKIVEQPTVSVTEPKLATPAGLKKSSKKAEPVKVLQKEKKRGKRVALSDDETKETENMRKKRRRIKLPESDSSEDEVFPDSPGAYEAESPSPPPPPSPPLEPVPKTEPEPPSVKSSSGENKRKRKRVLKSKTYLDGEGCIVTEKVYESESCTDSEEELNMKTSSVHRPPAMTVKKEPREERKGPKKGTAALGKANRQVSITGFFQRK

SEQ ID NO: 7267 - DNA, 3651 bp, Homo sapiens
ggcgggagctgtggctgtgattgagagaggggttagaggcgggtcccagcgctgccgcaccatggcggaccagctttatctggaaaatatagacgagttcgtcacggaccaaaacaagatcgtgacatacaaatggctgagctatacactaggggttcatgttaaccaggccaaacatgccacaaggttgcagtagtgagagaagataaattggaagcagtgaagtccaagctagctgtgactgccagcatccatgtgtacagcatccagaaagccatgctaaaggacagtgggcctctgttcaatactgactatgacatccttaaaagcaacttgcagaactgcagcaaatttagtgctatacaatgtgcagctgccgtccctagagctcctgctgaatcctcttcgtcttccaaaaagtttgagcagtcacatcttcacatgtcaagtgagacacaagccaacaatgagctgaccaccaatggtcatggcccacctgcatccaagcaggtttcccagcagcccaaaggaattatgggaatgtttgcctccaaagctgctgctaaaacccaagaaaccaacaaggaaacgaaaacagaggctaaagaagtaacaaatgcatctgcagcaggcaacaaggcaccagggaaagggaatatgatgagcaacttttttggaaaagctgctatgaataaatttaaagtcaatttggactcagaacaagcagtgaaagaagaaaaaatagtggagcagcctacagtgtctgtcacggaaccaaagctggcaactcctgcaggcctgaaaaaatccagcaaaaaagcagagcctgttaaggtgctgcagaaggaaaaaaaaagggggaagcgagtagcattatctgatgatgagacaaaggaaactgaaaacatgaggaaaaagaggagaagaatcaaacttcctgaatctgatagcagtgaagatgaagtctttccagactctcctggggcttatgaagctgagtcaccatccccacctcctcctccgtctccacctcttgaaccagtgccaaagactgagcctgaacctccttctgtcaagagctcaagtggagaaaacaaaagaaaacgaaaacgcgtactaaaatctaaaacttacctggatggggaaggctgcatagtgactgaaaaagtctacgagagtgaatcctgcacagatagtgaagaggagcttaacatgaagacatcctcagtacacagaccccctgccatgactgtgaaaaaagaacccagagaggaacgaaagggccccaagaaagggactgctgctctgggcaaagccaacagacaggtgtccattactggcttcttccagaggaaataaactgccatctctggtagatcagagacttggagtggtcaagggagaagaccaagaaatgtactcctcacttactatgtaagttcatctagatctccacctcacctgtatcaaaagactgttctttcatcctgtgaggtttatactatttctggtttttaaccaaaaggaaatcatctggaagcaggaggcaaaaagctgttaccttctaatgacatttaaaaagcacagtctttgacctgtccaggagaaggatttactccaaaattatactggaacagttttcagaattctcactgaagccatttagtggctaacccactgtgctccactcaccctatgccctggtccgcatatggcacaggaattattccttcttgttcctctgtattctaagaattcatgtgggtgtttcttatccttacattctgctggatacgtttacccctcttgtcttcctgcagtaccacacttctgtcccctaacctcctgaggctgttctctgtaagtcttttaagttttggttggactaaaggctgaagtgaaaatctccctgtaatcctcttcctccattatgcagtacacggacacctggctacagaccaggacgtggcttgtgttctgttcctttcacaaaagctctctgggaccttcacttgcaattagtggttagggaaaagcctcaggcagaacacaaatagaaatttaatgatgtgttcaactccaccagaaattacctcgagtcagcattgacgatattggaggagctgccgtgctgctgatacggggtgtgctttatgctgctctttgcggtttgttgatcccctcctcccccactctcaatacctagagagtgaaacccgtacaatgagataaagactaaaaagagaaatcccttcctatatacagtgtgctacatttacaaaaaatttctccttaagaaaacagaatattcaaaaacagcacttttccaggaagttagtgaggaagataaggcacacatttatttataaatggatgttgctcctttgtatttttagcttccctatttgcttaaaagtacaggctccctaagagaggatggagagggagagactgaattgttagtaggtctaaacatcaaagaaaacatttttattagttacttatggaaaatcatctattacaatgataaccttcaagtgacttccattatggctggacaggcggtgagctcagtggattgcagtggtgtgctggtgattttgcacagtgagctctgcggaaggggtcaggctcaactgctgatgtgtctcacacgtagcagacaaggggtgtctgactggcttcttttgcctcaagatggtgtatgtcgtaagtgatgcaatcagctgtctgctttttaaggttgggattgtgctgactttgggattaacatgagcttctttagcaaccaagcatgaacttgattaagaccagaagtttgggagatgagtcctggcattatgtctaggactaaagcagtggctttgtatagcaagctgagtaaaggttgacatattccaaaacccttctttttaaaaggaaaaaggatggagagaaggatggaaagcctggacttaaacctttagaaaaaacttctggagagaaatcccttttaaacagttacttttgtcattgcctctggtcatttgtctaaataggaatggaaaattaaaagaaaagcaacaatccaatcttttttctaaaaattatgctggggtctcgactaaaactgaatttgaattggaaaattctggtgttggttggagttccatcttgcaagggataatacaaatcctatgatctctatgcccaatatgctgcctcaactctgagctgtctgcaaggcttagtaagtattgagtggtgttttttttttctttttatacaataccatgttaaccacatgagttaaataaatttgagaagttgttttaaaacagtgcttcaaactgagtatctgatgagtctcttatttgatggatggtaacagtgttgcaattatttaagctctgaatgggaagaaggctggttttcagttgatattgttaaaactgcatacccacagtctgagatgaacaagttatttgctgccttcatcgtttttttcagcactggggaaatgttagtttcagccaacctcattttttagttcatctagaagaaaatctagcacattgtattagtttggcttcatcacttgctagctgtatgactgtgggcaagtttcacagcctcaagttctttatcaaaataaaactaaaatgagttacc

SEQ ID NO: 7268 - protein, 360 aa, Homo sapiens; identical to SEQ ID NO: 7266

SEQ ID NO: 7269 - DNA, 3745 bp, Homo sapiens
gctgtggctgtgattgagagaggggttagaggcgggtcccagcgctgccgcaccatggcggaccagctttatctggaaaatatagacgagttcgtcacggaccaaaacaagatcgtgagcagctactactggggaacgcgggcgtgcgaccggggtcctgggcccggctagggcggcgggagccttgaccctctgtctgcttgtggcttcgtggggaccaggggagacaggtccccacgaggggacctgggcgagctctgtgccccagagcgagcgaggactcgtcgggaaggtcctccagcacacacggaagtccgcgtcccttgggtgggcgtgctgggaacagagcctggggctggagccgcggagaccgggcgcggagggagggccgttggctgagagttctaaggcgtccctacacctttcttttaaggtgacatacaaatggctgagctatacactaggggttcatgttaaccaggccaaacagatgctgtatgattatgttgaaaggaaacgaaaagaaaattcaggagcccaactgcatgttacctacttggtgtctggcagtctcattcagaatggacattcctgccacaaggttgcagtagtgagagaagataaattggaagcagtgaagtccaagctagctgtgactgccagcatccatgtgtacagcatccagaaagccatgctaaaggacagtgggcctctgttcaatactgactatgacatccttaaaagcaacttgcagaactgcagcaaatttagtgctatacaatgtgcagctgccgtccctagagctcctgctgaatcctcttcgtcttccaaaaagtttgagcagtcacatcttcacatgtcaagtgagacacaagccaacaatgagctgaccaccaatggtcatggcccacctgcatccaagcaggtttcccagcagcccaaaggaattatgggaatgtttgcctccaaagctgctgctaaaacccaagaaaccaacaaggaaacgaaaacagaggctaaagaagtaacaaatgcatctgcagcaggcaacaaggcaccagggaaagggaatatgatgagcaacttttttggaaaagctgctatgaataaatttaaagtcaatttggactcagaacaagcagtgaaagaagaaaaaatagtggagcagcctacagtgtctgtcacggaaccaaagctggcaactcctgcaggcctgaaaaaatccagcaaaaaagcagagcctgttaaggtgctgcagaaggaaaaaaaaagggggaagcgagtagcattatctgatgatgagacaaaggaaactgaaaacatgaggaaaaagaggagaagaatcaaacttcctgaatctgatagcagtgaagatgaagtctttccagactctcctggggcttatgaagctgagtcaccatccccacctcctcctccgtctccacctcttgaaccagtgccaaagactgagcctgaacctccttctgtcaagagctcaagtggagaaaacaaaagaaaacgaaaacgcgtactaaaatctaaaacttacctggatggggaaggctgcatagtgactgaaaaagtctacgagagtgaatcctgcacagatagtgaagaggagcttaacatgaagacatcctcagtacacagaccccctgccatgactgtgaaaaaagaacccagagaggaacgaaagggccccaagaaagggactgctgctctgggcaaagccaacagacaggtgtccattactggcttcttccagaggaaataaactgccatctctggtagatcagagacttggagtggtcaagggagaagaccaagaaatgtactcctcacttactatgtaagttcatctagatctccacctcacctgtatcaaaagactgttctttcatcctgtgaggtttatactatttctggtttttaaccaaaaggaaatcatctggaagcaggaggcaaaaagctgttaccttctaatgacatttaaaaagcacagtctttgacctgtccaggagaaggatttactccaaaattatactggaacagttttcagaattctcactgaagccatttagtggctaacccactgtgctccactcaccctatgccctggtccgcatatggcacaggaattattccttcttgttcctctgtattctaagaattcatgtgggtgtttcttatccttacattctgctggatacgtttacccctcttgtcttcctgcagtaccacacttctgtcccctaacctcctgaggctgttctctgtaagtcttttaagttttggttggactaaaggctgaagtgaaaatctccctgtaatcctcttcctccattatgcagtacacggacacctggctacagaccaggacgtggcttgtgttctgttcctttcacaaaagctctctgggaccttcacttgcaattagtggttagggaaaagcctcaggcagaacacaaatagaaatttaatgatgtgttcaactccaccagaaattacctcgagtcagcattgacgatattggaggagctgccgtgctgctgatacggggtgtgctttatgctgctctttgcggtttgttgatcccctcctcccccactctcaatacctagagagtgaaacccgtacaatgagataaagactaaaaagagaaatcccttcctatatacagtgtgctacatttacaaaaaatttctccttaagaaaacagaatattcaaaaacagcacttttccaggaagttagtgaggaagataaggcacacatttatttataaatggatgttgctcctttgtatttttagcttccctatttgcttaaaagtacaggctccctaagagaggatggagagggagagactgaattgttagtaggtctaaacatcaaagaaaacatttttattagttacttatggaaaatcatctattacaatgataaccttcaagtgacttccattatggctggacaggcggtgagctcagtggattgcagtggtgtgctggtgattttgcacagtgagctctgcggaaggggtcaggctcaactgctgatgtgtctcacacgtagcagacaaggggtgtctgactggcttcttttgcctcaagatggtgtatgtcgtaagtgatgcaatcagctgtctgctttttaaggttgggattgtgctgactttgggattaacatgagcttctttagcaaccaagcatgaacttgattaagaccagaagtttgggagatgagtcctggcattatgtctaggactaaagcagtggctttgtatagcaagctgagtaaaggttgacatattccaaaacccttctttttaaaaggaaaaaggatggagagaaggatggaaagcctggacttaaacctttagaaaaaacttctggagagaaatcccttttaaacagttacttttgtcattgcctctggtcatttgtctaaataggaatggaaaattaaaagaaaagcaacaatccaatcttttttctaaaaattatgctggggtctcgactaaaactgaatttgaattggaaaattctggtgttggttggagttccatcttgcaagggataatacaaatcctatgatctctatgcccaatatgctgcctcaactctgagctgtctgcaaggcttagtaagtattgagtggtgttttttttttctttttatacaataccatgttaaccacatgagttaaataaatttgagaagttgttttaaaacagtgcttcaaac

SEQ ID NO: 7270 - protein, 427 aa, Homo sapiens
MLYDYVERKRKENSGAQLHVTYLVSGSLIQNGHSCHKVAVVREDKLEAVKSKLAVTASIHVYSIQKAMLKDSGPLFNTDYDILKSNLQNCSKFSAIQCAAAVPRAPAESSSSSKKFEQSHLHMSSETQANNELTTNGHGPPASKQVSQQPKGIMGMFASKAAAKTQETNKETKTEAKEVTNASAAGNKAPGKGNMMSNFFGKAAMNKFKVNLDSEQAVKEEKIVEQPTVSVTEPKLATPAGLKKSSKKAEPVKVLQKEKKRGKRVALSDDETKETENMRKKRRRIKLPESDSSEDEVFPDSPGAYEAESPSPPPPPSPPLEPVPKTEPEPPSVKSSSGENKRKRKRVLKSKTYLDGEGCIVTEKVYESESCTDSEEELNMKTSSVHRPPAMTVKKEPREERKGPKKGTAALGKANRQVSITGFFQRK

SEQ ID NO: 7271 - DNA, 4066 bp, Homo sapiens
gctgtggctgtgattgagagaggggttagaggcgggtcccagcgctgccgcaccatggcggaccagctttatctggaaaatatagacgagttcgtcacggaccaaaacaagatcgtgagcagctactactggggaacgcgggcgtgcgaccggggtcctgggcccggctagggcggcgggagccttgaccctctgtctgcttgtggcttcgtggggaccaggggagacaggtccccacgaggggacctgggcgagctctgtgccccagagcgagcgaggactcgtcgggaaggtcctccagcacacacggaagtccgcgtcccttgggtgggcgtgctgggaacagagcctggggctggagccgcggagaccgggcgcggagggagggccgttggctgagagttctaaggcgtccctacacctttcttttaaggtgacatacaaatggctgagctatacactaggggttcatgttaaccaggccaaacagatgctgtatgattatgttgaaaggaaacgaaaagaaaattcaggagcccaactgcatgttacctacttggtgtctggcagtctcattcagaatggacattcctgccacaaggttgcagtagtgagagaagataaattggaagcagtgaagtccaagctagctgtgactgccagcatccatgtgtacagcatccagaaagccatgctaaaggacagtgggcctctgttcaatactgactatgacatccttaaaagcaacttgcagaactgcagcaaatttagtgctatacaatgtgcagctgccgtccctagagctcctgctgaatcctcttcgtcttccaaaaagtttgagcagtcacatcttcacatgtcaagtgagacacaagccaacaatgagctgaccaccaatggtcatggcccacctgcatccaagcaggtttcccagcagcccaaaggaattatgggaatgtttgcctccaaagctgctgctaaaacccaagaaaccaacaaggaaacgaaaacagaggctaaagaagtaacaaatgcatctgcagcaggcaacaaggcaccagggaaagggaatatgatgagcaacttttttggaaaagctgctatgaataaatttaaagtcaatttggactcagaacaagcagtgaaagaagaaaaaatagtggagcagcctacagtgtctgtcacggaaccaaagctggcaactcctgcaggcctgaaaaaatccagcaaaaaagcagagcctgttaaggtgctgcagaaggaaaaaaaaagggggaagcgagtagcattatctgatgatgagacaaaggaaactgaaaacatgaggaaaaagaggagaagaatcaaacttcctgaatctgatagcagtgaagatgaagtctttccagactctcctggggcttatgaagctgagtcaccatccccacctcctcctccgtctccacctcttgaaccagtgccaaagactgagcctgaacctccttctgtcaagagctcaagtggagaaaacaaaagaaaacgaaaacgcgtactaaaatctaaaacttacctggatggggaaggctgcatagtgactgaaaaagtctacgagagtgaatcctgcacagatagtgaagaggagcttaacatgaagacatcctcagtacacagaccccctgccatgactgtgaaaaaagaacccagagaggaacgaaagggccccaagaaagggactgctgctctgggcaaagccaacagacaggtgtccattactggcttcttccagaggaaataaactgccatctctggtagatcagagacttggagtggtcaagggagaagaccaagaaatgtactcctcacttactatgtaagttcatctagatctccacctcacctgtatcaaaagactgttctttcatcctgtgaggtttatactatttctggtttttaaccaaaaggaaatcatctggaagcaggaggcaaaaagctgttaccttctaatgacatttaaaaagcacagtctttgacctgtccaggagaaggatttactccaaaattatactggaacagttttcagaattctcactgaagccatttagtggctaacccactgtgctccactcaccctatgccctggtccgcatatggcacaggaattattccttcttgttcctctgtattctaagaattcatgtgggtgtttcttatccttacattctgctggatacgtttacccctcttgtcttcctgcagtaccacacttctgtcccctaacctcctgaggctgttctctgtaagtcttttaagttttggttggactaaaggctgaagtgaaaatctccctgtaatcctcttcctccattatgcagtacacggacacctggctacagaccaggacgtggcttgtgttctgttcctttcacaaaagctctctgggaccttcacttgcaattagtggttagggaaaagcctcaggcagaacacaaatagaaatttaatgatgtgttcaactccaccagaaattacctcgagtcagcattgacgatattggaggagctgccgtgctgctgatacggggtgtgctttatgctgctctttgcggtttgttgatcccctcctcccccactctcaatacctagagagtgaaacccgtacaatgagataaagactaaaaagagaaatcccttcctatatacagtgtgctacatttacaaaaaatttctccttaagaaaacagaatattcaaaaacagcacttttccaggaagttagtgaggaagataaggcacacatttatttataaatggatgttgctcctttgtatttttagcttccctatttgcttaaaagtacaggctccctaagagaggatggagagggagagactgaattgttagtaggtctaaacatcaaagaaaacatttttattagttacttatggaaaatcatctattacaatgataaccttcaagtgacttccattatggctggacaggcggtgagctcagtggattgcagtggtgtgctggtgattttgcacagtgagctctgcggaaggggtcaggctcaactgctgatgtgtctcacacgtagcagacaaggggtgtctgactggcttcttttgcctcaagatggtgtatgtcgtaagtgatgcaatcagctgtctgctttttaaggttgggattgtgctgactttgggattaacatgagcttctttagcaaccaagcatgaacttgattaagaccagaagtttgggagatgagtcctggcattatgtctaggactaaagcagtggctttgtatagcaagctgagtaaaggttgacatattccaaaacccttctttttaaaaggaaaaaggatggagagaaggatggaaagcctggacttaaacctttagaaaaaacttctggagagaaatcccttttaaacagttacttttgtcattgcctctggtcatttgtctaaataggaatggaaaattaaaagaaaagcaacaatccaatcttttttctaaaaattatgctggggtctcgactaaaactgaatttgaattggaaaattctggtgttggttggagttccatcttgcaagggataatacaaatcctatgatctctatgcccaatatgctgcctcaactctgagctgtctgcaaggcttagtaagtattgagtggtgttttttttttctttttatacaataccatgttaaccacatgagttaaataaatttgagaagttgttttaaaacagtgcttcaaactgagtatctgatgagtctcttatttgatggatggtaacagtgttgcaattatttaagctctgaatgggaagaaggctggttttcagttgatattgttaaaactgcatacccacagtctgagatgaacaagttatttgctgccttcatcgtttttttcagcactggggaaatgttagtttcagccaacctcattttttagttcatctagaagaaaatctagcacattgtattagtttggcttcatcacttgctagctgtatgactgtgggcaagtttcacagcctcaagttctttatcaaaataaaactaaaatgagttacc

SEQ ID NO: 7272 - protein, 427 aa, Homo sapiens; identical to SEQ ID NO: 7270

SEQ ID NO: 7273 - DNA, 2239 bp, Homo sapiens
taatgcttttgaagatgcatgtgagatggaggtggtgttctggggtctaattgctgaacgaatagtgactgaaaaagtctacgagagtgaatcctgcacagatagtgaagaggagcttaacatgaagacatcctcagtacacagaccccctgccatgactgtgaaaaaagaacccagagaggaacgaaagggccccaagaaagggactgctgctctgggcaaagccaacagacaggtgtccattactggcttcttccagaggaaataaactgccatctctggtagatcagagacttggagtggtcaagggagaagaccaagaaatgtactcctcacttactatgtaagttcatctagatctccacctcacctgtatcaaaagactgttctttcatcctgtgaggtttatactatttctggtttttaaccaaaaggaaatcatctggaagcaggaggcaaaaagctgttaccttctaatgacatttaaaaagcacagtctttgacctgtccaggagaaggatttactccaaaattatactggaacagttttcagaattctcactgaagccatttagtggctaacccactgtgctccactcaccctatgccctggtccgcatatggcacaggaattattccttcttgttcctctgtattctaagaattcatgtgggtgtttcttatccttacattctgctggatacgtttacccctcttgtcttcctgcagtaccacacttctgtcccctaacctcctgaggctgttctctgtaagtcttttaagttttggttggactaaaggctgaagtgaaaatctccctgtaatcctcttcctccattatgcagtacacggacacctggctacagaccaggacgtggcttgtgttctgttcctttcacaaaagctctctgggaccttcacttgcaattagtggttagggaaaagcctcaggcagaacacaaatagaaatttaatgatgtgttcaactccaccagaaattacctcgagtcagcattgacgatattggaggagctgccgtgctgctgatacggggtgtgctttatgctgctctttgcggtttgttgatcccctcctcccccactctcaatacctagagagtgaaacccgtacaatgagataaagactaaaaagagaaatcccttcctatatacagtgtgctacatttacaaaaaatttctccttaagaaaacagaatattcaaaaacagcacttttccaggaagttagtgaggaagataaggcacacatttatttataaatggatgttgctcctttgtatttttagcttccctatttgcttaaaagtacaggctccctaagagaggatggagagggagagactgaattgttagtaggtctaaacatcaaagaaaacatttttattagttacttatggaaaatcatctattacaatgataaccttcaagtgacttccattatggctggacaggcggtgagctcagtggattgcagtggtgtgctggtgattttgcacagtgagctctgcggaaggggtcaggctcaactgctgatgtgtctcacacgtagcagacaaggggtgtctgactggcttcttttgcctcaagatggtgtatgtcgtaagtgatgcaatcagctgtctgctttttaaggttgggattgtgctgactttgggattaacatgagcttctttagcaaccaagcatgaacttgattaagaccagaagtttgggagatgagtcctggcattatgtctaggactaaagcagtggctttgtatagcaagctgagtaaaggttgacatattccaaaacccttctttttaaaaggaaaaaggatggagagaaggatggaaagcctggacttaaacctttagaaaaaacttctggagagaaatcccttttaaacagttacttttgtcattgcctctggtcatttgtctaaataggaatggaaaattaaaagaaaagcaacaatccaatcttttttctaaaaattatgctggggtctcgactaaaactgaatttgaattggaaaattctggtgttggttggagttccatcttgcaagggataatacaaatcctatgatctctatgcccaatatgctgcctcaactctgagctgtctgcaaggcttagtaagtattgagtggtgttttttttttctttttatacaataccatgttaaccacatgagttaaataaatttgagaagttgttttaaaacagtgcttcaaac

SEQ ID NO: 7274 - protein, 80 aa, Homo sapiens
MEVVFWGLIAERIVTEKVYESESCTDSEEELNMKTSSVHRPPAMTVKKEPREERKGPKKGTAALGKANRQVSITGFFQRK

SEQ ID NO: 7275 - DNA, 2560 bp, Homo sapiens
taatgcttttgaagatgcatgtgagatggaggtggtgttctggggtctaattgctgaacgaatagtgactgaaaaagtctacgagagtgaatcctgcacagatagtgaagaggagcttaacatgaagacatcctcagtacacagaccccctgccatgactgtgaaaaaagaacccagagaggaacgaaagggccccaagaaagggactgctgctctgggcaaagccaacagacaggtgtccattactggcttcttccagaggaaataaactgccatctctggtagatcagagacttggagtggtcaagggagaagaccaagaaatgtactcctcacttactatgtaagttcatctagatctccacctcacctgtatcaaaagactgttctttcatcctgtgaggtttatactatttctggtttttaaccaaaaggaaatcatctggaagcaggaggcaaaaagctgttaccttctaatgacatttaaaaagcacagtctttgacctgtccaggagaaggatttactccaaaattatactggaacagttttcagaattctcactgaagccatttagtggctaacccactgtgctccactcaccctatgccctggtccgcatatggcacaggaattattccttcttgttcctctgtattctaagaattcatgtgggtgtttcttatccttacattctgctggatacgtttacccctcttgtcttcctgcagtaccacacttctgtcccctaacctcctgaggctgttctctgtaagtcttttaagttttggttggactaaaggctgaagtgaaaatctccctgtaatcctcttcctccattatgcagtacacggacacctggctacagaccaggacgtggcttgtgttctgttcctttcacaaaagctctctgggaccttcacttgcaattagtggttagggaaaagcctcaggcagaacacaaatagaaatttaatgatgtgttcaactccaccagaaattacctcgagtcagcattgacgatattggaggagctgccgtgctgctgatacggggtgtgctttatgctgctctttgcggtttgttgatcccctcctcccccactctcaatacctagagagtgaaacccgtacaatgagataaagactaaaaagagaaatcccttcctatatacagtgtgctacatttacaaaaaatttctccttaagaaaacagaatattcaaaaacagcacttttccaggaagttagtgaggaagataaggcacacatttatttataaatggatgttgctcctttgtatttttagcttccctatttgcttaaaagtacaggctccctaagagaggatggagagggagagactgaattgttagtaggtctaaacatcaaagaaaacatttttattagttacttatggaaaatcatctattacaatgataaccttcaagtgacttccattatggctggacaggcggtgagctcagtggattgcagtggtgtgctggtgattttgcacagtgagctctgcggaaggggtcaggctcaactgctgatgtgtctcacacgtagcagacaaggggtgtctgactggcttcttttgcctcaagatggtgtatgtcgtaagtgatgcaatcagctgtctgctttttaaggttgggattgtgctgactttgggattaacatgagcttctttagcaaccaagcatgaacttgattaagaccagaagtttgggagatgagtcctggcattatgtctaggactaaagcagtggctttgtatagcaagctgagtaaaggttgacatattccaaaacccttctttttaaaaggaaaaaggatggagagaaggatggaaagcctggacttaaacctttagaaaaaacttctggagagaaatcccttttaaacagttacttttgtcattgcctctggtcatttgtctaaataggaatggaaaattaaaagaaaagcaacaatccaatcttttttctaaaaattatgctggggtctcgactaaaactgaatttgaattggaaaattctggtgttggttggagttccatcttgcaagggataatacaaatcctatgatctctatgcccaatatgctgcctcaactctgagctgtctgcaaggcttagtaagtattgagtggtgttttttttttctttttatacaataccatgttaaccacatgagttaaataaatttgagaagttgttttaaaacagtgcttcaaactgagtatctgatgagtctcttatttgatggatggtaacagtgttgcaattatttaagctctgaatgggaagaaggctggttttcagttgatattgttaaaactgcatacccacagtctgagatgaacaagttatttgctgccttcatcgtttttttcagcactggggaaatgttagtttcagccaacctcattttttagttcatctagaagaaaatctagcacattgtattagtttggcttcatcacttgctagctgtatgactgtgggcaagtttcacagcctcaagttctttatcaaaataaaactaaaatgagttacc

SEQ ID NO: 7276 - protein, 80 aa, Homo sapiens; identical to SEQ ID NO: 7274

SEQ ID NO: 7277 - DNA, 1400 bp, Homo sapiens
gcccgtgcctctccctccacacctccccgcaactgagggagccggctccggcctcggccagcccagaaaggggctcacacagtgcagggccgggctgaagggctccttaagggcggccagagttggcgccaaggctgaggaggtgcccagagcgagcgagggctgccagggctgctagcaggctgtcacctctcaatagcagttttgtatatgggatctagcccctccctaagaggttgattctaaggaagccaacagccgtgttgtgagtacccaatggaaagtctgttgtggcagaaaactgatgtctccagccaacagcactgaggccctgagacctgccaactgtcatgatcttccgatgcctggacacagaaagagcagtggaaggggtcgttgcatgagcaaagacaaagagtgggacactgactgttacatctcaaggagaaggattgccagatcaaaagtcttgcagttaaccaggcgtggtggcagatacctgtaatcccagctattcgggaggctgaggcaggagaatcgcttgtacccgggaggcagaggttgcagtgagctgagaccgcgccattgactcctgcctgatgacaagagagaatctacgtctcaacaacaacaacacgcttgggcactgtattaactccataatcggtttattcataatgctgcatcatccaaccatcatccaacctatttatcattcacaatgccacctgtgaatactggcttccattgactctttcaagaattgctactgggcctcaccaatgttgaccacaaatgcaagtcatactgagagcctctgtgctctttcccctgtggacaataactaccatttcatcctggacacccattgtttgcctggaccacaccttgttatgaccataaccctcagtcagactcaaccttccttcaagatctgcagatctaaattttattgggaacagctagtttgacaagcatagaccagatgtccagttgtcattcattcagcaggagcagcaagattcaatcatgtttttattatattatttcctgaaacttgtggctgtaacaatgaagtttgaggattggtctgtgtaagtatggcagaagtgatgttaagtcgcttatgagattagggtataaaagactaaggcttccatgcttccatcttggtctctgtctctcagagaacagtcatgtgaatgattcttcttgaaagtaaatcttccagccccagtccagtattcaaatgatccagcaacattgcaacttatgagagaccttgagccatccaggtaacatgcttccaaatcctgacccttaaaacctgtaaaataataaatgtggttttaaactcttaagtaatttgttacatagtaataaatagctaatacaccgtc

SEQ ID NO: 7278 - protein, 66 aa, Homo sapiens
MSPANSTEALRPANCHDLPMPGHRKSSGRGRCMSKDKEWDTDCYISRRRIARSKVLQLTRRGGRYL

SEQ ID NO: 7279 - DNA, 784 bp, Homo sapiens
tccccgcaactgagggagccggctccggcctcggccagcccagaaaggggctcacacagtgcagggccgggctgaagggctccttaagggcggccagagttggcgccaaggctgaggaggtgcccagagcgagcgagggctgccagggctgctagcaggctgtcacctctcaatagcagttttgtatatgggatctagcccctccctaagaggttgattctaaggaagccaacagccgtgttgtgagtacccaatggaaagtctgttgtggcagaaaactgatgtctccagccaacagcactgaggccctgagacctgccaactgtcatgttacatctcaaggagaaggattgccagatcaaaagtcttgcagttaaccaggcgtggtggcagatacctgtaatcccagctattcgggaggctgaggcaggagaatcgcttgtacccgggaggcagaggttgcagtgagctgagaccgcgccattgactcctgcctgatgacaagagagaatctacgtctcaacaacaacaacacgcttgggcactgtattaactccataatcgcctctgtgctctttcccctgtggacaataactaccatttcatcctggacacccattgtttgcctggaccacaccttgttatgaccataaccctcagtcagactcaaccttccttcaagatctgcaggtcagtcagctcccccagcaccagtcctgttttcagtaagcaagtccaagcctgaggccttccttcccttccctaaattgttgtaaggaagcag

SEQ ID NO: 7280 - protein, 49 aa, Homo sapiens
MTRENLRLNNNNTLGHCINSIIASVLFPLWTITTISSWTPIVCLDHTLL

SEQ ID NO: 7281 - DNA, 559 bp, Homo sapiens
gctggcgtgcagtgccatgatctcggctcactacaacctccatctcccagcttccagcgattctcctgcttcagcctcctgagtagctgggattagaggcacccccaaccatgcctggctaatttttgtatttttagtagagacagggtttcaccgcgttggccaggctggtctcaaactcctgacctcaagtgatcctcccgcctctgcctcccaaagtgctgagattaccatgcccggcctgtgactgagtcttaggtgatggaatgtgagcggaagtgatacacatcacttgttggaacttcagtgcagagggttgaagtaatcatattcttcagttgaagagactaaaacaactttaccagattgaaacactcaagacaaaggagcccaggaacaaaattcatcagaaaactagaggaagttttcatggagttgctgttgattctaaggaagccaacagccgtgttgtgagtacccaatggaaagtctgttgtggcagaaaactgatgtctccagccaacagcactgaggccctgagacctgccaactgtcatgt

SEQ ID NO: 7282 - protein, 32 aa, Homo sapiens
RHPQPCLANFCIFSRDRVSPRWPGWSQTPDLK

SEQ ID NO: 7283 - DNA, 2262 bp, Homo sapiens
aaatgcagggcgcagcagccgctgcagtggagccggtaggcctggccggcgggctgaaaggaagtgcgagctgtccgcccagggccgggtatccgcccctgcaggctgtggaggggatgtcaggagactggctggcctcttttcttggcccccgactccttccagtctgacactgaagactttataagcttccccccgaccaccctccacgggctccactctccacgggcctgggcttgcgccgcttcgagatcagcctgggggtcgcgccctcctggtcttgtccacgaagcgccgttcttgggccgttaggagctgctgggaagggctctgataggcccactcctcttctccacccaggagatgagaaggagggcaggcctttttaatctgatcagaatgttaacccatctctccgccttgcggtagaacccctggatacattatttgccctctcgaaaggcaggctctgaatttgattcaggtatatttcttcatagctaaccagcacaatggaaaactcagggaaagcaaataaaaaggatacacatgacgggccaccaaaagaaattaaactgcctaccagtgaagcacttctagactatcaatgtcaaataaaggaagatgccgtggagcaattcatgtttcaaataaagacacttaggaaaaagaaccaaaaatatcatgaaagaaatagccgcttaaaagaagaacagatttggcacatacggcatctactaaaggaactgagtgaagagaaggcagagggattgccagttgtaacaagagaggatgttgaagaagcgatgaaggaaaaatggaagtttgaaagagaccaggaaaaaaacttgagagatatgcgcatgcaaataagtaatgctgagaaactatttcttgagaaactcagtgaaaaggaatattgggaggagtacaagaatgtagggagtgaacgacatgctaaactcattacctccttacaaaatgacatcaacacagttaaagagaatgcagagaaaatgtcagaacactataaaatcactctggaagatactagaaagaaaataatcaaggaaactttgttgcaactggaccaaaagaaggaatgggccacacagaatgctgtaaagctcattgacaagggcagttatctagagatctgggagaatgactggctcaaaaaagaggttgcaattcacaggaaggaagttgaagaattaaaaaatgctattcatgaactggaagcagaaaatttggtgcttattgatcaactatccaactgtagacttgtggatctcaagatacccaggcgactatatcttacccaagctgctggactagaagtgccacctgaagaaatgtctttggaattgccagaaacacatatagaagagaagtcagaattgcaacccacagaagtagaaagtagagacttgatgtcctcatcagatgagagcactatcttacatcttagtcatgaaaatagcatcgaagatctccagtatgtgaagatagataaagaggaaaactcaggcacagagtttggggacactgatatgaagtacttactatatgaggatgagaaggatttcaaggattatgtaaacttgggccccctgggagtgaagcttatgagtgtggagagcaagaaaatgcccattcattttcaagagaaggaaattccagtcaaactctataaagatgtcaggagcccagaaagccacatcacatataagatgatgaagtcttttctctaagacggaaagctgcaaaggaaacacaacttttccttataaatgttctttgggaactgaagtatatccgttgcccattttacttacactttggctcatttttaaaccagctgttatttctaaaggtcatatttacatttaaaatcaaaggtattcagctattcatttacttgcatggtatgagtgaccaaaacggaagcacgctttgtatttctacactgaagtattcagaagcatgacagtgggttcaaggtagtctctgaggttccttttcacacacaaaaaattcactgattaatctgtgattccagtatgaaatagttccattagaaatgtttctaagaaaaacttagaagtttgcatagcattgtctacacatctttccctctgaggatgctcaatgtgatagacagccagtctataatgcaagccaattctccgtagtttaaccctgtgtattagtctgttctcatgctgctaataaagacataattgaaactgggtaatttat

SEQ ID NO: 7284 - protein, 413 aa, Homo sapiens
MENSGKANKKDTHDGPPKEIKLPTSEALLDYQCQIKEDAVEQFMFQIKTLRKKNQKYHERNSRLKEEQIWHIRHLLKELSEEKAEGLPVVTREDVEEAMKEKWKFERDQEKNLRDMRMQISNAEKLFLEKLSEKEYWEEYKNVGSERHAKLITSLQNDINTVKENAEKMSEHYKITLEDTRKKIIKETLLQLDQKKEWATQNAVKLIDKGSYLEIWENDWLKKEVAIHRKEVEELKNAIHELEAENLVLIDQLSNCRLVDLKIPRRLYLTQAAGLEVPPEEMSLELPETHIEEKSELQPTEVESRDLMSSSDESTILHLSHENSIEDLQYVKIDKEENSGTEFGDTDMKYLLYEDEKDFKDYVNLGPLGVKLMSVESKKMPIHFQEKEIPVKLYKDVRSPESHITYKMMKSFL

SEQ ID NO: 7285 - DNA, 2355 bp, Homo sapiens
aaatgcagggcgcagcagccgctgcagtggagccggtaggcctggccggcgggctgaaaggaagtgcgagctgtccgcccagggccgggtatccgcccctgcaggctgtggaggggatgtcaggagactggctggcctcttttcttggcccccgactccttccagtctgacactgaagactttataagcttccccccgaccaccctccacgggctccactctccacgggcctgggcttgcgccgcttcgagatcagcctgggggtcgcgccctcctggtcttgtccacgaagcgccgttcttgggccgttaggagctgctgggaagggctctgataggcccactcctcttctccacccaggagatgagaaggagggcaggcctttttaatctgatcagaatgttaacccatctctccgccttgcggtagaacccctggatacattatttgccctctcgaaaggcaggctctgaatttgattcaggtatatttcttcatagctaaccagcacaatggaaaactcagggaaagcaaataaaaaggatacacatgacgggccaccaaaagaaattaaactgcctaccagtgaagcacttctagactatcaatgtcaaataaaggaagatgccgtggagcaattcatgtttcaaataaagacacttaggaaaaagaaccaaaaatatcatgaaagaaatagccgcttaaaagaagaacagatttggcacatacggcatctactaaaggaactgagtgaagagaaggcagagggattgccagttgtaacaagagaggatgttgaagaagcgatgaaggaaaaatggaagtttgaaagagaccaggaaaaaaacttgagagatatgcgcatgcaaataagtaatgctgagaaactatttcttgagaaactcagtgaaaaggaatattgggaggagtacaagaatgtagggagtgaacgacatgctaaactcattacctccttacaaaatgacatcaacacagttaaagagaatgcagagaaaatgtcagaacactataaaatcactctggaagatactagaaagaaaataatcaaggaaactttgttgcaactggaccaaaagaaggaatgggccacacagaatgctgtaaagctcattgacaagggcagttatctagagatctgggagaatgactggctcaaaaaagaggttgcaattcacaggaaggaagttgaagaattaaaaaatgctattcatgaactggaagcagaaaatttggtgcttattgatcaactatccaactgtagacttgtggatctcaagatacccaggtatccagtgctacattcctgtcccacctctaatcctcgtcatctgctgctgctgcctttggaatcatgtctaatctctgccaggcgttgctggcgactatatcttacccaagctgctggactagaagtgccacctgaagaaatgtctttggaattgccagaaacacatatagaagagaagtcagaattgcaacccacagaagtagaaagtagagacttgatgtcctcatcagatgagagcactatcttacatcttagtcatgaaaatagcatcgaagatctccagtatgtgaagatagataaagaggaaaactcaggcacagagtttggggacactgatatgaagtacttactatatgaggatgagaaggatttcaaggattatgtaaacttgggccccctgggagtgaagcttatgagtgtggagagcaagaaaatgcccattcattttcaagagaaggaaattccagtcaaactctataaagatgtcaggagcccagaaagccacatcacatataagatgatgaagtcttttctctaagacggaaagctgcaaaggaaacacaacttttccttataaatgttctttgggaactgaagtatatccgttgcccattttacttacactttggctcatttttaaaccagctgttatttctaaaggtcatatttacatttaaaatcaaaggtattcagctattcatttacttgcatggtatgagtgaccaaaacggaagcacgctttgtatttctacactgaagtattcagaagcatgacagtgggttcaaggtagtctctgaggttccttttcacacacaaaaaattcactgattaatctgtgattccagtatgaaatagttccattagaaatgtttctaagaaaaacttagaagtttgcatagcattgtctacacatctttccctctgaggatgctcaatgtgatagacagccagtctataatgcaagccaattctccgtagtttaaccctgtgtattagtctgttctcatgctgctaataaagacataattgaaactgggtaatttat

SEQ ID NO: 7286 - protein, 444 aa, Homo sapiens; identical to SEQ ID NO: 1017

SEQ ID NO: 7287 - DNA, 566 bp, Homo sapiens
acttgctacagaacacatttgaagtaacactgctgtaagaaaatgttatgtttcttaagaaaataaaaccaagaactttaaggtcgtccttggaaggagaggctcttgtagagaaggaagagacatcattctgaccctgaagttttatcactttccaagttggtgtcagaagcgggatccgaagtggaacttctagcagccccccaggaccactgcatgacccacttgtgtccattgatctctcagagcagttggggatcctggagcctgaaggtaggatcttctgagaacatcagaaaaagactatctctaccatccacactacagcaaaactttggagccttgaaccttgggttcataatctcacaatggagaagggtccctccacactcctagaactgtacatacattggaacccttaaggtaaaactaaccaggaaagtttctccccagaagaagatggcatccttgatgtaaactgcttttcccaagatcactaatcaagacttctactattgagagacttatctttgaatatattttccttgtttatgtctctgaacaat

SEQ ID NO: 7288 - protein, 59 aa, Homo sapiens
MTHLCPLISQSSWGSWSLKVGSSENIRKRLSLPSTLQQNFGALNLGFIISQWRRVPPHS

SEQ ID NO: 7289 - DNA, 486 bp, Homo sapiens
agagatcatctatagctgggtatttaatgagttcccttcctttgtggcggaagacagccggcggttcatctcccaggagacaggcaacctttatatttctaaagtccaaacatcagatgttggcagctatatttgtctggtgaaaaacacagtgacgaatgctagagtccttagtcctccaacgccactcactctgcgtaatgatggtgtgatgggagaatatgagccgaaaattgaggtccattttcctttcacggttacagctgctaaaggaacaactgttaagatggaatgctttgcacttggcaataaatacataaaagggagtgtaaagaagactgcttcactcaagaaggtctctgtttatcacttggtgtcctttctaagaaatgtcacaattatggaaaaaagaaacatcttatgaagatgtctaccctctacctaaagaccaatctgccacccttatgaaaataaacaagatcaaag

SEQ ID NO: 7290 - protein, 70 aa, Homo sapiens
MGEYEPKIEVHFPFTVTAAKGTTVKMECFALGNKYIKGSVKKTASLKKVSVYHLVSFLRNVTIMEKRNIL

SEQ ID NO: 7291 - DNA, 1084 bp, Homo sapiens
aatcaatgctggcctgagaacaggagcggaacattgcctagtagaccctgaggctttacaacagtgccactgacccctatgtatctttcagaataaacagcgaagacttcttgctggaagcgcaagtgagggatcagccacgctggctcctggtctgccatgagggctggagccccgccctggggctgcagatctgctggagccttgggcatctcagactcactcaccacaagggagtaaacctcactgacatcaaactcaacagttcccaggagtttgctcagctctctcctagactgggaggcttcctggaggaggcgtggcagcccaggaacaactgcacttctggtcaagttgtttccctcagatgctctggtgagtcatatcttgtctcactgcacaccactgcctcatgcttcctggggcctccagcagctccactaatggaggagaggcagtagcctccgacacagaacgcatggacctcctactactgtgtgtgaggaacagtcactacccactggccagccacccagccaacaggtctctcctcttgggccctgatttcagagtcctctttctcactagagactcaatgacagaagagaggctgggacttggttgggcatgctgtggttgctgagggatgagggggaggagagaggtaggagctggagatgaagaggctgctagaagcagcaggaagcctgcccttctgccctctcccctccctgcccctgtgtgagtcttttgggagggtgctgggaggtgccccccgtcccacctttttcctgtgctctaggtgggctaagtgcctccctagaggactccatggctgagaggctcctgggcagatggggtcaaggctgggccagcccagatgaagcctatgggagtcaggaccctctccactctccctctccactccccttcctgttctcacctggctgtggctggccctgtgtggggtgggtacactggaaaacaagaaggttggagttggtctaggacattggttttaaatgacagttctgtgaactggtccaaggagttctgttattaaagtgatatatggtcttggtcc

SEQ ID NO: 7292 - protein, 76 aa, Homo sapiens
MLPGASSSSTNGGEAVASDTERMDLLLLCVRNSHYPLASHPANRSLLLGPDFRVLFLTRDSMTEERLGLGWACCGC

SEQ ID NO: 7293 - DNA, 1824 bp, Homo sapiens
gggagacctcatcttccaaccaagcttgctgggctagctttaatcaatgctggcctgagaacaggagcggaacattgcctagtagaccctgaggctttacaacagtgccactgacccctatgtgctgtatctgtgtcctgctgcctctcagcccatttccgggaccttgcaggatgaggagataactttgagctgctcagaggccagcgctgaggaagctctgctccctgcacttcccaaaacagtatctttcagaataaacagcgaagacttcttgctggaagcgcaagtgagggatcagccacgctggctcctggtctgccatgagggctggagccccgccctggggctgcagatctgctggagccttgggcatctcagactcactcaccacaagggagtaaacctcactgacatcaaactcaacagttcccaggagtttgctcagctctctcctagactgggaggcttcctggaggaggcgtggcagcccaggaacaactgcacttctggtcaagttgtttccctcagatgctctgagtgtggagcgaggcccctggcttcccggatagttggtgggcagtctgtggctcctgggcgctggccgtggcaggccagcgtggccctgggcttccggcacacgtgtgggggctctgtgctagcgccacgctgggtggtgactgctgcacattgtatgcacagtttcaggctggcccgcctgtccagctggcgggttcatgcggggctggtcagccacagtgccgtcaggccccaccaaggggctctggtggagaggattatcccacaccccctctacagtgcccagaatcatgactacgacgtcgccctcctgaggctccagaccgctctcaacttctcagacactgtgggcgctgtgtgcctgccggccaaggaacagcattttccgaagggctcgcggtgctgggtgtctggctggggccacacccaccctagccatacttacagctcggatatgctccaggacacggtggtgcccttgttcagcactcagctctgcaacagctcttgcgtgtacagcggagccctcaccccccgcatgctttgcgctggctacctggacggaagggctgatgcatgccaggctccagtctcactgcacaccactgcctcatgcttcctggggcctccagcagctccactaatggaggagaggcagtagcctccgacacagaacgcatggacctcctactactgtgtgtgaggaacagtcactacccactggccagccacccagccaacaggtctctcctcttgggccctgatttcagagtcctctttctcactagagactcaatgacagaagagaggctgggacttggttgggcatgctgtggttgctgagggatgagggggaggagagaggtaggagctggagatgaagaggctgctagaagcagcaggaagcctgcccttctgccctctcccctccctgcccctgtgtgagtcttttgggagggtgctgggaggtgccccccgtcccacctttttcctgtgctctaggtgggctaagtgcctccctagaggactccatggctgagaggctcctgggcagatggggtcaaggctgggccagcccagatgaagcctatgggagtcaggaccctctccactctccctctccactccccttcctgttctcacctggctgtggctggccctgtgtggggtgggtacactggaaaacaagaaggttggagttggtctaggacattggttttaaatgacagttctgtgaactggtccaaggagttctgttattaaagtgatatatggtcttggtcc

SEQ ID NO: 7294 - protein, 168 aa, Homo sapiens
MHSFRLARLSSWRVHAGLVSHSAVRPHQGALVERIIPHPLYSAQNHDYDVALLRLQTALNFSDTVGAVCLPAKEQHFPKGSRCWVSGWGHTHPSHTYSSDMLQDTVVPLFSTQLCNSSCVYSGALTPRMLCAGYLDGRADACQAPVSLHTTASCFLGPPAAPLMEERQ

SEQ ID NO: 7295 - DNA, 2004 bp, Homo sapiens
gggagacctcatcttccaaccaagcttgctgggctagctttaatcaatgctggcctgagaacaggagcggaacattgcctagtagaccctgaggctttacaacagtgccactgacccctatgtgctgtatctgtgtcctgctgcctctcagcccatttccgggaccttgcaggatgaggagataactttgagctgctcagaggccagcgctgaggaagctctgctccctgcacttcccaaaacagtatctttcagaataaacagcgaagacttcttgctggaagcgcaagtgagggatcagccacgctggctcctggtctgccatgagggctggagccccgccctggggctgcagatctgctggagccttgggcatctcagactcactcaccacaagggagtaaacctcactgacatcaaactcaacagttcccaggagtttgctcagctctctcctagactgggaggcttcctggaggaggcgtggcagcccaggaacaactgcacttctggtcaagttgtttccctcagatgctctgagtgtggagcgaggcccctggcttcccggatagttggtgggcagtctgtggctcctgggcgctggccgtggcaggccagcgtggccctgggcttccggcacacgtgtgggggctctgtgctagcgccacgctgggtggtgactgctgcacattgtatgcacagtttcaggctggcccgcctgtccagctggcgggttcatgcggggctggtcagccacagtgccgtcaggccccaccaaggggctctggtggagaggattatcccacaccccctctacagtgcccagaatcatgactacgacgtcgccctcctgaggctccagaccgctctcaacttctcagacactgtgggcgctgtgtgcctgccggccaaggaacagcattttccgaagggctcgcggtgctgggtgtctggctggggccacacccaccctagccatacttacagctcggatatgctccaggacacggtggtgcccttgttcagcactcagctctgcaacagctcttgcgtgtacagcggagccctcaccccccgcatgctttgcgctggctacctggacggaagggctgatgcatgccagggagatagcgggggccccctagtgtgcccagatggggacacatggcgcctagtgggggtggtcagctgggggcgtggctgcgcagagcccaatcacccaggtgtctacgccaaggtagctgagtttctggactggatccatgacactgctcaggactccctcctctgagtcctgctgtttcctccagtctcactgcacaccactgcctcatgcttcctggggcctccagcagctccactaatggaggagaggcagtagcctccgacacagaacgcatggacctcctactactgtgtgtgaggaacagtcactacccactggccagccacccagccaacaggtctctcctcttgggccctgatttcagagtcctctttctcactagagactcaatgacagaagagaggctgggacttggttgggcatgctgtggttgctgagggatgagggggaggagagaggtaggagctggagatgaagaggctgctagaagcagcaggaagcctgcccttctgccctctcccctccctgcccctgtgtgagtcttttgggagggtgctgggaggtgccccccgtcccacctttttcctgtgctctaggtgggctaagtgcctccctagaggactccatggctgagaggctcctgggcagatggggtcaaggctgggccagcccagatgaagcctatgggagtcaggaccctctccactctccctctccactccccttcctgttctcacctggctgtggctggccctgtgtggggtgggtacactggaaaacaagaaggttggagttggtctaggacattggttttaaatgacagttctgtgaactggtccaaggagttctgttattaaagtgatatatggtcttggtcc

SEQ ID NO: 7296 - protein, 198 aa, Homo sapiens
MHSFRLARLSSWRVHAGLVSHSAVRPHQGALVERIIPHPLYSAQNHDYDVALLRLQTALNFSDTVGAVCLPAKEQHFPKGSRCWVSGWGHTHPSHTYSSDMLQDTVVPLFSTQLCNSSCVYSGALTPRMLCAGYLDGRADACQGDSGGPLVCPDGDTWRLVGVVSWGRGCAEPNHPGVYAKVAEFLDWIHDTAQDSLL

SEQ ID NO: 7297 - DNA, 2236 bp, Homo sapiens
gggatacagggaggggccatgtgcgaaccagggagacctcatcttccaaccaagcttgctgggctagctttaatcaatgctggcctgagaacaggagcggaacattgcctagtagaccctgaggctttacaacagtgccactgacccctatgagcctgatgctggatgaccaaccccctatggaggcccagtatgcagaggagggcccaggacctgggatcttcagagcagagcctggagaccagcagcatcccatttctcaggcagtgtgctggcgttccatgcgacgtggctgtgcagtgctgggagccctggggctgctggccggtgcaggtgttggctcatggctcctagtgctgtatctgtgtcctgctgcctctcagcccatttccgggaccttgcaggatgaggagataactttgagctgctcagaggccagcgctgaggaagctctgctccctgcacttcccaaaacagtatctttcagaataaacagcgaagacttcttgctggaagcgcaagtgagggatcagccacgctggctcctggtctgccatgagggctggagccccgccctggggctgcagatctgctggagccttgggcatctcagactcactcaccacaagggagtaaacctcactgacatcaaactcaacagttcccaggagtttgctcagctctctcctagactgggaggcttcctggaggaggcgtggcagcccaggaacaactgcacttctggtcaagttgtttccctcagatgctctgagtgtggagcgaggcccctggcttcccggatagttggtgggcagtctgtggctcctgggcgctggccgtggcaggccagcgtggccctgggcttccggcacacgtgtgggggctctgtgctagcgccacgctgggtggtgactgctgcacattgtatgcacagtttcaggctggcccgcctgtccagctggcgggttcatgcggggctggtcagccacagtgccgtcaggccccaccaaggggctctggtggagaggattatcccacaccccctctacagtgcccagaatcatgactacgacgtcgccctcctgaggctccagaccgctctcaacttctcagacactgtgggcgctgtgtgcctgccggccaaggaacagcattttccgaagggctcgcggtgctgggtgtctggctggggccacacccaccctagccatacttacagctcggatatgctccaggacacggtggtgcccttgttcagcactcagctctgcaacagctcttgcgtgtacagcggagccctcaccccccgcatgctttgcgctggctacctggacggaagggctgatgcatgccagggagatagcgggggccccctagtgtgcccagatggggacacatggcgcctagtgggggtggtcagctgggggcgtggctgcgcagagcccaatcacccaggtgtctacgccaaggtagctgagtttctggactggatccatgacactgctcaggactccctcctctgagtcctgctgtttcctccagtctcactgcacaccactgcctcatgcttcctggggcctccagcagctccactaatggaggagaggcagtagcctccgacacagaacgcatggacctcctactactgtgtgtgaggaacagtcactacccactggccagccacccagccaacaggtctctcctcttgggccctgatttcagagtcctctttctcactagagactcaatgacagaagagaggctgggacttggttgggcatgctgtggttgctgagggatgagggggaggagagaggtaggagctggagatgaagaggctgctagaagcagcaggaagcctgcccttctgccctctcccctccctgcccctgtgtgagtcttttgggagggtgctgggaggtgccccccgtcccacctttttcctgtgctctaggtgggctaagtgcctccctagaggactccatggctgagaggctcctgggcagatggggtcaaggctgggccagcccagatgaagcctatgggagtcaggaccctctccactctccctctccactccccttcctgttctcacctggctgtggctggccctgtgtggggtgggtacactggaaaacaagaaggttggagttggtctaggacattggttttaaatgacagttctgtgaactggtccaaggagttctgttattaaagtgatatatggtcttggtcc

SEQ ID NO: 7298 - protein, 457 aa, Homo sapiens
MSLMLDDQPPMEAQYAEEGPGPGIFRAEPGDQQHPISQAVCWRSMRRGCAVLGALGLLAGAGVGSWLLVLYLCPAASQPISGTLQDEEITLSCSEASAEEALLPALPKTVSFRINSEDFLLEAQVRDQPRWLLVCHEGWSPALGLQICWSLGHLRLTHHKGVNLTDIKLNSSQEFAQLSPRLGGFLEEAWQPRNNCTSGQVVSLRCSECGARPLASRIVGGQSVAPGRWPWQASVALGFRHTCGGSVLAPRWVVTAAHCMHSFRLARLSSWRVHAGLVSHSAVRPHQGALVERIIPHPLYSAQNHDYDVALLRLQTALNFSDTVGAVCLPAKEQHFPKGSRCWVSGWGHTHPSHTYSSDMLQDTVVPLFSTQLCNSSCVYSGALTPRMLCAGYLDGRADACQGDSGGPLVCPDGDTWRLVGVVSWGRGCAEPNHPGVYAKVAEFLDWIHDTAQDSLL

SEQ ID NO: 7299 - DNA, 556 bp, Homo sapiens
atgacttggaggaatgaatgaatgatgagtgaatgagctctttgatcttctcttggtgccggacagggcagagagtgtaatccccattttaccgaggctgagagggagaagtgcctctcccatgatcacacacatttcaggctggcccgcctgtccagctggcgggttcatgcggggctggtcagccacagtgccgtcaggccccaccaaggggctctggtggagaggattatcccacaccccctctacagtgcccagaatcatgactacgacgtcgccctcctgaggctccagaccgctctcaacttctcagacactgtgggcgctgtgtgcctgccggccaaggaacagcattttccgaagggctcgcggtgctgggtgtctggctggggccacacccaccctagccatacttacagctcggatatgctccaggacacggtggtgcccttgttcagcactcagctctgcaacagctcttgcgtgtacagcggagccctcaccccccgcatgctttgcgctggctacctggacggaagggctgatgcatgccagg

SEQ ID NO: 7300 - protein, 54 aa, Homo sapiens
MITHISGWPACPAGGFMRGWSATVPSGPTKGLWWRGLSHTPSTVPRIMTTTSPS

SEQ ID NO: 7301 - DNA, 280 bp, Homo sapiens
tgtcctgtatcaaatgttcgtgtccaactgtctccagctttttgctccaaaaggtttcaggctggcccgcctgtccagctggcgggttcatgcggggctggtcagccacagtgccgtcaggccccaccaaggggctctggtggagaggattatcccacaccccctctacagtgcccagaatcatgactacgacgtcgccctcctgaggctccagaccgctctcaacttctcaggctctgcagtgggggaagccaagcctgactggggaccaggaccatgt

SEQ ID NO: 7302 - protein, 88 aa, Homo sapiens
MFVSNCLQLFAPKGFRLARLSSWRVHAGLVSHSAVRPHQGALVERIIPHPLYSAQNHDYDVALLRLQTALNFSGSAVGEAKPDWGPGP

SEQ ID NO: 7303 - DNA, 562 bp, Homo sapiens
agcgttggggaaacatgctcaacttccagcagtcattcccgctcgcctcctttctctttgctcgaggtcttcggttcaggctccacaactgattgatgctgttttcctgttagtatctctttttcatcatgcacgatcctccatagtgatggaatggagacagcttctcagagaaagcacagctttggaaggtaagtgccgtttggatggtgagaccatcagatcaatttaactaggccaagactctgatcaatgttcttaaacctatgtaacccactgccacagagatttcaaagtgaggaagggtcctggacgcccattcatccattctcaatgaattattcatttgaccagcactttctgactttctagcttcagccagacaccgtacaagggacaggggagactgagatgaagaacactcggtgcttcttcccaaggcactcgcaatctcggagaagacagatgtgtactcacacagatgcatatgctacagcactgtgtgatgatgctatacatgcacaaagtgaccgggaacagagcggccgtccctggcgactca

SEQ ID NO: 7304 - protein, 49 aa, Homo sapiens
MKNTRCFFPRHSQSRRRQMCTHTDAYATALCDDAIHAQSDREQSGRPWR

SEQ ID NO: 7305 - DNA, 4173 bp, Homo sapiens
acagactgccttcagctgcgggcggatcgggctggagccgccacggctgctgcggaagaggaaaaacggccaacagcagccccgcggccggcccggcagcgcccggcccccggctcagcccccggagtgcggagccgaccagcagatactttctgagtgcctactatgtgccagcctgtgctaggcactgaggacacaggtggaaaagcccgaattgctccctgctctcctggcgctcatcaccccggagagttatgtcatgcccaggccagcagggggctccatgaggattcatagaagatgccccgcgtctcggcgcctttggtgctgcttcctgcgtggctcgtgatggtcgcctgcagcccgcactccttgaggatcgctgctatcttggacgaccccatggagtgcagcagaggggagcggctctccatcaccctggccaagaaccgcatcaaccgcgctcctgagaggctgggcaaggccaaggtcgaagtggacatctttgagcttctcagagacagcgagtacgagactgcagaaaccatgtgtcagatcctccccaagggggtggtcgctgtcctcggaccatcgtccagcccagcctccagctccatcatcagcaacatctgtggagagaaggaggtccctcacttcaaagtggccccagaggagttcgtcaagttccagttccagagattcacaaccctgaacctccaccccagcaacactgacatcagcgtggctgtagctgggatcctgaacttcttcaactgcaccaccgcctgcctcatctgtgccaaagcagaatgccttttaaacctagagaagctgctccggcaattccttatctccaaggacacgctgtccgtccgcatgctggatgacacccgggaccccaccccgctcctcaaggagatccgggacgacaagaccgccaccatcatcatccacgccaacgcctccatgtcccacaccatcctcctgaaggcagccgaacttgggatggtgtcagcctattacacatacatcttcactaatctggagttctcactccagagaatggacagccttgtggatgatcgtgtcaacatcctgggattttccattttcaaccaatcccatgctttcttccaagagtttgcccagagcctcaaccagtcctggcaggagaactgtgaccatgtgcccttcactgggcctgcgctctcctcggccctgctgtttgatgctgtctatgctgtggtgactgcggtgcaggaactgaaccggagccaagagatcggcgtgaagcccttgtcctgcggctcggcccagatctggcagcacggcaccagcctcatgaactacctgcgcatggtagaattggaaggtcttaccggccacattgaattcaacagcaaaggccagaggtccaactacgctttgaaaatcttacagttcacaaggaatggttttcggcagatcggccagtggcacgtggcagagggcctcagcatggacagccacctctatgcctccaacatctcggacactctcttcaacaccaccctggtcgtcaccaccatcctggtaaaacccatatttaatgctgaaggggaaccaccaggagatggaaggcaatgaccgctacgagggcttctgtgtggacatgctcaaggagctggcagagatcctccgattcaactacaagatccgcctggttggggatggcgtgtacggcgttcccgaggccaacggcacctggacgggaatggtcggggagctgatcgctaggaaagcagatctggctgtggcaggcctcaccattacagctgaacgggagaaggtgattgatttctctaagccattcatgactctgggaattagcattctttaccgcgttcatatgggacgcaaacccggctatttctccttcctggacccattttctccgggcgtctggctcttcatgcttctagcctatctggccgtcagctgtgtcctcttcctggtggctcggttgacgccctacgagtggtacagcccacacccatgtgcccagggccggtgcaacctcctggtgaaccagtactccctgggcaacagcctctggtttccggtcggggggttcatgcagcaaggctccaccatcgcccctcgcgccttatccacccgctgtgtcagtggcgtctggtgggcattcacgctgatcatcatctcatcctacacggccaacctggcagccttcctgaccgtgcagcgcatggatgtgcccattgagtcagtggatgacctggctgaccagaccgccattgaatatggcacaattcacggaggctccagcatgaccttcttccaaaattcccgctaccagacctaccaacgcatgtggaattacatgtattccaagcagcccagcgtgttcgtgaagagcacagaggagggaatcgccagggtgttgaattccaactacgccttcctcctggaatccaccatgaacgagtactatcggcagcgaaactgcaacctcactcagattgggggcctgctggacaccaagggctatgggattggcatgccagtcggctcggttttccgggacgagtttgatctggccattctccagctgcaggagaacaaccgcctggagatcctgaagcgcaaatggtgggaaggagggaagtgccccaaggaggaagatcacagagctaaaggcctgggaatggagaatattggtggaatctttgtggttcttatttgtggcttaatcgtggccatttttatggctatgttggagtttttatggactctcagacactcagaagcaactgaggtgtccgtctgccaggagatggtgaccgagctgcgcagcattatcctgtgtcaggacagtatccacccccgccggcggcgcgccgcagtcccgccgccccggccccccatccccgaggagcgccgaccgcggggcacggcgacgctcagcaacgggaagctgtgcggggcaggggagcccgaccagctcgcgcagagactggcgcaggaggccgccctggtggcccgcggctgcacgcacatccgcgtctgccccgagtgccgccgcttccagggcctgcgggcacggccgtcgcccgcccgcagcgaggagagcctggagtgggagaaaaccaccaacagcagcgagcccgagtagtcccggaggccacaggacgcgcagaggccgggcggggcgggaggggaggggcggggcgggcgctgctgtcagccgccagccggaacttgtacagcgtcgacacctctccagatttcggatccagtcacttttcaaaaagatcaaggagcctgacgccccagccagagaccgcgcccggtcagggagcagggtccacccggaaacgttgcacccaaagggcaaaggacggccctccctcctgggcacaaggacccatcttctcccagtgggtctttccctctcgccaaaataacaagagtatagggtggggggtccctacccagaccagtccaatgaattggtggaatcatcagttgaatttccccctagtcaggggccaatgtaccctccgtctagttcttacagaaaaaaaaaaaattaaacagggaagtttttcttttctggatttgtatatttttgttaatgttcttttcccttttctttcctcctctccttttcttctttgtcatcttctcagtcctgttaatttgttttgtgttttttggagggggaggctgggttagggaatggaagcctaaataatccctatttcttctttttcctgaattttggaatattgcgttaccagtgcatccgatttcaggtgcttaactctctgtatggtgactgaggggcctgcaggagcacaggagaaggagtcttgggaagaatcagatggagagtctcaaaagtccattgcagtaaactttgagatgccaaaaagcaattaactcatcctatactcagaccttgaaacgcctggaatgtcaagggttaatctgtcttttctttccctttctctttctgactgtcactattactgggtttgatttgatctttttgtgaatgtagtctctgaagacagacaggggaggagaacagaatgcacaaagtatcctaggactttgtttaaggagcggaaagagcagatagaattttcccataccatggccttggcttcc

SEQ ID NO: 7306 - protein, 527 aa, Homo sapiens
MLKGNHQEMEGNDRYEGFCVDMLKELAEILRFNYKIRLVGDGVYGVPEANGTWTGMVGELIARKADLAVAGLTITAEREKVIDFSKPFMTLGISILYRVHMGRKPGYFSFLDPFSPGVWLFMLLAYLAVSCVLFLVARLTPYEWYSPHPCAQGRCNLLVNQYSLGNSLWFPVGGFMQQGSTIAPRALSTRCVSGVWWAFTLIIISSYTANLAAFLTVQRMDVPIESVDDLADQTAIEYGTIHGGSSMTFFQNSRYQTYQRMWNYMYSKQPSVFVKSTEEGIARVLNSNYAFLLESTMNEYYRQRNCNLTQIGGLLDTKGYGIGMPVGSVFRDEFDLAILQLQENNRLEILKRKWWEGGKCPKEEDHRAKGLGMENIGGIFVVLICGLIVAIFMAMLEFLWTLRHSEATEVSVCQEMVTELRSIILCQDSIHPRRRRAAVPPPRPPIPEERRPRGTATLSNGKLCGAGEPDQLAQRLAQEAALVARGCTHIRVCPECRRFQGLRARPSPARSEESLEWEKTTNSSEPE

SEQ ID NO: 7307 - DNA, 4210 bp, Homo sapiens
cccgattccccgacgtttcgggaggagtggggtcggagcgcagggctgggaagggtcttaggacccaggaaggagacgggtgcctcccagagaggaccccatcccctccgaggtccgggcggctcccggcctctccctggggtgccgtagcccccctcgacccgccttcccgcagccgcagtcgttcgggcctggaggtggccgggcatcggtgccgacgccgcgagggcagcgcccgcggcgggaatactaatgcaccctaaagggcacggccgccgccgcagcagagttatgtcatgcccaggccagcagggggctccatgaggattcatagaagatgccccgcgtctcggcgcctttggtgctgcttcctgcgtggctcgtgatggtcgcctgcagcccgcactccttgaggatcgctgctatcttggacgaccccatggagtgcagcagaggggagcggctctccatcaccctggccaagaaccgcatcaaccgcgctcctgagaggctgggcaaggccaaggtcgaagtggacatctttgagcttctcagagacagcgagtacgagactgcagaaaccatgtgtcagatcctccccaagggggtggtcgctgtcctcggaccatcgtccagcccagcctccagctccatcatcagcaacatctgtggagagaaggaggtccctcacttcaaagtggccccagaggagttcgtcaagttccagttccagagattcacaaccctgaacctccaccccagcaacactgacatcagcgtggctgtagctgggatcctgaacttcttcaactgcaccaccgcctgcctcatctgtgccaaagcagaatgccttttaaacctagagaagctgctccggcaattccttatctccaaggacacgctgtccgtccgcatgctggatgacacccgggaccccaccccgctcctcaaggagatccgggacgacaagaccgccaccatcatcatccacgccaacgcctccatgtcccacaccatcctcctgaaggcagccgaacttgggatggtgtcagcctattacacatacatcttcactaatctggagttctcactccagagaatggacagccttgtggatgatcgtgtcaacatcctgggattttccattttcaaccaatcccatgctttcttccaagagtttgcccagagcctcaaccagtcctggcaggagaactgtgaccatgtgcccttcactgggcctgcgctctcctcggccctgctgtttgatgctgtctatgctgtggtgactgcggtgcaggaactgaaccggagccaagagatcggcgtgaagcccttgtcctgcggctcggcccagatctggcagcacggcaccagcctcatgaactacctgcgcatggtagaattggaaggtcttaccggccacattgaattcaacagcaaaggccagaggtccaactacgctttgaaaatcttacagttcacaaggaatggttttcggcagatcggccagtggcacgtggcagagggcctcagcatggacagccacctctatgcctccaacatctcggacactctcttcaacaccaccctggtcgtcaccaccatcctggtaaaacccatatttaatgctgaaggggaaccaccaggagatggaaggcaatgaccgctacgagggcttctgtgtggacatgctcaaggagctggcagagatcctccgattcaactacaagatccgcctggttggggatggcgtgtacggcgttcccgaggccaacggcacctggacgggaatggtcggggagctgatcgctaggaaagcagatctggctgtggcaggcctcaccattacagctgaacgggagaaggtgattgatttctctaagccattcatgactctgggaattagcattctttaccgcgttcatatgggacgcaaacccggctatttctccttcctggacccattttctccgggcgtctggctcttcatgcttctagcctatctggccgtcagctgtgtcctcttcctggtggctcggttgacgccctacgagtggtacagcccacacccatgtgcccagggccggtgcaacctcctggtgaaccagtactccctgggcaacagcctctggtttccggtcggggggttcatgcagcaaggctccaccatcgcccctcgcgccttatccacccgctgtgtcagtggcgtctggtgggcattcacgctgatcatcatctcatcctacacggccaacctggcagccttcctgaccgtgcagcgcatggatgtgcccattgagtcagtggatgacctggctgaccagaccgccattgaatatggcacaattcacggaggctccagcatgaccttcttccaaaattcccgctaccagacctaccaacgcatgtggaattacatgtattccaagcagcccagcgtgttcgtgaagagcacagaggagggaatcgccagggtgttgaattccaactacgccttcctcctggaatccaccatgaacgagtactatcggcagcgaaactgcaacctcactcagattgggggcctgctggacaccaagggctatgggattggcatgccagtcggctcggttttccgggacgagtttgatctggccattctccagctgcaggagaacaaccgcctggagatcctgaagcgcaaatggtgggaaggagggaagtgccccaaggaggaagatcacagagctaaaggcctgggaatggagaatattggtggaatctttgtggttcttatttgtggcttaatcgtggccatttttatggctatgttggagtttttatggactctcagacactcagaagcaactgaggtgtccgtctgccaggagatggtgaccgagctgcgcagcattatcctgtgtcaggacagtatccacccccgccggcggcgcgccgcagtcccgccgccccggccccccatccccgaggagcgccgaccgcggggcacggcgacgctcagcaacgggaagctgtgcggggcaggggagcccgaccagctcgcgcagagactggcgcaggaggccgccctggtggcccgcggctgcacgcacatccgcgtctgccccgagtgccgccgcttccagggcctgcgggcacggccgtcgcccgcccgcagcgaggagagcctggagtgggagaaaaccaccaacagcagcgagcccgagtagtcccggaggccacaggacgcgcagaggccgggcggggcgggaggggaggggcggggcgggcgctgctgtcagccgccagccggaacttgtacagcgtcgacacctctccagatttcggatccagtcacttttcaaaaagatcaaggagcctgacgccccagccagagaccgcgcccggtcagggagcagggtccacccggaaacgttgcacccaaagggcaaaggacggccctccctcctgggcacaaggacccatcttctcccagtgggtctttccctctcgccaaaataacaagagtatagggtggggggtccctacccagaccagtccaatgaattggtggaatcatcagttgaatttccccctagtcaggggccaatgtaccctccgtctagttcttacagaaaaaaaaaaaattaaacagggaagtttttcttttctggatttgtatatttttgttaatgttcttttcccttttctttcctcctctccttttcttctttgtcatcttctcagtcctgttaatttgttttgtgttttttggagggggaggctgggttagggaatggaagcctaaataatccctatttcttctttttcctgaattttggaatattgcgttaccagtgcatccgatttcaggtgcttaactctctgtatggtgactgaggggcctgcaggagcacaggagaaggagtcttgggaagaatcagatggagagtctcaaaagtccattgcagtaaactttgagatgccaaaaagcaattaactcatcctatactcagaccttgaaacgcctggaatgtcaagggttaatctgtcttttctttccctttctctttctgactgtcactattactgggtttgatttgatctttttgtgaatgtagtctctgaagacagacaggggaggagaacagaatgcacaaagtatcctaggactttgtttaaggagcggaaagagcagatagaattttcccataccatggccttggcttcc

SEQ ID NO: 7308 - protein, 527 aa, Homo sapiens; identical to SEQ ID NO: 7306

SEQ ID NO: 7309 - DNA, 593 bp, Homo sapiens
gcttgaggacgatccaaggccaggcgtggtagcatgtgcctgtaatcccagtgctttgggacaccgaggcaggaggatcactcgagcccaggagtgcgaggctgcagtgacgctagacttcaggaagaccccccatttctgctcccctcctgggcttggagaagagtacagctgctcttgactggtgggaccttttgctggctaggggtgatgggagaagcaagagagggatccacacacctgcgcttagctttctatgacctgggcggatggaggccaaagctgctatcttggacgaccccatggagtgcagcagaggggagcggctctccatcaccctggccaagaaccgcatcaaccgcgctcctgagaggctgggcaaggccaaggtcgaagtggacatctttgagcttctcagagacagcgagtacgagactgcagaaaccatgtgtcagatcctccccaagggggtggtcgctgtcctcggaccatcgtccagcccagcctccagctccatcatcagcaacatctgtggagagaaggaggtccctcacttcaaagtggccccagaggagttcgtcaagttccagttc

SEQ ID NO: 7310 - protein, 126 aa, Homo sapiens
MGEAREGSTHLRLAFYDLGGWRPKLLSWTTPWSAAEGSGSPSPWPRTASTALLRGWARPRSKWTSLSFSETASTRLQKPCVRSSPRGWSLSSDHRPAQPPAPSSATSVERRRSLTSKWPQRSSSSS

SEQ ID NO: 7311 - DNA, 1039 bp, Homo sapiens
tgagtgcctactatgtgccagcctgtgctaggcactgaggacacaggtggaaaagcccgaattgctccctgctctcctggcgctcatcaccccggaggcgctgctgtcagccgccagccggaacttgtacagcgtcgacacctctccagatttcggatccagtcacttttcaaaaagatcaaggagcctgacgccccagccagagaccgcgcccggtcagggagcagggtccacccggaaacgttgcacccaaagggcaaaggacggccctccctcctgggcacaaggacccatcttctcccagtgggtctttccctctcgccaaaataacaagagtatagggtggggggtccctacccagaccagtccaatgaattggtggaatcatcagttgaatttccccctagtcaggggccaatgtaccctccgtctagttcttacagaaaaaaaaaaaattaaacagggaagtttttcttttctggatttgtatatttttgttaatgttcttttcccttttctttcctcctctccttttcttctttgtcatcttctcagtcctgttaatttgttttgtgttttttggagggggaggctgggttagggaatggaagcctaaataatccctatttcttctttttcctgaattttggaatattgcgttaccagtgcatccgatttcaggtgcttaactctctgtatggtgactgaggggcctgcaggagcacaggagaaggagtcttgggaagaatcagatggagagtctcaaaagtccattgcagtaaactttgagatgccaaaaagcaattaactcatcctatactcagaccttgaaacgcctggaatgtcaagggttaatctgtcttttctttccctttctctttctgactgtcactattactgggtttgatttgatctttttgtgaatgtagtctctgaagacagacaggggaggagaacagaatgcacaaagtatcctaggactttgtttaaggagcggaaagagcagatagaattttcccataccatggccttggcttcc

SEQ ID NO: 7312 - protein, 105 aa, Homo sapiens
MCQPVLGTEDTGGKARIAPCSPGAHHPGGAAVSRQPELVQRRHLSRFRIQSLFKKIKEPDAPARDRARSGSRVHPETLHPKGKGRPSLLGTRTHLLPVGLSLSPK

SEQ ID NO: 7313 - DNA, 526 bp, Homo sapiens
ccgcatgctggatgacacccgggaccccaccccgctcctcaaggagatccgggacgacaagaccgccaccatcatcatccacgccaacgcctccatgtcccacaccatcctcctgaaggcagccgaacttgggatggtgtcagcctattacacatacatcttcactaatctggagttcacaggccagcggggaagcatttgaggctcaaataatgatgaccgtggagagattttactaggggcggctgaggctgctggacagctctcagcagaagttggccaagttcaccaagctgcattcgactgcctgtttctctgagccatcttagccacacaagcctgcagttatactgcattgacttctaattccttcccacctgctgcaccctggtacttgctgtgactccttttctgggttcttcatgctgaacagatgcgatgtgaggcaaacctcagctctctcatgttctcagtgaagtgctcagttttgcctggcgcacagttggtggtcagtaaattgtagtag

SEQ ID NO: 7314 - protein, 65 aa, Homo sapiens
MLDDTRDPTPLLKEIRDDKTATIIIHANASMSHTILLKAAELGMVSAYYTYIFTNLEFTGQRGSI

SEQ ID NO: 7315 - DNA, 569 bp, Homo sapiens
ttaggtagggctcaagatgggtgggcagcggaaactgggtgaactttaatcccttccattcctgaaatgtgttcgttttatgaaatatctctctccgcaaaatgtctccaccacttgactttggatttctaagaaatgtttctctgaatagatgtagagtagcatttcccagattgcgttctgaagcacgccactgccaggcactcatggattttggaggagaaaaaaaaacccatagtcctgctttgttccatggctatcccatgagtcattataaatagaatgaattatcaaggaagcttctggaatctttttatcttaagaggcctttgaaagttgcatagaattgtgggacaagaagaacatgcatttgaagggaatacctttctaacttgtggaactgaagaggcagaaagccagaagctaccccagatttcacggatctgaagcccagaaggttacagaccttgccgaaagtcaaacagccagtatggagttctcactccagagaatggacagccttgtggatgatcgtgtcaacatcctgggattttccattttcaaccaat

SEQ ID NO: 7316 - protein, 59 aa, Homo sapiens
MSPPLDFGFLRNVSLNRCRVAFPRLRSEARHCQALMDFGGEKKTHSPALFHGYPMSHYK

SEQ ID NO: 7317 - DNA, 546 bp, Homo sapiens
aaaaaggcaggaagacagactggctgacttctgggtagactgtctctaagtgtctgtaattaactcattcattcttactccgcccagaacatgcatttgaagggaatacctttctaacttgtggaactgaagaggcagaaagccagaagctaccccagatttcacggatctgaagcccagaaggttacagaccttgccgaaagtcaaacagccagtatggagttctcactccagagaatggacagccttgtggatgatcgtgtcaacatcctgggattttccattttcaaccaatcccatgctttcttccaagagtttgcccagagcctcaaccagtcctggcaggagaactgtgaccatgtgcccttcactgggcctgcggtaagtacccgccagagctcttcctggtgccccttggcctctgcacattgcccctctgtgggccaacccctgggcaacacatcttcttggagtccagccgtctcctgctccagtcccagctcagaaagggaggtagagaggtgtgggaagtggttgcagggtatg

SEQ ID NO: 7318 - protein, 109 aa, Homo sapiens
MEFSLQRMDSLVDDRVNILGFSIFNQSHAFFQEFAQSLNQSWQENCDHVPFTGPAVSTRQSSSWCPLASAHCPSVGQPLGNTSSWSPAVSCSSPSSEREVERCGKWLQG

SEQ ID NO: 7319 - DNA, 6313 bp, Homo sapiens
aggagacatagctctttcatcactgacaatctgtggctctgcctccggccaaatccctttgctccaccctgctgacacctgccccccaaacctcctgtaggaacagctgttttgtaagccgcttccacatgcccacatgtgcaggcttgattttgcttcaaataatgtctctccttggctccctctatactttctgtctctctcacttgctctgcctttccactgtttagaggccccaggggttgcagtgaaggaggagaaggtatggatttggacagggccgctgctagcctacaaacagcatcttaatgcagataagaaaaaagcacccctctgggctgatgtggccctgccactgcaccctgggaatgcagagttcgagctggacttcatccttgggtgttgcacaaccagaaccagcaacgcaaagttggacaggagtttaacccggcttctctgctgatgagctacgtgaacttggggaaacaagcaactgccactgctaccaggaatcctgaagaagagggcacggctgcttatgtcaagaagagaaaggaacctggccactgcccccctatctgcccattctataaggctcagttgaaggtcacttcctcctacaagaccccacgatattgtttcttcctaaatgtgcctaatattagtccactttgtactgtacaacttgatgagtaggtatgaagcacatggtaagttcaaagcccaaagatgagtaggagcctattcctgtgattacagcaggatggggaagggaggtatgaggagacagggcacaaacaagaggaacatgagacagagtgtggtaggtccacaaaggtcttcctggggagggttccaaagagggaaacatctggttgggcaatcaagaaagtctttcatggaggatgctgcattggaactgagcactgaaggatggggagtcgctgagaagagggaaaggcattccagagcgtggaactgcaggaacaaagactagaaagtggagagttggaccactcctagaaggagaggagggcagaggaggggcggggctggaggaagcaatccatcactcacatggcaggggtcctgccatgcggggcctgaaagtcagggaagaggtcagcatagttgtgtgcccacattttcatcttccctattaaaatgcaagcttctcagggcagggaacacacaggaccttaatctctatattctgcacagcatctgtcatggggcctgtcgtgtggctggcccctaagacatttgcttgacttgaattaacttctggctgaaatttgcccactacccaataagtggatacaatgtttgcagcctgtggggaggggaaagctgggtatcttggtggaggtggtaggagtggaaagacagaagacacctgtccttgaggaacgtgccatctaaggaggagataataccacactatgttaatgtatgcggggtccctggcaaaaaacaaacaaacaaacaaacaaacaaaaccctagcaagtgcaattgactatacactcagtactgtgccaaggccctgagggggtccaggaaggcaggtggaggcctcctgggaggagtggtgttacagggctagaagtccacacagagtcccattacaaggcaagttccttcactgaaacacgacattccatcactggcgactcaacattgccccttccgagcctcctctttcaactgatggcatccttgtgagggtcccacatgagacccttgtgagagcacccttgtgagaccaccattccaggggaccaactgcttacagcctgcctccctcctagccagccctgggacaccggcccctccacggttggatggagggatgctgtctcggggtttttcaagctctccaggcagagtgtaagcagtgtgagacagtgaggtgtcgaggaaagagcttaaaagcatgaacaccaagtccagagtccagatcccagcccctcactatgtgctgagtgatcccaggcatgtgaatccctccaagtgagcaacaatttctgttacctgtaaaagagaagcagcagtccctgcctcacaagtctgtaaaagtgctctgcaaactgccagcgtcagaagacagcattcctgagggcaggggctgtgccccctcaggtccagacagatgttagcaggtgctcaggaagccggtgttgactgaactaagtaaggctccagggagtggtaaggacagggggctacaggcagggtggatgggcttatttcctacccagttttgctacatgttgggccaggaggcctatgaggggaactgggtgagccagctctggataatctctttaaaaggcaattacagagcaaaacagtcaacaaagtttgtctgttccagtccaagttcacccgcatcacaaaactacctggctggtgtatgctttcttcctccctctctctctccctccctctcttgctgctgcttctcctccttgccttgcttctttgctttattcccacttttattcagccactaccatctggcaggtaccatagacctcaacaccttcccactctccacagagatactggatcaggccactgccctcggcctccgtcgagtctcctgcctcccctgctccaactcccttcctgtctgtcccttggtcccagagcctcctggaacccgaagactaagcaacaaaggacacccaattctcaccatggggaacagtgcacacctctgcagtcttgctgagctaggatgaggtgggctgagccaccacactcccgagtccctccatccatcatcttctactctctcttctctgcttccctgctcttcccctttgccctcagctccttcttcatttgattcgccctgcatggtaatgaatgctcctttgcaagcctacaaccgtccttgtccttccatgtaactcgctttcccctgagcacatgtggctcttttattaatgggcctctcacatgccacagactaatgctgcagattctccctttccggcttagacaaattgacagcaagttagctgccccaactgaaactggcttctagatccttctgtttggctatttaaatgatgctataaaccaatttctgtcccaccttctcccttgcctcccagttaatctcaccattctcagattcccaaaatcgtggagtgattgagctggaagaaattctagaagacaactcatccggccgggcgcagtggctcatgcctgtaatcccaaccctttgggaggccgaggcaggtggatcactttgaggtcagaggttcgagaccacccttgccaacacggtgaaaccccatctctagtataaatacaaaaatcaactgggtgtggttgtgtgcgcctgtaatcccagctactcgggaggctgaggcaggagaatcgcttgaacctgggaggcggcggctgcagtgagccaagattgcaccactgcactccagcctgggcaacagagtaagactccatctcagaaaacaaacaaacaaaaccaaaaaaaaaaaaaaccactcatctgtcttctttcacgaatgaagaaactgaggcacaaggcattcttctcttgcccaaggtcacaaagcaaggcctggaggcccagtaccctttgtccagactggcttcctcccctctccacagcactgtcttccacctccctccctccgagaagcctaggttgtcattgctctatcagatttattcttatgcctcatctcccaggacaacttggggcaatctttcattgttgccttctctgcagcagatgggagcatgggactctggcaccggggtgggggcaggaagggatggtgggcaggcttctctaatgccctatgttggggccatcacccagtttgcctcctggaaagactggttgtttgtcctcacgttagcccctcagttaacagccattagccattggctgcctacctagcacccattctccccttcttcctcccatttgatttaggtatccttccctgtcccaaactgtaaggagcttcagaggaggctgagtcagccccaggtcccagggaatcctgggtggtccaaggtccccatgccaatatgtgatttgggacagtgtgagtgaccccactgaaacaatgagccatgaactgaggcctggaatgaggggcttgcttctcaggaaagtttcctgtctcctaaaaggacgctcctctctcctctggacatgtctgtgtctggttgggatgcttggactgctgcagccagcccagctccagcctgagcatgaagctgtaaccaagtggggacacagcagagatggaaaagatttggcctccaacctcaccactccggaatcttgctaagccacgcaataacacatttccgttttctcacaagacgttttgatacagggtttctgttgccgagagtactctggtaccaaggccctggggatccctttcctctcagaggcattgttgcaccagtccccagtgtctacaggccccctccccaggccccctcttcctccagtgaggctgtgtgctggtccccaagagaccgtcatcacggcagatttgcagaggaagcaccacgccatttctcacatcctcccaccaggcccccagctggttcctgccacacggttgccactattcccactccgtctgggacatggttttcttggctgatgctctcttattagcacatgatgtggatgctgagatccgtgcatgcctgttggcaatgttctttggcatctctaattccatggccttcaagattcttcgagtgcttctagtactaatgccagctagggatgctgggcacagggagcaggtagaaggaaaatcctcaaggttgtggtctcctctccacctgtgtgtggccttcagaggggtgaaaccactgacgtgtcccccgtaggctctgggcttcacagttcctctctgtggttcagcctgggctggtcagagctgaccctttctaaaccccaaacgtcttctcccccgctgcagtctcctcgggttcctccacccatcaccaggcactgtcttctgcaggctcctgccaatctgcccacgcttctcacctggatccttcaaactgctctgagaattcacctcccaacccttgtgcctgcagctctctcctcacagtcaccaatctcctgccctcaccgaatttctcctctgatggcgtgcgagcctgtcatctctctgcctcatcaatttttccaccttgtttcagatctccatcccaaagcatctttctccctctcctaattgttttttccctccgctattacttactcatttagctctggaaagcatttggggctacagtcagggagaagcagtttctgttacaaaagccctcctggccggacacagtggctcacgcctataataatctcagcactttgggaagccgaggcgagcagatcacgaggtcaggagatcgagaccatcctggccaacacggtgaaaccccatctctactaaaaatacaaaaaaaaaaatagctgggcatggtggcacatgcctgtactcccagctacttgggaggctgaggcaggagaattgcttgaacccaggaggcagaggttgcagtgagccgagattgtgccactgcactccagcctgggcgagcaagactccgtctcaaaaaaaaaaagccctccatccatgtctccacttctgggctcatcaggggaaggaggcaccgcccccccccccatttccaccccttctctgctctctcaatacatttccttttcctttctgtctttccatggcctctactcctcatctgtgtgtgcacgcctctcgcttttgtctctgcttctcctgtccctgtctcttctaaatattaaataccccaaatggctcaatcctcatttaaaatcctctcctctttcttggccccaaaacgttgcttggcaatgaaccctcgattctcttgtttttatattttcatttggttcttcattgttattttcttttgagctgtttgcaaattgtttaggggaatgcaaggctctgtataaattaagatgaatcagttctgactcagggagctgtggctgagttccttccccctcccatgacatgaaaataagaatatctcctacatacacacctgtaaccctcatctctctccatgccccagatgacgggattcccaggatcctcccagatgcccatttgtctctgaacttctgcagcttaaactctaccccccaatataataccaggacaggaaccattaaaatcccatggaatagttcttacaatctggattttattcaatgaaataaacacttaattacaaac

SEQ ID NO: 7320 - protein, 77 aa, Homo sapiens
MSYVNLGKQATATATRNPEEEGTAAYVKKRKEPGHCPPICPFYKAQLKVTSSYKTPRYCFFLNVPNISPLCTVQLDE

SEQ ID NO: 7321 - DNA, 614 bp, Homo sapiens
gccaacggcacctggacgggaatggtcggggagctgatcgctaggaaagcagatctggctgtggcaggcctcaccattacagctgaacgggagaaggtgattgatttctctaagccattcatgactctgggaattagcattctttaccgcgttcatatgggacgcaaacccggctatttctccttcctggacccattttctccgggcgtctggctcttcatgcttctagcctatctggccgtcagctgtgtcctcttcctggtggctcggtgggcattcacgctgatcatcatctcatcctacacggccaacctggcagccttcctgaccgtgcagcgcatggatgtgcccattgagtcagtggatgacctggctgaccagaccgccattgaatatggcacaattcacggaggctccagcatgaccttcttccaaaattcccgctaccagacctaccaacgcatgtggaattacatgtattccaagcagcccagcgtgttcgtgaagagcacagaggagggaatcgccagggtgttgaattccaactacgccttcctcctggaatccaccatgaacgagtactatcggcagcgaaactgcaacctcactcagat

SEQ ID NO: 7322 - protein, 196 aa, Homo sapiens
MVGELIARKADLAVAGLTITAEREKVIDFSKPFMTLGISILYRVHMGRKPGYFSFLDPFSPGVWLFMLLAYLAVSCVLFLVARWAFTLIIISSYTANLAAFLTVQRMDVPIESVDDLADQTAIEYGTIHGGSSMTFFQNSRYQTYQRMWNYMYSKQPSVFVKSTEEGIARVLNSNYAFLLESTMNEYYRQRNCNLT

SEQ ID NO: 7323 - DNA, 774 bp, Homo sapiens
ggccagaagaggagaggaatcctcaccaaacagtcaggacagatcatcgagagagaaggaatctacattccctcgccaaatgcaacactagaagtgaacacagacttggaagttggcaacgtgcttgagaaatgctagggtgacttatctgggctgcaggcaagggagcaaagtgacccatggggccaatcaccaacacaggatccaccaagtattgaatgaccattcttggtcatcgctattcagagaggcagaagtaatttttactggaaagcccacaagcatgacttttccatcccttcagtttgcaagttcgtgcagatgataggagaaaaaatagcccagcacatttgcatttaagtcttgaaatctaaatatttccatgagtcattcattattcccgtataactcagtgtttgcatgcaaataactttaatgacataaatgcttataaaataagtctcttaccatatgaacgcggtaaagaatgctaattcccagagtcatgaatggcttagagaaatcaatcaccttctcccgttcagctgtaatggtgaggcctgccacagccagatctgctttctgaaaagaacagagacagcccgtcagtggggtggccataggagaagaggcacagagacttgcgaccagcaaccgtcactgctattggagatgtgatgctggtctggcttcttgcttgaggagtggctctaagtcaacactgcatacagatctgaatgatcactcataaaagtacatggatattgaagctat

SEQ ID NO: 7324 - protein, 68 aa, Homo sapiens [sequence omitted]

SEQ ID NO: 7325 - DNA, 901 bp, Homo sapiens
cttcctggagacctgagctcctgttctccatggtgatccattcagtgacttctccaaactatctggtaacagtattggctcagaccacggaactgccctttgataccaattgcaagttctctgacccactgtggatccatgctcagtctgcatacaacactcaggacagatcatcgagagagaaggaatctacattccctcgccaaatgcaacactagaagtgaacacagacttggaagttggcaacgtgcttgagaaatgctagggtgacttatctgggctgcaggcaagggagcaaagtgacccatggggccaatcaccaacacaggatccaccaagtattgaatgaccattcttggtcatcgctattcagagaggcagaagtaatttttactggaaagcccacaagcatgacttttccatcccttcagtttgcaagttcgtgcagatgataggagaaaaaatagcccagcacatttgcatttaagtcttgaaatctaaatatttccatgagtcattcattattcccgtataactcagtgtttgcatgcaaataactttaatgacataaatgcttataaaataagtctcttaccatatgaacgcggtaaagaatgctaattcccagagtcatgaatggcttagagaaatcaatcaccttctcccgttcagctgtaatggtgaggcctgccacagccagatctgctttctgaaaagaacagagacagcccgtcagtggggtggccataggagaagaggcacagagacttgcgaccagcaaccgtcactgctattggagatgtgatgctggtctggcttcttgcttgaggagtggctctaagtcaacactgcatacagatctgaatgatcactcataaaagtacatggatattgaagctat

SEQ ID NO: 7326 - protein, 62 aa, Homo sapiens
MVIHSVTSPNYLVTVLAQTTELPFDTNCKFSDPLWIHAQSAYNTQDRSSREKESTFPRQMQH

SEQ ID NO: 7327 - DNA, 6916 bp, Homo sapiens
tgttggagcagaatggaaaagctcctctctgtttaatgagaccagtacatgaatgaaatgggagggatgcattccatatttaaaatcattttctttgtccaagaaattttagtatacattgttgaatggtaatgtttttaatgactaggaaaaataacatgatgatattttaatatgatgatattttaaggtttatgtactatttccaacctgatgaatgattctagataaagaagttttgctagtaatctcatctaccctaatacctccatgcaatattgtttcttggttccattaatcaagaaacaactgattagatctttttatttcctctaacacatattgaacagtgtcaagacatgaagcaagaatgctggaaatatacataattatataattcatatacatataacataatataatattgtcttaatttaccatgtatctattatgtgtattatataattaccaatgatacctattattttatacttattttattcttcattagcccaggaagaaagaaggcattgtttccattacaagtaaaggaaacagagtctgggagggcagtaacttgcttgaggccacacattagtggtcagatgcagagccaggagtctttctacagtgagaattgcagcgttcttgcagcagatcttctatttcttaatatgaagaagtattgtgtcttttttacttaccatgctgtattacttcttaaaactcttctagaattaaatgaatcctagttttgatcaaatgtgaccgaaagatttcctatcctccatctcctgcttttcttttctggtgtgttttctcttgggcagctggatgatggggttggcatgctgggaagctggcacacggttcgagtcccaggaagtgaaaatgagctccatttagctgagctggagccatctagtctttatgaagtcttgatggtagcaagaagcgcagcaggtgaaggccaacctgccatgcttaccttccgaaccagcaaagaaaaaacagcgtcatcaaaaaacacccaggcatcctctccacccgtgggcatccctaagtatcccgttgtttcagaggctgcaaacaacaattttggagtggtacttacagattcctctaggcacagtggagttccagaggcaccagatcggcctaccatctccactgcatcagagacatcagtctatgtcacttggattcctcgggcaaacgggggttctccaatcactgccttcaaagtcgaatataaacggatgaggaccagcaattggctggtggcagctgaagacatccctccttccaaactttcagtggaagttcgtagtttagaaccaggttcaacatacaaatttagggtcattgccatcaaccattatggtgagagttttcggagttcagcatctcgtccttatcaagtggttgggttccccaatcgcttttccagccgtccaataactggacctcacattgcatacacagaggctgtcagcgatactcagatcatgctaaagtggacgtacattccatcaagtaacaataacactcccattcaaggattttatatctattaccgaccaacagatagtgacaatgacagtgattacaagagggatgttgtagaaggttcaaagcagtggcacatgattggccacctgcagccagaaacctcctatgacattaaaatgcaatgcttcaatgaaggaggagaaagtgaatttagcaatgtgatgatctgcgagactaaagtgaaacgtgttcctggagcttctgaatatcctgtcaaagacttgagtacccctccaaattctttgggaagtggaggaaatgtggggcctgcaaccagccctgccagaagcagtgacatgttatatctgatcgttggctgtgtgctgggcgtcatggtcctcattctgatggttttcattgcaatgtgcctgtggaagaatcgccagcagaataccatacaaaaatatgacccaccaggatatctctaccaaggatcagatatgaacgggcagatggtggactacaccactctctcaggagcaagtcagataaatggaaatgttcacggaggcttcctaaccaatggcggtctcagcagtggctattcccaccttcaccataaggtccccaatgcagtcaatggaattgtgaatgggagcctaaatggagggctttactccgggcacagcaactctctaaccaggacacacgtggattttgaacatcctcatcatctagtgaatggtggtggaatgtacacggccgtgcctcagattgaccctctggagtgtgttaactgccgaaattgtcgaaacaacaataggtgtttcaccaaaaccaacagcactttcagcagcagccctcctcctgtggtccctgtggtagcaccttatcctcaggatggtttggaaatgaagcccctcagtcacgtgaaggtgcctgtatgcctgacttccgcagtccctgattgtggccagttgccggaggagagcgtcaaggacaatgtggaaccagtccctactcagcgtacctgctgtcaggacattgtaaatgacgtcagctctgatggctcagaagatccagcagagttcagcagaggagacagctgtgcccattcagaaacagagatcaacattgtaagttggaatgctcttattttgccacctgtccccgagggctgtgctgagaagacaatgtggtctccacctggcattcctttagacagcccgacagaggtccttcagcagccccgggaaacctgaggacatgcaaacaaccagtcatgttccaacttcaagccggtaactgcacacaacaggcctgggagcgaactgtgtgaaggaccttaattcaaatcagagaaaatcattatttatttttttgtagtagtaatgtcatatgaatgtatcttaaaacgtgtgcccttttatattatttatgccttaaatgttttcttccccattccttcctccccctcggtaggaaacaaccttgttttgcatagtattcagtcacctggagggcagaggggtccttccatgttttctaacagctatagtgacagcaagagctcctcatgcaaaggatcccatctcttggctgcttcggctaggagggaatgcaggggcccgttgaaggttgccaccagctgggttttcaggtggaaaatggtctttcaatagtgtattctcagacttttttttgtttgttttttgagatggagtcttgctgtcatccaggctggagtgcaatggctcgatcttggctcactgcaacctccgcctcccaggttcaagcaattctcccgcctcagcctcctgagtagctgggactacaggcacctgccaccacgtccagctaattgtcttgtatttttattagagacaaggtttcaggctggttttgaactcctgacctcaagtgatccacccgcctccgcctcccaaagtgcgaggattacaggcgtgagccaccacgtctggcctgtattatcagacttcctgagaacactttgaaatcaactgcagttgtgacccatgtttataataacagacctggctgacggattttacaagagtgccttccacagaagtggtaatgtgacctgttgactttgtatctgcacgtgggcacgagtgatgttcagtttgctaggcactagtcatagtgttatggacgtggtggagtgtaaggtcttgatgaattacggcagtatgcagaaaaggaaccaaggccagagagacaaataatgcctcatgtcccactgctttaaaattacattaatttataaaatggccactatgggctctttttgactgtttctcggagtaggaacaaaataagacattaaatggtggcttgaagagaaagatacacattttcagaagaaagaaaggggagggctgcagggagcctgtcttggcgggagctctccagtctgttggattagcacagggacacgcttatggtgccatgacgccgaaactagtcatcccccatctccagcataggcaacggcctgcaggggtgagtgtcagaaaagacttactttggaagaaaagggtttttttttgtttgtttgttttttgtttttttttgtttgtttgttttgggtttttttcctgaaatttcctgatacctttttcagaatgtcacccttgtaaataggcacctaaagccaagttggtcagcagagctcctgaccacggctgcctctgcgtgacaaggacatttgcagctgcctttggaaggctcttcacattaaaaaacaataattatgtaagtgtgtttcatagcttgagtcaagctttcaaggatcactgctcctttgtgcattgtgcatccctttggggaaagaaacagaaaattattctctttctatagagtcaagcaattccagcagaagtgaagaaatgttagtttcccagaaatcgcagtggaatagaatacaatactgtgttaaccaactttctgtataaatgcatcagtattcccttacatatgtctatatattttataatagaactgttagtgaaaatgtgcttgtttaagctgggtcactatgcaagagttacttccagtagaatgtagtgaatgtaattccctagtcggatattagggatgctgtagacccaagttctacattccagatgtccgtgcctatagtatactggatttattcttcatgttgcttaaatgcagttagctctggagggggatagctgcatcccttacttctgtgactagcaaaggacaaagtcccagcgcacagaatatgaaaacataccctgtgttagccaatcaagttacagcaatgctgtcacaaagggagttttagaaaactggggagtcattgtccgtagacagccattttgatttaggaaacaggtgtattagcatgagccttaggtcatgaactgcttttaaagattgagtttgaatatgggatctgtccacgaggaagagaaaatggctttacctttaggacaatctcattgtggactgctttatttatattattagtaacgctgttttaagtgttattctttttattgtattttatttataaaaaatgcctttatatattgaaatatataaatatatatatataaacacacacacacacacacacacacacatatatatatatatatataattgcctttatatttaggcggtatgagttctccctaagcgtgagttggctctgccctgcacaggcacccaaacagtcctacctaatgtcacttcaccaggaaatgagaggacatggtacagtgtgggagacagcactaacacgtgctgaataactactgtgtaccaggcactgtgctcggtgcttgttactgttaactcatttaacccccacaactcatctacaaagttggcattaaaatccccaagtcactcagtgagccatgggacctgaatccgaacctagtttatctggagccataatctgggctcctcccatttttccatactgctttccaaaagcattgtggttcactctttggatggaaccagtcccgttccgtatgctgtgatctatccctgccgtggaattcctccgaggctccaactccgcagccagagaagctgctctctggcctccgcgggcagagctctgcttatgacttcgtcttccagaggtccacatttctccccttgacgccccctgtctaccacctccacctggaaatttgatctttactgtgctcagtgatcacgaaattggtcaagcctattcatgttccttctcatctagaattctgtgtgattgttttagcataaactgccccgctcccactgtatcatttcacgatctccttttaatgtttttctttcagttttgcactgacagtctggtgacaggtgctgccagggtgcaagttacattgcaatgttctaaaccttttgaagtgttcttagcaaaagcctttctttctgggtgtttttgtcgaatgagtctatgaagactcaatgcatccatcttgggctgatcatgccacagatctcattccagctatagtactgccaagaagtgaagtttatcattgaattttacctgtgttgctctcttttaaagtaatgactttgagatgcatgctttgtatcatattgaaaagtatgttttattttccttaaagttgtaatattgtgtgtgaaactgtacatattttaaatgatgtagctttggcaggttttatttggttgatatgattttatattaaaagagaaggctgctttcatatagcatagcccctgaaggtgggaatactccctgtttgtacaacgctgcttatagtttgtgattggggtgggcgaatgtcttcctctgaaattctttggaaccccccacccctgtcctcccctgaaactcccctgtgcacacccctctgttctgactgcagagatcaaggccctgaaggagcaggatcttgggcaagtgttttaggggacgctgagaacatacctgaccctgggggcgatgtggaggcaggcccacctcctcggggcaactttgcgtttccttggagggaagggaggtgggtaggagaggagcttgggaggatgaggaggagcggtcccgcctcacacattgtctatttttaccattaaccgagcgccacatgtttatgaacttcaggatagaaatttagcctccttgtgaaaacgttttgttttactgccctaagaaaatacacatctctaggcttgtctgaccagaaagccagcaaagtcttttgcatcgggtgtggcccttttgtattttatttcccatatttaaataagccttccttaaaccctagccccagtcctgagagctttgagggtagccgaaaccccttatctaataaagtctaactctgtgagaaccacagaatcttcttaagcttctcaa

SEQ ID NO: 7328 - protein, 641 aa, Homo sapiens
MLGSWHTVRVPGSENELHLAELEPSSLYEVLMVARSAAGEGQPAMLTFRTSKEKTASSKNTQASSPPVGIPKYPVVSEAANNNFGVVLTDSSRHSGVPEAPDRPTISTASETSVYVTWIPRANGGSPITAFKVEYKRMRTSNWLVAAEDIPPSKLSVEVRSLEPGSTYKFRVIAINHYGESFRSSASRPYQVVGFPNRFSSRPITGPHIAYTEAVSDTQIMLKWTYIPSSNNNTPIQGFYIYYRPTDSDNDSDYKRDVVEGSKQWHMIGHLQPETSYDIKMQCFNEGGESEFSNVMICETKVKRVPGASEYPVKDLSTPPNSLGSGGNVGPATSPARSSDMLYLIVGCVLGVMVLILMVFIAMCLWKNRQQNTIQKYDPPGYLYQGSDMNGQMVDYTTLSGASQINGNVHGGFLTNGGLSSGYSHLHHKVPNAVNGIVNGSLNGGLYSGHSNSLTRTHVDFEHPHHLVNGGGMYTAVPQIDPLECVNCRNCRNNNRCFTKTNSTFSSSPPPVVPVVAPYPQDGLEMKPLSHVKVPVCLTSAVPDCGQLPEESVKDNVEPVPTQRTCCQDIVNDVSSDGSEDPAEFSRGDSCAHSETEINIVSWNALILPPVPEGCAEKTMWSPPGIPLDSPTEVLQQPRET

SEQ ID NO: 7329 - DNA, 8065 bp, Homo sapiens
gtctctccaagggaatgaaaggtgaggggagcgtgagtgcaggcatgatgggaatctccgtgacttgtgaaccaaggactgggttttgctctggaagcctgtcctgattgcttctgtaatctggcgctatgcatccggatcttggacccttatgtacactgctgtatgttactcttacaattctgtgctcttctgtgagttcagacttggcaccttattttacttctgagccgctctctgctgtccagaaacttggtggacctgtagtactgcattgttctgctcaacctgtgaccactcgtatctcatggctgcataacggaaaaacattggatggaaacctggaacatgttaagattcatcaggggactctgacaattctttctctcaactcctctcttttgggttactaccagtgccttgccaacaatagcatcggtgccattgtgagtggccctgcgacagtatctgtggcagttcttggtgattttggttcatccacaaagcatgttattacagcagaagaaaaaagtgctggtttcattggctgcagggtaccggagagtaaccccaaagctgaggtgcgctataaaatccggggaaaatggctggaacattccacagagaattacttaatccttccatcaggaaatcttcagattttgaatgtatccttagaggacaagggatcatacaaatgtgcagcttataatcctgtcacacatcaattaaaagttgaacctattggccgaaagctccttgtgagtcgtccttcttcagatgatgttcacattcttcaccccacccattcacaggcattagctgttctttctcgtagccctgtaaccttggagtgtgtggtgagtggggtcccggctcctcaagtgtattggctaaaggacgggcaggacattgcaccaggaagcaactggagaaggttgtattctcatcttgccactgatagcgttgacccggcggactccggaaactattcctgcatggcgggaaacaagtctggagatgtaaaatatgtgacttacatggttaatgtacttgaacatgcttccatttctaaaggactacaggatcagatagtgtctctgggtgccacagtacactttacctgcgacgttcatgggaacccagcccccaactgtacctggtttcacaatgcacagcctattcatccttctgcacgacatctaactgcaggaaacggactgaaaatcagtggggttactgtggaagatgttgggatgtatcagtgtgtagcagataatgggattggatttatgcactctactggaagacttgaaattgaaaatgacggtggattcaagccagttataattacggcaccagtaagtgcaaaggttgcagacggagactttgttactctgtcctgcaatgccagtgggctgccggttccggtcattcgttggtatgacagccatggattgataaccagccatccatctcaagtcctgagatcgaaatcccgaaaatcacagttatcaagacctgagggcttgaacctggagcctgtgtacttcgtcctgtcccaagctggtgcaagctctctccatattcaggctgtgactcaggaacatgcggggaaatacatctgcgaagctgcaaatgaacatggtaccacacaggcagaagcatctctcatggttgttccttttgaaacaaatacaaaagcagagacagtcacacttcctgatgctgctcagaatgatgacagaagtaagagagatggttcagaaactgggttactgagctcatttccggtgaaggtccatcccagtgcagtggaatcagcaccagagaaaaacgccagcggcatctctgttcctgatgcccccatcatactgagccccccacagacccacacaccagacacgtacaacctggtgtggagggcaggcaaggatggtgggctgcccatcaatgcttactttgtgaagtatcgaaagctggatgatggggttggcatgctgggaagctggcacacggttcgagtcccaggaagtgaaaatgagctccatttagctgagctggagccatctagtctttatgaagtcttgatggtagcaagaagcgcagcaggtgaaggccaacctgccatgcttaccttccgaaccagcaaagaaaaaacagcgtcatcaaaaaacacccaggcatcctctccacccgtgggcatccctaagtatcccgttgtttcagaggctgcaaacaacaattttggagtggtacttacagattcctctaggcacagtggagttccagaggcaccagatcggcctaccatctccactgcatcagagacatcagtctatgtcacttggattcctcgggcaaacgggggttctccaatcactgccttcaaagtcgaatataaacggatgaggaccagcaattggctggtggcagctgaagacatccctccttccaaactttcagtggaagttcgtagtttagaaccaggttcaacatacaaatttagggtcattgccatcaaccattatggtgagagttttcggagttcagcatctcgtccttatcaagtggttgggttccccaatcgcttttccagccgtccaataactggacctcacattgcatacacagaggctgtcagcgatactcagatcatgctaaagtggacgtacattccatcaagtaacaataacactcccattcaaggattttatatctattaccgaccaacagatagtgacaatgacagtgattacaagagggatgttgtagaaggttcaaagcagtggcacatgattggccacctgcagccagaaacctcctatgacattaaaatgcaatgcttcaatgaaggaggagaaagtgaatttagcaatgtgatgatctgcgagactaaagtgaaacgtgttcctggagcttctgaatatcctgtcaaagacttgagtacccctccaaattctttgggaagtggaggaaatgtggggcctgcaaccagccctgccagaagcagtgacatgttatatctgatcgttggctgtgtgctgggcgtcatggtcctcattctgatggttttcattgcaatgtgcctgtggaagaatcgccagcagaataccatacaaaaatatgacccaccaggatatctctaccaaggatcagatatgaacgggcagatggtggactacaccactctctcaggagcaagtcagataaatggaaatgttcacggaggcttcctaaccaatggcggtctcagcagtggctattcccaccttcaccataaggtccccaatgcagtcaatggaattgtgaatgggagcctaaatggagggctttactccgggcacagcaactctctaaccaggacacacgtggattttgaacatcctcatcatctagtgaatggtggtggaatgtacacggccgtgcctcagattgaccctctggagtgtgttaactgccgaaattgtcgaaacaacaataggtgtttcaccaaaaccaacagcactttcagcagcagccctcctcctgtggtccctgtggtagcaccttatcctcaggatggtttggaaatgaagcccctcagtcacgtgaaggtgcctgtatgcctgacttccgcagtccctgattgtggccagttgccggaggagagcgtcaaggacaatgtggaaccagtccctactcagcgtacctgctgtcaggacattgtaaatgacgtcagctctgatggctcagaagatccagcagagttcagcagaggagacagctgtgcccattcagaaacagagatcaacattgtaagttggaatgctcttattttgccacctgtccccgagggctgtgctgagaagacaatgtggtctccacctggcattcctttagacagcccgacagaggtccttcagcagccccgggaaacctgaggacatgcaaacaaccagtcatgttccaacttcaagccggtaactgcacacaacaggcctgggagcgaactgtgtgaaggaccttaattcaaatcagagaaaatcattatttatttttttgtagtagtaatgtcatatgaatgtatcttaaaacgtgtgcccttttatattatttatgccttaaatgttttcttccccattccttcctccccctcggtaggaaacaaccttgttttgcatagtattcagtcacctggagggcagaggggtccttccatgttttctaacagctatagtgacagcaagagctcctcatgcaaaggatcccatctcttggctgcttcggctaggagggaatgcaggggcccgttgaaggttgccaccagctgggttttcaggtggaaaatggtctttcaatagtgtattctcagacttttttttgtttgttttttgagatggagtcttgctgtcatccaggctggagtgcaatggctcgatcttggctcactgcaacctccgcctcccaggttcaagcaattctcccgcctcagcctcctgagtagctgggactacaggcacctgccaccacgtccagctaattgtcttgtatttttattagagacaaggtttcaggctggttttgaactcctgacctcaagtgatccacccgcctccgcctcccaaagtgcgaggattacaggcgtgagccaccacgtctggcctgtattatcagacttcctgagaacactttgaaatcaactgcagttgtgacccatgtttataataacagacctggctgacggattttacaagagtgccttccacagaagtggtaatgtgacctgttgactttgtatctgcacgtgggcacgagtgatgttcagtttgctaggcactagtcatagtgttatggacgtggtggagtgtaaggtcttgatgaattacggcagtatgcagaaaaggaaccaaggccagagagacaaataatgcctcatgtcccactgctttaaaattacattaatttataaaatggccactatgggctctttttgactgtttctcggagtaggaacaaaataagacattaaatggtggcttgaagagaaagatacacattttcagaagaaagaaaggggagggctgcagggagcctgtcttggcgggagctctccagtctgttggattagcacagggacacgcttatggtgccatgacgccgaaactagtcatcccccatctccagcataggcaacggcctgcaggggtgagtgtcagaaaagacttactttggaagaaaagggtttttttttgtttgtttgttttttgtttttttttgtttgtttgttttgggtttttttcctgaaatttcctgatacctttttcagaatgtcacccttgtaaataggcacctaaagccaagttggtcagcagagctcctgaccacggctgcctctgcgtgacaaggacatttgcagctgcctttggaaggctcttcacattaaaaaacaataattatgtaagtgtgtttcatagcttgagtcaagctttcaaggatcactgctcctttgtgcattgtgcatccctttggggaaagaaacagaaaattattctctttctatagagtcaagcaattccagcagaagtgaagaaatgttagtttcccagaaatcgcagtggaatagaatacaatactgtgttaaccaactttctgtataaatgcatcagtattcccttacatatgtctatatattttataatagaactgttagtgaaaatgtgcttgtttaagctgggtcactatgcaagagttacttccagtagaatgtagtgaatgtaattccctagtcggatattagggatgctgtagacccaagttctacattccagatgtccgtgcctatagtatactggatttattcttcatgttgcttaaatgcagttagctctggagggggatagctgcatcccttacttctgtgactagcaaaggacaaagtcccagcgcacagaatatgaaaacataccctgtgttagccaatcaagttacagcaatgctgtcacaaagggagttttagaaaactggggagtcattgtccgtagacagccattttgatttaggaaacaggtgtattagcatgagccttaggtcatgaactgcttttaaagattgagtttgaatatgggatctgtccacgaggaagagaaaatggctttacctttaggacaatctcattgtggactgctttatttatattattagtaacgctgttttaagtgttattctttttattgtattttatttataaaaaatgcctttatatattgaaatatataaatatatatatataaacacacacacacacacacacacacacatatatatatatatatataattgcctttatatttaggcggtatgagttctccctaagcgtgagttggctctgccctgcacaggcacccaaacagtcctacctaatgtcacttcaccaggaaatgagaggacatggtacagtgtgggagacagcactaacacgtgctgaataactactgtgtaccaggcactgtgctcggtgcttgttactgttaactcatttaacccccacaactcatctacaaagttggcattaaaatccccaagtcactcagtgagccatgggacctgaatccgaacctagtttatctggagccataatctgggctcctcccatttttccatactgctttccaaaagcattgtggttcactctttggatggaaccagtcccgttccgtatgctgtgatctatccctgccgtggaattcctccgaggctccaactccgcagccagagaagctgctctctggcctccgcgggcagagctctgcttatgacttcgtcttccagaggtccacatttctccccttgacgccccctgtctaccacctccacctggaaatttgatctttactgtgctcagtgatcacgaaattggtcaagcctattcatgttccttctcatctagaattctgtgtgattgttttagcataaactgccccgctcccactgtatcatttcacgatctccttttaatgtttttctttcagttttgcactgacagtctggtgacaggtgctgccagggtgcaagttacattgcaatgttctaaaccttttgaagtgttcttagcaaaagcctttctttctgggtgtttttgtcgaatgagtctatgaagactcaatgcatccatcttgggctgatcatgccacagatctcattccagctatagtactgccaagaagtgaagtttatcattgaattttacctgtgttgctctcttttaaagtaatgactttgagatgcatgctttgtatcatattgaaaagtatgttttattttccttaaagttgtaatattgtgtgtgaaactgtacatattttaaatgatgtagctttggcaggttttatttggttgatatgattttatattaaaagagaaggctgctttcatatagcatagcccctgaaggtgggaatactccctgtttgtacaacgctgcttatagtttgtgattggggtgggcgaatgtcttcctctgaaattctttggaaccccccacccctgtcctcccctgaaactcccctgtgcacacccctctgttctgactgcagagatcaaggccctgaaggagcaggatcttgggcaagtgttttaggggacgctgagaacatacctgaccctgggggcgatgtggaggcaggcccacctcctcggggcaactttgcgtttccttggagggaagggaggtgggtaggagaggagcttgggaggatgaggaggagcggtcccgcctcacacattgtctatttttaccattaaccgagcgccacatgtttatgaacttcaggatagaaatttagcctccttgtgaaaacgttttgttttactgccctaagaaaatacacatctctaggcttgtctgaccagaaagccagcaaagtcttttgcatcgggtgtggcccttttgtattttatttcccatatttaaataagccttccttaaaccctagccccagtcctgagagctttgagggtagccgaaaccccttatctaataaagtctaactctgtgagaaccacagaatcttcttaagcttctcaa

SEQ ID NO: 7330 - protein, 1264 aa, Homo sapiens; identical to SEQ ID NO: 1027

SEQ ID NO: 7331 - DNA, 6894 bp, Homo sapiens
tgttggagcagaatggaaaagctcctctctgtttaatgagaccagtacatgaatgaaatgggagggatgcattccatatttaaaatcattttctttgtccaagaaattttagtatacattgttgaatggtaatgtttttaatgactaggaaaaataacatgatgatattttaatatgatgatattttaaggtttatgtactatttccaacctgatgaatgattctagataaagaagttttgctagtaatctcatctaccctaatacctccatgcaatattgtttcttggttccattaatcaagaaacaactgattagatctttttatttcctctaacacatattgaacagtgtcaagacatgaagcaagaatgctggaaatatacataattatataattcatatacatataacataatataatattgtcttaatttaccatgtatctattatgtgtattatataattaccaatgatacctattattttatacttattttattcttcattagcccaggaagaaagaaggcattgtttccattacaagtaaaggaaacagagtctgggagggcagtaacttgcttgaggccacacattagtggtcagatgcagagccaggagtctttctacagtgagaattgcagcgttcttgcagcagatcttctatttcttaatatgaagaagtattgtgtcttttttacttaccatgctgtattacttcttaaaactcttctagaattaaatgaatcctagttttgatcaaatgtgaccgaaagatttcctatcctccatctcctgcttttcttttctggtgtgttttctcttgggcagctggatgatggggttggcatgctgggaagctggcacacggttcgagtcccaggaagtgaaaatgagctccatttagctgagctggagccatctagtctttatgaagtcttgatggtagcaagaagcgcagcaggtgaaggccaacctgccatgcttaccttccgaaccagcaaagaaaaaacagcgtcatcaaaaaacacccaggcatcctctccacccgtgggcatccctaagtatcccgttgtttcagaggctgcaaacaacaattttggagtggtacttacagattcctctaggcacagtggagttccagaggcaccagatcggcctaccatctccactgcatcagagacatcagtctatgtcacttggattcctcgggcaaacgggggttctccaatcactgccttcaaagtcgaatataaacggatgaggaccagcaattggctggtggcagctgaagacatccctccttccaaactttcagtggaagttcgtagtttagaaccaggttcaacatacaaatttagggtcattgccatcaaccattatggtgagagttttcggagttcagcatctcgtccttatcaagtggttgggttccccaatcgcttttccagccgtccaataactggacctcacattgcatacacagaggctgtcagcgatactcagatcatgctaaagtggacgtacattccatcaagtaacaataacactcccattcaaggattttatatctattaccgaccaacagatagtgacaatgacagtgattacaagagggatgttgtagaaggttcaaagcagtggcacatgattggccacctgcagccagaaacctcctatgacattaaaatgcaatgcttcaatgaaggaggagaaagtgaatttagcaatgtgatgatctgcgagactaaagtgaaacgtgttcctggagcttctgaatatcctgtcaaagacttgagtacccctccaaattctttgggaagtggaggaaatgtggggcctgcaaccagccctgccagaagcagtgacatgttatatctgatcgttggctgtgtgctgggcgtcatggtcctcattctgatggttttcattgcaatgtgcctgtggaagaatcgccagcagaataccatacaaaaatatgacccaccaggatatctctaccaaggatcagatatgaacgggcagatggtggactacaccactctctcaggagcaagtcagataaatggaaatgttcacggaggcttcctaaccaatggcggtctcagcagtggctattcccaccttcaccataaggtccccaatgcagtcaatggaattgtgaatgggagcctaaatggagggctttactccgggcacagcaactctctaaccaggacacacgtggattttgaacatcctcatcatctagtgaatggtggtggaatgtacacggccgtgcctcagattgaccctctggagtgtgttaactgccgaaattgtcgaaacaacaataggtgtttcaccaaaaccaacagcactttcagcagcagccctcctcctgtggtccctgtggtagcaccttatcctcaggatggtttggaaatgaagcccctcagtcacgtgaaggtgcctgtatgcctgacttccgcagtccctgattgtggccagttgccggaggagagcgtcaaggacaatgtggaaccagtccctactcagcgtacctgctgtcaggacattgtaaatgacgtcagctctgatggctcagaagatccagcagagttcagcagaggagacagctgtgcccattcagaaacagagatcaacattgtaagttggaatgctcttattttgccacctgtccccgagggctgtgctgagaagacaatgtggtctccacctggcattcctttagacagcccgacagaggtccttcagcagccccgggaaacctgaggacatgcaaacaaccagtcatgttccaacttcaagccggtaactgcacacaacaggcctgggagcgaactgtgtgaaggaccttaattcaaatcagagaaaatcattatttatttttttgtagtagtaatgtcatatgaatgtatcttaaaacgtgtgcccttttatattatttatgccttaaatgttttcttccccattccttcctccccctcggtaggaaacaaccttgttttgcatagtattcagtcacctggagggcagaggggtccttccatgttttctaacagctatagtgacagcaagagctcctcatgcaaaggatcccatctcttggctgcttcggctaggagggaatgcaggggcccgttgaaggttgccaccagctgggttttcaggtggaaaatggtctttcaatagtgtattctcagacttttttttgtttgttttttgagatggagtcttgctgtcatccaggctggagtgcaatggctcgatcttggctcactgcaacctccgcctcccaggttcaagcaattctcccgcctcagcctcctgagtagctgggactacaggcacctgccaccacgtccagctaattgtcttgtatttttattagagacaaggtttcaggctggttttgaactcctgacctcaagtgatccacccgcctccgcctcccaaagtgcgaggattacaggcgtgagccaccacgtctggcctgtattatcagacttcctgagaacactttgaaatcaactgcagttgtgacccatgtttataataacagacctggctgacggattttacaagagtgccttccacagaagtggtaatgtgacctgttgactttgtatctgcacgtgggcacgagtgatgttcagtttgctaggcactagtcatagtgttatggacgtggtggagtgtaaggtcttgatgaattacggcagtatgcagaaaaggaaccaaggccagagagacaaataatgcctcatgtcccactgctttaaaattacattaatttataaaatggccactatgggctctttttgactgtttctcggagtaggaacaaaataagacattaaatggtggcttgaagagaaagatacacattttcagaagaaagaaaggggagggctgcagggagcctgtcttggcgggagctctccagtctgttggattagcacagggacacgcttatggtgccatgacgccgaaactagtcatcccccatctccagcataggcaacggcctgcaggggtgagtgtcagaaaagacttactttggaagaaaagggtttttttttgtttgtttgttttttgtttttttttgtttgtttgttttgggtttttttcctgaaatttcctgatacctttttcagaatgtcacccttgtaaataggcacctaaagccaagttggtcagcagagctcctgaccacggctgcctctgcgtgacaaggacatttgcagctgcctttggaaggctcttcacattaaaaaacaataattatgtaagtgtgtttcatagcttgagtcaagctttcaaggatcactgctcctttgtgcattgtgcatccctttggggaaagaaacagaaaattattctctttctatagagtcaagcaattccagcagaagtgaagaaatgttagtttcccagaaatcgcagtggaatagaatacaatactgtgttaaccaactttctgtataaatgcatcagtattcccttacatatgtctatatattttataatagaactgttagtgaaaatgtgcttgtttaagctgggtcactatgcaagagttacttccagtagaatgtagtgaatgtaattccctagtcggatattagggatgctgtagacccaagttctacattccagatgtccgtgcctatagtatactggatttattcttcatgttgcttaaatgcagttagctctggagggggatagctgcatcccttacttctgtgactagcaaaggacaaagtcccagcgcacagaatatgaaaacataccctgtgttagccaatcaagttacagcaatgctgtcacaaagggagttttagaaaactggggagtcattgtccgtagacagccattttgatttaggaaacaggtgtattagcatgagccttaggtcatgaactgcttttaaagattgagtttgaatatgggatctgtccacgaggaagagaaaatggctttacctttaggacaatctcattgtggactgctttatttatattattagtaacgctgttttaagtgttattctttttattgtattttatttataaaaaatgcctttatatattgaaatatataaatatatatatataaacacacacacacacacacacacacacatatatatatatatatataattgcctttatatttaggcggtatgagttctccctaagcgtgagttggctctgccctgcacaggcacccaaacagtcctacctaatgtcacttcaccaggaaatgagaggacatggtacagtgtgggagacagcactaacacgtgctgaataactactgtgtaccaggcactgtgctcggtgcttgttactgttaactcatttaacccccacaactcatctacaaagttggcattaaaatccccaagtcactcagtgagccatgggacctgaatccgaacctagtttatctggagccataatctgggctcctcccatttttccatactgctttccaaaagcattgtggttcactctttggatggaaccagtcccgttccgtatgctgtgatctatccctgccgtggaattcctccgaggctccaactccgcagccagagaagctgctctctggcctccgcgggcagagctctgcttatgacttcgtcttccagaggtccacatttctccccttgacgccccctgtctaccacctccacctggaaatttgatctttactgtgctcagtgatcacgaaattggtcaagcctattcatgttccttctcatctagaattctgtgtgattgttttagcataaactgccccgctcccactgtatcatttcacgatctccttttaatgtttttctttcagttttgcactgacagtctggtgacaggtgctgccagggtgcaagttacattgcaatgttctaaaccttttgaagtgttcttagcaaaagcctttctttctgggtgtttttgtcgaatgagtctatgaagactcaatgcatccatcttgggctgatcatgccacagatctcattccagctatagtactgccaagaagtgaagtttatcattgaattttacctgtgttgctctcttttaaagtaatgactttgagatgcatgctttgtatcatattgaaaagtatgttttattttccttaaagttgtaatattgtgtgtgaaactgtacatattttaaatgatgtagctttggcaggttttatttggttgatatgattttatattaaaagagaaggctgctttcatatagcatagcccctgaaggtgggaatactccctgtttgtacaacgctgcttatagtttgtgattggggtgggcgaatgtcttcctctgaaattctttggaaccccccacccctgtcctcccctgaaactcccctgtgcacacccctctgttctgactgcagagatcaaggccctgaaggagcaggatcttgggcaagtgttttaggggacgctgagaacatacctgaccctgggggcgatgtggaggcaggcccacctcctcggggcaactttgcgtttccttggagggaagggaggtgggtaggagaggagcttgggaggatgaggaggagcggtcccgcctcacacattgtctatttttaccattaaccgagcgccacatgtttatgaacttcaggatagaaatttagcctccttgtgaaaacgttttgttttactgccctaagaaaatacacatctctaggcttgtctgaccagaaagccagcaaagtcttttgcatcgggtgtggcccttttgtattttatttcccatatttaaataagccttccttaaaccctagccccagtcctgagagctttgagggtagccgaaaccccttatctaataaagtctaactctgtgagaaccac

SEQ ID NO: 7332 - protein, 641 aa, Homo sapiens; identical to SEQ ID NO: 7328

SEQ ID NO: 7333 - DNA, 6279 bp, Homo sapiens
tgttggagcagaatggaaaagctcctctctgtttaatgagaccagtacatgaatgaaatgggagggatgcattccatatttaaaatcattttctttgtccaagaaattttagtatacattgttgaatggtaatgtttttaatgactaggaaaaataacatgatgatattttaatatgatgatattttaaggtttatgtactatttccaacctgatgaatgattctagataaagaagttttgctagtaatctcatctaccctaatacctccatgcaatattgtttcttggttccattaatcaagaaacaactgattagatctttttatttcctctaacacatattgaacagtgtcaagacatgaagcaagaatgctggaaatatacataattatataattcatatacatataacataatataatattgtcttaatttaccatgtatctattatgtgtattatataattaccaatgatacctattattttatacttattttattcttcattagcccaggaagaaagaaggcattgtttccattacaagtaaaggaaacagagtctgggagggcagtaacttgcttgaggccacacattagtggtcagatgcagagccaggagtctttctacagtgagaattgcagcgttcttgcagcagatcttctatttcttaatatgaagaagtattgtgtcttttttacttaccatgctgtattacttcttaaaactcttctagaattaaatgaatcctagttttgatcaaatgtgaccgaaagatttcctatcctccatctcctgcttttcttttctggtgtgttttctcttgggcagctggatgatggggttggcatgctgggaagctggcacacggttcgagtcccaggaagtgaaaatgagctccatttagctgagctggagccatctagtctttatgaagtcttgatggtagcaagaagcgcagcaggtgaaggccaacctgccatgcttaccttccgaaccagcaaagaaaaaacagcgtcatcaaaaaacacccaggcatcctctccacccgtgggcatccctaagtatcccgttgtttcagaggctgcaaacaacaattttggagtggtacttacagattcctctaggcacagtggagttccagaggcaccagatcggcctaccatctccactgcatcagagacatcagtctatgtcacttggattcctcgggcaaacgggggttctccaatcactgccttcaaagtcgaatataaacggatgaggaccagcaattggctggtggcagctgaagacatccctccttccaaactttcagtggaagttcgtagtttagaaccaggttcaacatacaaatttagggtcattgccatcaaccattatggtgagagttttcggagttcagcatctcgtccttatcaagtggttgggttccccaatcgcttttccagccgtccaataactggacctcacattgcatacacagaggctgtcagcgatactcagatcatgctaaagtggacgtacattccatcaagtaacaataacactcccattcaaggattttatatctattaccgaccaacagatagtgacaatgacagtgattacaagagggatgttgtagaaggttcaaagcagtggcacatgattggccacctgcagccagaaacctcctatgacattaaaatgcaatgcttcaatgaaggaggagaaagtgaatttagcaatgtgatgatctgcgagactaaagtgaaacgtgttcctggagcttctgaatatcctgtcaaagacttgagtacccctccaaattctttgggaagtggaggaaatgtggggcctgcaaccagccctgccagaagcagtgacatgttatatctgatcgttggctgtgtgctgggcgtcatggtcctcattctgatggttttcattgcaatgtgcctgtggaagaatcgccagcagaataccatacaaaaatatgacccaccaggatatctctaccaaggatcagatatgaacgggcagatggtggactacaccactctctcaggagcaagtcagataaatggaaatgttcacggaggcttcctaaccaatggcggtctcagcagtggctattcccaccttcaccataaggtccccaatgcagtcaatggaattgtgaatgggagcctaaatggagggctttactccgggcacagcaactctctaaccaggacacacgtggattttgaacatcctcatcatctagtgaatggtggtggaatgtacacggccgtgcctcagattgaccctctggagtgtgttaactgccgaaattgtcgaaacaacaataggtgtttcaccaaaaccaacagcactttcagcagcagccctcctcctgtggtccctgtggtagcaccttatcctcaggatggtttggaaatgaagcccctcagtcacgtgaaggtgcctgtatgcctgacttccgcagtccctgattgtggccagttgccggaggagagcgtcaaggacaatgtggaaccagtccctactcagcgtacctgctgtcaggacattgtaaatgacgtcagctctgatggctcagaagatccagcagagttcagcagaggagacagctgtgcccattcagaaacagagatcaacattgtaagttggaatgctcttattttgccacctgtccccgagggctgtgctgagaagacaatgtggtctccacctggcattcctttagacagcccgacagaggtccttcagcagccccgggaaacctgaggacatgcaaacaaccagtcatgttccaacttcaagccggtaactgcacacaacaggcctgggagcgaactgtgtgaaggaccttaattcaaatcagagaaaatcattatttatttttttgtagtagtaatgtcatatgaatgtatcttaaaacgtgtgcccttttatattatttatgccttaaatgttttcttccccattccttcctccccctcggtaggaaacaaccttgttttgcatagtattcagtcacctggagggcagaggggtccttccatgttttctaacagctatagtgacagcaagagctcctcatgcaaaggatcccatctcttggctgcttcggctaggagggaatgcaggggcccgttgaaggttgccaccagctgggttttcaggtggaaaatggtctttcaatagtgtattctcagacttttttttgtttgttttttgagatggagtcttgctgtcatccaggctggagtgcaatggctcgatcttggctcactgcaacctccgcctcccaggttcaagcaattctcccgcctcagcctcctgagtagctgggactacaggcacctgccaccacgtccagctaattgtcttgtatttttattagagacaaggtttcaggctggttttgaactcctgacctcaagtgatccacccgcctccgcctcccaaagtgcgaggattacaggcgtgagccaccacgtctggcctgtattatcagacttcctgagaacactttgaaatcaactgcagttgtgacccatgtttataataacagacctggctgacggattttacaagagtgccttccacagaagtggtaatgtgacctgttgactttgtatctgcacgtgggcacgagtgatgttcagtttgctaggcactagtcatagtgttatggacgtggtggagtgtaaggtcttgatgaattacggcagtatgcagaaaaggaaccaaggccagagagacaaataatgcctcatgtcccactgctttaaaattacattaatttataaaatggccactatgggctctttttgactgtttctcggagtaggaacaaaataagacattaaatggtggcttgaagagaaagatacacattttcagaagaaagaaaggggagggctgcagggagcctgtcttggcgggagctctccagtctgttggattagcacagggacacgcttatggtgccatgacgccgaaactagtcatcccccatctccagcataggcaacggcctgcaggggtgagtgtcagaaaagacttactttggaagaaaagggtttttttttgtttgtttgttttttgtttttttttgtttgtttgttttgggtttttttcctgaaatttcctgatacctttttcagaatgtcacccttgtaaataggcacctaaagccaagttggtcagcagagctcctgaccacggctgcctctgcgtgacaaggacatttgcagctgcctttggaaggctcttcacattaaaaaacaataattatgtaagtgtgtttcatagcttgagtcaagctttcaaggatcactgctcctttgtgcattgtgcatccctttggggaaagaaacagaaaattattctctttctatagagtcaagcaattccagcagaagtgaagaaatgttagtttcccagaaatcgcagtggaatagaatacaatactgtgttaaccaactttctgtataaatgcatcagtattcccttacatatgtctatatattttataatagaactgttagtgaaaatgtgcttgtttaagctgggtcactatgcaagagttacttccagtagaatgtagtgaatgtaattccctagtcggatattagggatgctgtagacccaagttctacattccagatgtccgtgcctatagtatactggatttattcttcatgttgcttaaatgcagttagctctggagggggatagctgcatcccttacttctgtgactagcaaaggacaaagtcccagcgcacagaatatgaaaacataccctgtgttagccaatcaagttacagcaatgctgtcacaaagggagttttagaaaactggggagtcattgtccgtagacagccattttgatttaggaaacaggtgtattagcatgagccttaggtcatgaactgcttttaaagattgagtttgaatatgggatctgtccacgaggaagagaaaatggctttacctttaggacaatctcattgtggactgctttatttatattattagtaacgctgttttaagtgttattctttttattgtattttatttataaaaaatgcctttatatattgaaatatataaatatatatatataaacacacacacacacacacacacacacatatatatatatatatataattgcctttatatttaggcggtatgagttctccctaagcgtgagttggctctgccctgcacaggcacccaaacagtcctacctaatgtcacttcaccaggaaatgagaggacatggtacagtgtgggagacagcactaacacgtgctgaataactactgtgtaccaggcactgtgctcggtgcttgttactgttaactcatttaacccccacaactcatctacaaagttggcattaaaatccccaagtcactcagtgagccatgggacctgaatccgaacctagtttatctggagccataatctgggctcctcccatttttccatactgctttccaaaagcattgtggttcactctttggatggaaccagtcccgttccgtatgctgtgatctatccctgccgtggaattcctccgaggctccaactccgcagccagagaagctgctctctggcctccgcgggcagagctctgcttatgacttcgtcttccagaggtccacatttctccccttgacgccccctgtctaccacctccacctggaaatttgatctttactgtgctcagtgatcacgaaattggtcaagcctattcatgttccttctcatctagaattctgtgtgattgttttagcataaactgccccgctcccactgtatcatttcacgatctccttttaatgtttttctttcagttttgcactgacagtctggtgacaggtgctgccagggtgcaagttacattgcaatgttctaaaccttttgaagtgttcttagcaaaagcctttctttctgggtgtttttgtcgaatgagtctatgaagactcaatgcatccatcttgggctgatcatgccacagatctcattccagctatagtactgccaagaagtgaagtttatcattgaattttacctgtgttgctctcttttaaagtaatgactttgagatgcatgctttgtatcatattgaaaagtatgttttattttccttaaagttgtaatattgtgtgtgaaactgtacatattttaaatgatgtagctttggcaggttttatttggttgatatgattttatattaaaagagaaggctgctttcatatagcatagcccctg

SEQ ID NO: 7334 - protein, 641 aa, Homo sapiens; identical to SEQ ID NO: 7328

SEQ ID NO: 7335 - DNA, 5510 bp, Homo sapiens
gtctctccaagggaatgaaaggtgaggggagcgtgagtgcaggcatgatgggaatctccgtgacttgtgaaccaaggactgggttttgctctggaagcctgtcctgattgcttctgtaatctggcgctatgcatccggatcttggacccttatgtacactgctgtatgttactcttacaattctgtgctcttctgtgagttcagacttggcaccttattttacttctgagccgctctctgctgtccagaaacttggtggacctgtagtactgcattgttctgctcaacctgtgaccactcgtatctcatggctgcataacggaaaaacattggatggaaacctggaacatgttaagattcatcaggggactctgacaattctttctctcaactcctctcttttgggttactaccagtgccttgccaacaatagcatcggtgccattgtgagtggccctgcgacagtatctgtggcagttcttggtgattttggttcatccacaaagcatgttattacagcagaagaaaaaagtgctggtttcattggctgcagggtaccggagagtaaccccaaagctgaggtgcgctataaaatccggggaaaatggctggaacattccacagagaattacttaatccttccatcaggaaatcttcagattttgaatgtatccttagaggacaagggatcatacaaatgtgcagcttataatcctgtcacacatcaattaaaagttgaacctattggccgaaagctccttgtgagtcgtccttcttcagatgatgttcacattcttcaccccacccattcacaggcattagctgttctttctcgtagccctgtaaccttggagtgtgtggtgagtggggtcccggctcctcaagtgtattggctaaaggacgggcaggacattgcaccaggaagcaactggagaaggttgtattctcatcttgccactgatagcgttgacccggcggactccggaaactattcctgcatggcgggaaacaagtctggagatgtaaaatatgtgacttacatggttaatgtacttgaacatgcttccatttctaaaggactacaggatcagatagtgtctctgggtgccacagtacactttacctgcgacgttcatgggaacccagcccccaactgtacctggtttcacaatgcacagcctattcatccttctgcacgacatctaactgcaggaaacggactgaaaatcagtggggttactgtggaagatgttgggatgtatcagtgtgtagcagataatgggattggatttatgcactctactggaagacttgaaattgaaaatgacggtggattcaagccagttataattacggcaccagtaagtgcaaaggttgcagacggagactttgttactctgtcctgcaatgccagtgggctgccggttccggtcattcgttggtatgacagccatggattgataaccagccatccatctcaagtcctgagatcgaaatcccgaaaatcacagttatcaagacctgagggcttgaacctggagcctgtgtacttcgtcctgtcccaagctggtgcaagctctctccatattcaggctgtgactcaggaacatgcggggaaatacatctgcgaagctgcaaatgaacatggtaccacacaggcagaagcatctctcatggttgttccttttgaaacaaatacaaaagcagagacagtcacacttcctgatgctgctcagaatgatgacagaagtaagagagatggttcagaaactgggttactgagctcatttccggtgaaggtccatcccagtgcagtggaatcagcaccagagaaaaacgccagcggcatctctgttcctgatgcccccatcatactgagccccccacagacccacacaccagacacgtacaacctggtgtggagggcaggcaaggatggtgggctgcccatcaatgcttactttgtgaagtatcgaaagctggatgatggggttggcatgctgggaagctggcacacggttcgagtcccaggaagtgaaaatgagctccatttagctgagctggagccatctagtctttatgaagtcttgatggtagcaagaagcgcagcaggtgaaggccaacctgccatgcttaccttccgaaccagcaaagaaaaaacagcgtcatcaaaaaacacccaggcatcctctccacccgtgggcatccctaagtatcccgttgtttcagaggctgcaaacaacaattttggagtggtacttacagattcctctaggcacagtggagttccagaggcaccagatcggcctaccatctccactgcatcagagacatcagtctatgtcacttggattcctcgggcaaacgggggttctccaatcactgccttcaaagtcgaatataaacggatgaggaccagcaattggctggtggcagctgaagacatccctccttccaaactttcagtggaagttcgtagtttagaaccaggttcaacatacaaatttagggtcattgccatcaaccattatggtgagagttttcggagttcagcatctcgtccttatcaagtggttgggttccccaatcgcttttccagccgtccaataactggacctcacattgcatacacagaggctgtcagcgatactcagatcatgctaaagtggacgtacattccatcaagtaacaataacactcccattcaaggattttatatctattaccgaccaacagatagtgacaatgacagtgattacaagagggatgttgtagaaggttcaaagcagtggcacatgattggccacctgcagccagaaacctcctatgacattaaaatgcaatgcttcaatgaaggaggagaaagtgaatttagcaatgtgatgatctgcgagactaaagtgaaacgtgttcctggagcttctgaatatcctgtcaaagacttgagtacccctccaaattctttgggaagtggaggaaatgtggggcctgcaaccagccctgccagaagcagtgacatgttatatctgatcgttggctgtgtgctgggcgtcatggtcctcattctgatggttttcattgcaatgtgcctgtggaagaatcgccagcagaataccatacaaaaatatgacccaccaggatatctctaccaaggatcagatatgaacgggcagatggtggactacaccactctctcaggagcaagtcagataaatggaaatgttcacggaggcttcctaaccaatggcggtctcagcagtggctattcccaccttcaccataaggtccccaatgcagtcaatggaattgtgaatgggagcctaaatggagggctttactccgggcacagcaactctctaaccaggacacacgtggattttgaacatcctcatcatctagtgaatggtggtggaatgtacacggccgtgcctcagattgaccctctggagtgtgttaactgccgaaattgtcgaaacaacaataggtgtttcaccaaaaccaacagcactttcagcagcagccctcctcctgtggtccctgtggtagcaccttatcctcaggatggtttggaaatgaagcccctcagtcacgtgaaggtgcctgtatgcctgacttccgcagtccctgattgtggccagttgccggaggagagcgtcaaggacaatgtggaaccagtccctactcagcgtacctgctgtcaggacattgtaaatgacgtcagctctgatggctcagaagatccagcagagttcagcagaggtcaggaaggcatgatcaaccttaggattccagatcatcttcagttagctaagagctgtgtatgggaaggagacagctgtgcccattcagaaacagagatcaacattgtaagttggaatgctcttattttgccacctgtccccgagggctgtgctgagaagacaatgtggtctccacctggcattcctttagacagcccgacagaggtccttcagcagccccgggaaacctgaggacatgcaaacaaccagtcatgttccaacttcaagccggtaactgcacacaacaggcctgggagcgaactgtgtgaaggaccttaattcaaatcagagaaaatcattatttatttttttgtagtagtaatgtcatatgaatgtatcttaaaacgtgtgcccttttatattatttatgccttaaatgttttcttccccattccttcctccccctcggtaggaaacaaccttgttttgcatagtattcagtcacctggagggcagaggggtccttccatgttttctaacagctatagtgacagcaagagctcctcatgcaaaggatcccatctcttggctgcttcggctaggagggaatgcaggggcccgttgaaggttgccaccagctgggttttcaggtggaaaatggtctttcaatagtgtattctcagacttttttttgtttgttttttgagatggagtcttgctgtcatccaggctggagtgcaatggctcgatcttggctcactgcaacctccgcctcccaggttcaagcaattctcccgcctcagcctcctgagtagctgggactacaggcacctgccaccacgtccagctaattgtcttgtatttttattagagacaaggtttcaggctggttttgaactcctgacctcaagtgatccacccgcctccgcctcccaaagtgcgaggattacaggcgtgagccaccacgtctggcctgtattatcagacttcctgagaacactttgaaatcaactgcagttgtgacccatgtttataataacagacctggctgacggattttacaagagtgccttccacagaagtggtaatgtgacctgttgactttgtatctgcacgtgggcacgagtgatgttcagtttgctaggcactagtcatagtgttatggacgtggtggagtgtaaggtcttgatgaattacggcagtatgcagaaaaggaaccaaggccagagagacaaataatgcctcatgtcccactgctttaaaattacattaatttataaaatggccactatgggctctttttgactgtttctcggagtaggaacaaaataagacattaaatggtggcttgaagagaaagatacacattttcagaagaaagaaaggggagggctgcagggagcctgtcttggcgggagctctccagtctgttggattagcacagggacacgcttatggtgccatgacgccgaaactagtcatcccccatctccagcataggcaacggcctgcaggggtgagtgtcagaaaagacttactttggaagaaaagggtttttttttgtttgtttgttttttgtttttttttgtttgtttgttttgggtttttttcctgaaatttcctgatacctttttcagaatgtcacccttgtaaataggcacctaaagccaagttggtcagcagagctcctgaccacggctgcctctgcgtgacaaggacatttgcagctgcctttggaaggctcttcacattaaaaaacaataattatgt

SEQ ID NO: 7336 - protein, 1287 aa, Homo sapiens
MHPDLGPLCTLLYVTLTILCSSVSSDLAPYFTSEPLSAVQKLGGPVVLHCSAQPVTTRISWLHNGKTLDGNLEHVKIHQGTLTILSLNSSLLGYYQCLANNSIGAIVSGPATVSVAVLGDFGSSTKHVITAEEKSAGFIGCRVPESNPKAEVRYKIRGKWLEHSTENYLILPSGNLQILNVSLEDKGSYKCAAYNPVTHQLKVEPIGRKLLVSRPSSDDVHILHPTHSQALAVLSRSPVTLECVVSGVPAPQVYWLKDGQDIAPGSNWRRLYSHLATDSVDPADSGNYSCMAGNKSGDVKYVTYMVNVLEHASISKGLQDQIVSLGATVHFTCDVHGNPAPNCTWFHNAQPIHPSARHLTAGNGLKISGVTVEDVGMYQCVADNGIGFMHSTGRLEIENDGGFKPVIITAPVSAKVADGDFVTLSCNASGLPVPVIRWYDSHGLITSHPSQVLRSKSRKSQLSRPEGLNLEPVYFVLSQAGASSLHIQAVTQEHAGKYICEAANEHGTTQAEASLMVVPFETNTKAETVTLPDAAQNDDRSKRDGSETGLLSSFPVKVHPSAVESAPEKNASGISVPDAPIILSPPQTHTPDTYNLVWRAGKDGGLPINAYFVKYRKLDDGVGMLGSWHTVRVPGSENELHLAELEPSSLYEVLMVARSAAGEGQPAMLTFRTSKEKTASSKNTQASSPPVGIPKYPVVSEAANNNFGVVLTDSSRHSGVPEAPDRPTISTASETSVYVTWIPRANGGSPITAFKVEYKRMRTSNWLVAAEDIPPSKLSVEVRSLEPGSTYKFRVIAINHYGESFRSSASRPYQVVGFPNRFSSRPITGPHIAYTEAVSDTQIMLKWTYIPSSNNNTPIQGFYIYYRPTDSDNDSDYKRDVVEGSKQWHMIGHLQPETSYDIKMQCFNEGGESEFSNVMICETKVKRVPGASEYPVKDLSTPPNSLGSGGNVGPATSPARSSDMLYLIVGCVLGVMVLILMVFIAMCLWKNRQQNTIQKYDPPGYLYQGSDMNGQMVDYTTLSGASQINGNVHGGFLTNGGLSSGYSHLHHKVPNAVNGIVNGSLNGGLYSGHSNSLTRTHVDFEHPHHLVNGGGMYTAVPQIDPLECVNCRNCRNNNRCFTKTNSTFSSSPPPVVPVVAPYPQDGLEMKPLSHVKVPVCLTSAVPDCGQLPEESVKDNVEPVPTQRTCCQDIVNDVSSDGSEDPAEFSRGQEGMINLRIPDHLQLAKSCVWEGDSCAHSETEINIVSWNALILPPVPEGCAEKTMWSPPGIPLDSPTEVLQQPRET

SEQ ID NO: 7337 - DNA, 6891 bp, Homo sapiens
ggagccatgcagagggtagctacagccattaatttaaggatgtagataagctatctctaaaccaagaaagtaagaatggtgtgaattatatttattcccagccttccagtgtttattaaaataattttcggtgtccttgagaggagttaaaagccatcattttactcctgcttacctccgccaccgtaattaaccactttatactgcctcataatcccattaacaaattgcagtcgctcctcagccttcacattcattcactcaccagtttctactgtttcatcctgcccggactcttaactgttccctcccaggatcgacatgcacttggatcattgcagtttctgggcctgctgtcatctcccccttcagtacttcccacatatgactaccaactgttagacgatgtgctgctgccagaccagcctttcatttcttggacatccggctatttacccaggaaaagtcatcctttgactatttttcatgacctttctcatctgactcgtgatctgcccatcttgttatttttatttatatagaggtcaaccagaatcaagatgtctgggactgaggaagcaattcttggaggacgtgacagccatcctgctgctggcggcggctcagtgttatgctttggacagtgccagtacacagcagaagagtaccaggccatccagaaggccctgaggcagaggctgggcccagaatacataagtagccgcatggctggcggaggccagaaggtgtgctacattgagggtcatcgggtaattaatctggccaatgagatgtttggttacaatggctgggcacactccatcacgcagcagaatgtggattttgttgacctcaacaatggcaagttctacgtgggagtctgtgcatttgtgagggtccagctgaaggatggttcatatcatgaagatgttggttatggtgttagtgagggcctcaagtccaaggctttatctttggagaaggcaaggaaggaggcggtgacagacgggctgaagcgagccctcaggagttttgggaatgcacttggaaactgtattctggacaaagactacctgagatcactaaataagcttccacgccagttgcctcttgaagtggatttaactaaagcgaagagacaagatcttgaaccgtctgtggaggaggcaagatacaacagctgccgaccgaacatggccctgggacacccacagctgcagcaggtgacctccccttccagacccagccatgctgtgataccggcggaccaggactgcagctcccgaagcctgagctcatccgccgtggagagcgaggccacgttcgagtctccacgccgtcagctgagaagagtgaggcagcgcctccggcccctcctgtgacgcacagcactcctgtaactgtctcagaaccactcctggagaaagacttccttgcaggagtgactcaagaattaatcaagactcttgaagacaactctgaaaagtgggctgtgactcccgatgcaggggatggtgtggtcaagccctcgtctagagcagacccagcccagacctctgacacattagccttgaacaaccagatggtgacccagaacaggactccacacagcgtttgccaccagaaaccacaagcaaaatctggatcttgggacctccaaacttatagcgctgaccaacgcacaacaggaaactgggaatctcataggaagagccaggacatgaagaaaaggaaatatgatccatcttaactgaggctcaggccacataattggactctgtcacaaagggactttggaaaactactttttggtcatgaaattgttcatcgctgctggagaatgaacgtcattgcgatttatcttgcttcattctgaaccttatcaagaggatctgactgagagcccactgcagttagagctgagcacttttgaaaagcttgtccatcactctagtagggagaggctctggacagatgaataccttttcttcggcttgtgaggcttcccactatttattactgaactattatgttaatgaagatggacattttaggaatcaccaatggctccttgccctcaagcaatataggccagacttggtcctaagcacctgcctcagcaattgtctacattcagttgttttgcataacgtctgccttctttcctttacggtccatgcctttaatgttgcccacattaagcactgtggatcacgacaggaaaaaggttggagcagtgcttttcactactttgtatcaatccaggctacaatcttcatttaatataaataatttatggatttatgacattacaatcctgcattgtttcaagactgacattttttcctaaggaaggaaataatcatctaagaccacgaaaaaaggctgttttttgtttttttttttttttttttttttgagacggggtctggctgtgttgccctgactggagttcagtggtgcaaacacagctctctccacaacctcttgggcccaagtgatactcccacctctgccttacaaaatacagggattactggtgtgagccactgtgtctggccagaaaaggcatttttgagaaagcaaatcgtataccttattaacaaaatagaatatatatatattgcttatctgaaatgcttgaaaccagaattgttttgcattttttgaatatttgtatacacataatgagaccttggggatgggacccaagtctgaacgtggaattcacctgtgtttcgtgtatatgcctcatacacataattttgtgcatgaaacagagtttttgtataagaagatacactgcagctgaagagggctgggtttttttttctcttagggtcgctgcataaactgttgtatgcctggtgctttgcgacttgtcacacgaggtcacgtgtggaattttccacttctggcatcacgtcagtgctcagaaattttctgatctcagagcatttcaattagggatgctcaaacgcaactgtttctacttccccatttcaggtgtgagatgtaacccaccttgaccataaattggcttttcatagtgctcagatgtttcataattcttcccccaaaataatgaagtttgcagtttaacaactttttttttgagagggggggtctggctctgtagcgcaggctggagtgcagcggtgccatcttgactcattgcagcctccgcctgccaggattcaagcaattctcctgcctcaggctcccgagtagctgggattacagacacccaccacgacgcccgactaatttttgtatttttagtagaggagacggggtttctccatgttggccaggctggtctcaaactgacctcaagtgatctgcccacctcggcctcccaaagtaaaaagtactagaattataggcatgagccattgcgcccagccaatttaataatttttttagacgtattattttgggctgggctgtggctaatcttgaagcagtgacttcctattttttggctcagacccatttgggaagctgtgaacctgagataaggaagtctgaaagtactagccggcagccgaccgtttctattcctttcgaagttaaggagacagcaaaggagctcccaggaattagggatccagttataaattgcacttaactcaaaatagtgccagtgagaatgtgaaggaatcttctggaaatgaaaccccacagctcaacaaaagcaagtttggtttatttgaatggtttcattaaataagtctacaaaggtaacaaactgaagcacaaagcgcaatcttacaagaagcgcaacacccagagttagtgcaaaatgtacaattaacggctgctgagaaacccccaaagtttgaatttttatttttatttttaacagtgtacattgttaaataatgtaaggaaaacatttataattcagaaagtttttaatgtggaaaaagatactcaaagtgtactattaacacaaaaataatttaaacagttcagtagcactagttcattcctctaggcttgttatttcatacacaggaggatgaaatcaacagtaaataacaccagttctgactttttttgtgtatgagtgaaaagatgtcaaaattattattaaacccaaataacaaatgataatgtgctgcatgaggctccactgctcctctggtataaagtatgtttcactcttgggtggcccctttctcagctactcagccccttgttggttctatccttactctctccacaagaaatacaagcagagaataaataaatcattttaaagcaggggtggaagcccttgcccttttcctttctaccttttaaaaaccttcagctctcatttgcatatttagggccgtagaccaacttacttacttactaagggaagcagggcccttaaggaatgaacagggtacaggagcctccagcctctttctgtggtagtggtggtggtggtggtgattcccagaatatgccattgacgtgggtaaaaggttggaaatattttcagtttcccaactaagagtcaagaagcaccccaaaattaagagtcctagcttctttctttgtcttcagagataacaaagatcctaaacatagccagttaggacagtatttccggaaagctctgaaaataattaataactacccattacaaggaggcatagcactgaataacactgattggttgcagttattacttacggggagtattatttatttgaaaatgtgaacatattagttgtacttctagaaataaaggtggcacaatagattatgatcctgcaaccatttggacatcataaaggaaatgagtaggaataagtattctttcctagaatgattaattcagatgtggaaagatagatagattaactttccacaaaatgtagtaccccaagctgagaaatgcatggtacatgtgcaacaagaggaaagcaatccaaacagtttttctgagagcaattttctccatctgtgacttttcactatcaggttccccaacttgaaaactagccccccacccccttctctttatgttcagtttcttctaggtcacgtctgttcaagcctagctcaaataagaaaggtttatatgacagtcactggccaggcatcacgtttgtttcctcattctttagtctttgtctttcacccagcacacaccattcttttaagttgtccaattttgttacaacaccccctcctcactattcccgaaacagaactttctgtttttaaccactgatgccaacctaacttcccaccctactcatcttacacctgctctagacaaagttgttgaatgacttaaaaaaatactttttcaatttccctttggcataaccactgctggactgctggggtcacatggacctacgatttccttccacatgccctttattgatctggggtctggtaagttgatgctaatggcagaagcaatagaagtccaaggcactaaaatgtccagcaagcaacactgggaaacagaagtattcaagtacagtaatttatacaattttacattcacatttatttatctaatacaatggaaatacaaaggaaaaagttaaagtgtctcaataagtaaaggacagagctagctttttttggaactttttaaacgtttcatattttactcttaaaactactgttgtccaacaacattttatatatcacagtgtttccacatcaaaactgatggcaaagttacatgtccgcagggaacttaattttttttttttcctaattgctaatgctgcagtcaaagctgctaatatcttttgcttaaagcactaatgacctatcataagaaagagttgcaccccagtaccctggtatttttcactgggttctaaagagcaaagaaaaaataaaaaagagaggggtaaaaaaaagggaggagggcagggtaggagagagcccagtaggtggtttttgtcctgtggttcggattcttgagggagtgagggattcagggcatgtaccaaaagcaagagctccacccactcgaaattacagatgggtttgattttacattgagttctccagcttccttatgaacaagactttcctagccctcatcctcattactgagtatagataaacaggaaagcatggtctgaagctgccccttgacaaaaaagctgttctttccttcctctcccattccaataactggagcgggggagactctccattctgagggctcaatgcagtattaaaaacattcccctctggcaagaaataaccagttaaatgcagcactagtagttagtatataggctacttcccacccccacccaccccctcagcattccatctcctgcccccagatctattcagttaatgtctctaggtctaagtggtccgcaggttggagcctggggggttgctgatggatttctgcaaattgctgatgttgaaattctgcaaggaggcagttcccacaggttggaactggccaagtggctgtggtgctgggccacccgtcccactccattgagcgccaaatggggtagctggaaagccatactgctgtggggggcacatagacttggtgaagtgacctagagaggtagctgatgctgcagagatgggggcagagccacccaggttcgaggtcatggagatgcacagttgcccaggtgcagagaacttccttgccattccagggccctgaaaacaaaaccaccacgtgtcaagtctggtgtgggccatggtataaaatgtgtggcgctaacatatacttctagtataatcctgtaagatacagcagaacagtcttctgtagtatttattggctctttatatttaccaagtaagggtgaaaataatcctcatgagagggagggatgtcatgtgcgtgtgtgtctgtgtgtgtgtagttgaggatgacgaagg

SEQ ID NO: 7338 - protein, 273 aa, Homo sapiens
MSGTEEAILGGRDSHPAAGGGSVLCFGQCQYTAEEYQAIQKALRQRLGPEYISSRMAGGGQKVCYIEGHRVINLANEMFGYNGWAHSITQQNVDFVDLNNGKFYVGVCAFVRVQLKDGSYHEDVGYGVSEGLKSKALSLEKARKEAVTDGLKRALRSFGNALGNCILDKDYLRSLNKLPRQLPLEVDLTKAKRQDLEPSVEEARYNSCRPNMALGHPQLQQVTSPSRPSHAVIPADQDCSSRSLSSSAVESEATFESPRRQLRRVRQRLRPLL

SEQ ID NO: 7339 - DNA, 2637 bp, Homo sapiens
ggagccatgcagagggtagctacagccattaatttaaggatgtagataagctatctctaaaccaagaaagtaagaatggtgtgaattatatttattcccagccttccagtgtttattaaaataattttcggtgtccttgagaggagttaaaagccatcattttactcctgcttacctccgccaccgtaattaaccactttatactgcctcataatcccattaacaaattgcagtcgctcctcagccttcacattcattcactcaccagtttctactgtttcatcctgcccggactcttaactgttccctcccaggatcgacatgcacttggatcattgcagtttctgggcctgctgtcatctcccccttcagtacttcccacatatgactaccaactgttagacgatgtgctgctgccagaccagcctttcatttcttggacatccggctatttacccaggaaaagtcatcctttgactatttttcatgacctttctcatctgactcgtgatctgcccatcttgttatttttatttatatagaggtcaaccagaatcaagatgtctgggactgaggaagcaattcttggaggacgtgacagccatcctgctgctggcggcggctcagtgttatgctttggacagtgccagtacacagcagaagagtaccaggccatccagaaggccctgaggcagaggctgggcccagaatacataagtagccgcatggctggcggaggccagaaggtgtgctacattgagggtcatcgggtaattaatctggccaatgagatgtttggttacaatggctgggcacactccatcacgcagcagaatgtggattttgttgacctcaacaatggcaagttctacgtgggagtctgtgcatttgtgagggtccagctgaaggatggttcatatcatgaagatgttggttatggtgttagtgagggcctcaagtccaaggctttatctttggagaaggcaaggaaggaggcggtgacagacgggctgaagcgagccctcaggagttttgggaatgcacttggaaactgtattctggacaaagactacctgagatcactaaataagcttccacgccagttgcctcttgaagtggatttaactaaagcgaagagacaagatcttgaaccgtctgtggaggaggcaagatacaacagctgccgaccgaacatggccctgggacacccacagctgcagcaggtgacctccccttccagacccagccatgctgtgataccggcggaccaggactgcagctcccgaagcctgagctcatccgccgtggagagcgaggccacgttcgagtctccacgccgtcagctgagaagagtgaggcagcgcctccggcccctcctgtgacgcacagcactcctgtaactgtctcagaaccactcctggagaaagacttccttgcaggagtgactcaagaattaatcaagactcttgaagacaactctgaaaagtgggctgtgactcccgatgcaggggatggtgtggtcaagccctcgtctagagcagacccagcccagacctctgacacattagccttgaacaaccagatggtgacccagaacaggactccacacagcgtttgccaccagaaaccacaagcaaaatctggatcttgggacctccaaacttatagcgctgaccaacgcacaacaggaaactgggaatctcataggaagagccaggacatgaagaaaaggaaatatgatccatcttaactgaggctcaggccacataattggactctgtcacaaagggactttggaaaactactttttggtcatgaaattgttcatcgctgctggagaatgaacgtcattgcgatttatcttgcttcattctgaaccttatcaagaggatctgactgagagcccactgcagttagagctgagcacttttgaaaagcttgtccatcactctagtagggagaggctctggacagatgaataccttttcttcggcttgtgaggcttcccactatttattactgaactattatgttaatgaagatggacattttaggaatcaccaatggctccttgccctcaagcaatataggccagacttggtcctaagcacctgcctcagcaattgtctacattcagttgttttgcataacgtctgccttctttcctttacggtccatgcctttaatgttgcccacattaagcactgtggatcacgacaggaaaaaggttggagcagtgcttttcactactttgtatcaatccaggctacaatcttcatttaatataaataatttatggatttatgacattacaatcctgcattgtttcaagactgacattttttcctaaggaaggaaataatcatctaagaccacgaaaaaaggctgttttttgtttttttttttttttttttttttgagacggggtctggctgtgttgccctgactggagttcagtggtgcaaacacagctctctccacaacctcttgggcccaagtgatactcccacctctgccttacaaaatacagggattactggtgtgagccactgtgtctggccagaaaaggcatttttgagaaagcaaatcgtataccttattaacaaaatagaatatatatatattgcttatctgaaa

SEQ ID NO: 7340 - protein, 273 aa, Homo sapiens; identical to SEQ ID NO: 7338

SEQ ID NO: 7341 - DNA, 2182 bp, Homo sapiens
acctagccccgcccccagccccgccgcggggcgcagcgcgcctccccgggctcccggctcggctgcctccctttccctcagcctcccgggagcgtgacgcggcggcccgggggcctccgggcgccttccggggcacgcgggatcgacatgcacttggatcattgcagtttctgggcctgctgtcatctcccccttcagtacttcccacatatgactaccaactgttagacgatgtgctgctgccagaccagcctttcatttcttggacatccggctatttacccaggaaaagtcatcctttgactatttttcatgacctttctcatctgactcgtgatctgcccatcttgttactccctagcagtgtggtaagtgaattcttgtttctgccttaaatctacttctgtctcagccaaattcattctcccaagaagacaaggatcgaggactgtggagccaactcagactcgccacggctaacaatgtttcctgggatcgcctcccaaataaactgcttgtacttgaacccttgtctcagagttgactactggaagaaccccagataagacaatctgcgagtagacatgtcagataatgcagttagatatgaatctggaattcagaggagaggctcatgcaatttgcaagtcatcatcaaaaagatgtcatttgttctgtttgtctactgcaggaagacagattaccctaaaatttagtggctgaaaacaactctattttatcgtagcttacaattttgtggattgggaattagagcctgtctcatctgggcaactcttctgttccccatggcatcacctgaggtcactccatggtattcagctaccagacgaactcatctggagtatccaagtattcattcacgctcatatctggcaccttggcagggatgactggaagcctgggctcagctgggactgctgaccatagtacctacaaatggcctcttcagcatggcttcttaaatggctgctcggagctaccaagagacaggaagtagaagctgctagtttcttaagacccagaaatggtacaatttcattcctgccattggtcaaagcagtcacagagccttccaagaggaaacacagaccctcacttctcactgggaagtatgtcaaagagtttggggctttttttttgagaaggagtcttgctctgtcgcccaggctggagtgcagtggcaagatctcggctcactgcaacctctgcctcccgaattcaagcaattctcctgctttggcctcccaagtagctgggattacaggcatgcgccaccacacccggctaatttttttgtatttttagtggagacggggtttcaccatatgggccaggctggtctcgaactcctgaccttgtgattcacctgcctcagcctcccaaagtgctgggattacagacgtaagccactgcgcccagccctggggctgtctttaatccactacaacattgcaaagctgtgagccaggatgagaacgccagaggtatgaatgtggattaaaagtccaagcactgaaactttcaatgtttagagaccagtgagagaaagaaccagcaacagagactcagaactatatcatattctgctgataagccaataagatgataatgataactaagaattgacattggctttagtgatgtagacataattggggaccttgacaagagcagtttactgggggtggttgagttgaaactttgattgtttcaagagagaatggaatgagtggaaagatagtttgtgagtgctagcaattattcagagaatttctgctataaatgggagcaggaggatgtatcaggagctaatgggagaaatgaggtcaacattatttcctatgtagctttctcttatgcccaaattccactggatatcatccacttctggttacttctggtttgggatgtataggtgaaggaatagttttggatcctcctttattacctgttttatttgcataattggacaataactaaacttgctttaaatatctcttaaagcattttaaattcaaatttggagagaggaatatgagagtggtttttggtcattgtttagccatatacaatattgtcttaccttctgcatttgaagtttttgatacctgataaatgtttgtattgtgtagttgaacaagaatttgccacatgaaggttt

SEQ ID NO: 7342 - protein, 122 aa, Homo sapiens
MASSAWLLKWLLGATKRQEVEAASFLRPRNGTISFLPLVKAVTEPSKRKHRPSLLTGKYVKEFGAFFLRRSLALSPRLECSGKISAHCNLCLPNSSNSPALASQVAGITGMRHHTRLIFLYF

SEQ ID NO: 7343 - DNA, 547 bp, Homo sapiens
ctcagcctcccgggagcgtgacgcggcggcccgggggcctccgggcgccttccggggcacgcgggatcgacatgcacttggatcattgcagtttctgggcctgctgtcatctcccccttcagtacttcccacatatgactaccaactgttagacgatgtgctgctgccagaccagcctttcatttcttggacatccggctatttacccaggaaaagtcatcctttgactatttttcatgacctttctcatctgactcgtgatctgcccatcttgttactccctagcagtgtggtaagcttacaattttgtggattgggaattagagcctgtctcatctgggcaactcttctgttccccatggcatcacctgaggtcactccatggtattcagctaccagacgaactcatctggagtatccaagtattcattcacgctcatatctggcaccttggcagggatgactggaagcctgggctcagctgggactgctgaccatagtacctacaaatggcctcttcagcatggcttcttaaatggctgctcgg

SEQ ID NO: 7344 - protein, 54 aa, Homo sapiens
MVFSYQTNSSGVSKYSFTLISGTLAGMTGSLGSAGTADHSTYKWPLQHGFLNGC

SEQ ID NO: 7345 - DNA, 822 bp, Homo sapiens
atggtggctgccggaacgaagttgtctaaaccgaagatctccctcttcttcggtgtaaaactttcagatacatccacgctcacaatttacctgagccaaacctcccgggagcgtgacgcggcggcccgggggcctccgggcgccttccggggcacgcgggatcgacatgcacttggatcattgcagtttctgggcctgctgtcatctcccccttcagtacttcccacatatgactaccaactgttagacgatgtgctgctgccagaccagcctttcatttcttggacatccggctatttacccaggaaaagtcatcctttgactatttttcatgacctttctcatctgactcgtgatctgcccatcttgttactccctagcagtgtggtaagccaaattcattctcccaagaagacaaggatcgaggactgtggagccaactcagactcgccacggctaacaatgtttcctgggatcgcctcccaaataaactgcttgtacttgaacccttgtctcagagttgactactggaagaaccccagataagacaatctgcgagtagacatgtcagataatgcagttagatatgaatctggaattcagaggagaggctcatgcaatttgcaagtcatcatcaaaaagatgtcatttgttctgtttgtctactgcaggaagacagattaccctaaaatttagtggctgaaaacaactctattttatcgtagcttacaattttgtggattgggaattagagcctgtctcatctgggcaactcttctgttccccatggcatcacctgaggtcactccatggtattcagct

SEQ ID NO: 7346 - protein, 181 aa, Homo sapiens
MVAAGTKLSKPKISLFFGVKLSDTSTLTIYLSQTSRERDAAARGPPGAFRGTRDRHALGSLQFLGLLSSPPSVLPTYDYQLLDDVLLPDQPFISWTSGYLPRKSHPLTIFHDLSHLTRDLPILLLPSSVVSQIHSPKKTRIEDCGANSDSPRLTMFPGIASQINCLYLNPCLRVDYWKNPR

SEQ ID NO: 7347 - DNA, 1111 bp, Homo sapiens
agcttcgtggaacgcggccgcgaaattagtggtcttctgacctgagactcgcggggctgcgcacacgggcatcgccgaggaccccagcaatggacgtcgtgtctgtggtgatcccgccaggacgcggggagcgtgggcggaaattagtgtccacgttccgaccctgcgctgtgccaaacgctgcttcgggagctgtttatttagcctccgacagctaagcgaatcggcgggcggctggggcctggtgcaacccgattttctcgtgcagactcgcagccggctttggttttgttttttgttttttgttttttttttggagccatgcagagggtagctacagccattaatttaaggatgtagataagctatctctaaaccaagaaagtaagaatggtgtgaattatatttattcccagccttccagtgtttattaaaataattttcggtgtccttgagaggagttaaaagccatcattttactcctgcttacctccgccaccgtaattaaccactttatactgcctcataatcccattaacaaattgcagtcgctcctcagccttcacattcattcactcaccagtttctactgtttcatcctgcccggactcttaactgttccctcccaggatcgacatgcacttggatcattgcagtttctgggcctgctgtcatctcccccttcagtacttcccacatatgactaccaactgttagacgatgtgctgctgccagaccagcctttcatttcttggacatccggctatttacccaggaaaagtcatcctttgactatttttcatgacctttctcatctgactcgtgatctgcccatcttgttactccctagcagtgtggtaagtgaattcttgtttctgccttaaatctacttctgtctcagccaaattcattctcccaagaagacaaggatcgaggactgtggagccaactcagactcgccacggctaacaatgtttcctgggatcgcctcccaaataaactgcttgtacttgaacccttgtctcagagttgactactggaagaaccccagataagacaatctgcgagtagacatgtcagataatgcagttagatatgaatctggaattca

SEQ ID NO: 7348 - protein, 42 aa, Homo sapiens
MDVVSVVIPPGRGERGRKLVSTFRPCAVPNAASGAVYLASDS

SEQ ID NO: 7349 - DNA, 945 bp, Homo sapiens
gcgcctccccgggctcccggctcggctgcctccctttccctcagcctcccgggagcgtgacgcggcggcccgggggcctccgggcgccttccggggcacgcgggtgaggaactgggaagcgggggaaatcggcgccacggcggtcgattagcaccgaaacagagtgatgggcgcggagcgtccctgcacacacacacacactcacacacacacacacacgacccctgcggccacgggaggggagagccggggtcggctccgcgagcgcagggtggcgcttgtctcctcctgcttgccgtaggaagtggacgctggaagcccgaggagccgcttcgtgtcttcccaaacctaagcggcgccccaccccctacttctcgtggcccgttacgcccggggcagccaagcgccgcgggagcagcgccgggatcgaccctggctgctggggggacgctttgtcccaagaaagctggttttttgccccttagcttcgtggaacgcggccgcgaaattagtggtcttctgacctgagactcgcggggctgcgcacacgggcatcgccgaggaccccagcaatggacgtcgtgtctgtggtgatcccgccaggacgcggggagcgtgggcggaaattagtgtccacgttccgaccctgcgctgtgccaaacgctgcttcgggagctgtttatttagcctccgacagctaagcgaatcggcgggcggctggggcctggtgcaacccgattttctcgtgcagactcgcagccggctttggttttgttttttgttttttgttttttttttggagccatgcagagggtagctacagccattaatttaaggatgtagataagctatctctaaaccaagaaatgaattcttgtttctgccttaaatctacttctgtctcagccaaattcattctcccaagaagacaaggatcgaggactg

SEQ ID NO: 7350 - protein, 44 aa, Homo sapiens
MGAERPCTHTHTHTHTHTTPAATGGESRGRLRERRVALVSSCLP

SEQ ID NO: 7351 - DNA, 514 bp, Homo sapiens
ccctcagcctcccgggagcgtgacgcggcggcccgggggcctccgggcgccttccggggcacgcgggatcgacatgcacttggatcattgcagtttctgggcctgctgtcatctcccccttcagtacttcccacatatgactaccaactgttagacgatgtgctgctgccagaccagcctttcatttcttggacatccggctatttacccaggaaaagtcatcctttgactatttttcatgacctttctcatctgactcgtgatctgcccatcttgttactccctagcagtgtggtaagagacgggggtttcaccatgttgcccaggctggtcttgaactgctgacctcaagctatctgcccacctcagcctcccaaaatgctgagattacaggtgtgagctaccacacctggctatgatttagatgatatttaaatgagcctttggacttagagttgatgctgaaatgagtgaattcttgtttctgccttaaatctacttctgtctcagccaa

SEQ ID NO: 7352 - protein, 43 aa, Homo sapiens
QCGKRRGFHHVAQAGLELLTSSYLPTSASQNAEITGVSYHTWL

SEQ ID NO: 7353 - DNA, 6101 bp, Homo sapiens
gggcgcggtgacgtcgcgggcgcctgggccgtgctgtggcggcggcggcggcggtagtggcggcggcggcggtgcctgggcggcagcagcagcagtagcggcagccctgaggacgatatggtgtaagatacttcttcaagattggacagctggggaccttcttctgattaaccttaaaccaacttgtagccatagagacacctcacaaggttcccatttttgttgttgttgttgttgattttctgctcacacctttcctgaccttgcaaccatgtatggaagtgcccgctctgttgggaaggtggagccgagcagccagagccctgggcgttcacccaggcttccacgttcccctcgcttgggtcaccgtcgaaccaacagtacgggagggagttcgggaagcagtgttggaggtggcagtgggaaaaccctttcaatggaaaatatacaatctttaaatgctgcctatgccacctctggccctatgtatctaagtgaccatgaaaatgtgggttcagaaacacctaaaagcaccatgacacttggccgttctgggggacgtctgccttacggtgttcggatgactgctatgggtagtagccccaatatagctagcagtggggttgctagtgacaccatagcatttggagagcatcacctccctcctgtgagtatggcatccactgtacctcactcccttcgtcaggcgagagataacacaatcatggatctgcagacacagctgaaggaagtattaagagaaaatgatctcttgcggaaggatgtggaagtaaaggagagcaaattgagttcttcaatgaatagcatcaagaccttctggagcccagagctgaagaaggaacgagccctgagaaaagatgaagcttccaaaatcaccatttggaaggaacagtacagagttgtacaggaggaaaaccaggtggatgctctccgattgcgtttggaagagaaggaaaccatgttgaataaaaagacaaaacaaattcaggatatggctgaagagaaggggacacaagctggagagatacatgacctcaaggacatgttggatgtgaaggagcggaaggttaatgttcttcagaagaagattgaaaatcttcaagagcagcttagagacaaggaaaagcagatgagcagcttgaaagaacgggtcaaatccttgcaggctgacaccaccaacactgacactgccttgacaactttggaggaggcccttgcagagaaagagcggacaattgaacgcttaaaggagcagagggacagagatgagcgagagaagcaagaggaaattgataactacaaaaaagatcttaaagacttgaaggaaaaagtcagcctgttgcaaggcgacctttcagagaaagaggcttcacttttggatctgaaagagcatgcttcttctctggcatcctcaggactgaaaaaggactcacggcttaagacactagagattgctttggagcagaagaaggaggagtgtctgaaaatggaatcacaattgaaaaaggcacatgaggcagcattggaagccagagccagtccagagatgagtgaccgaatacagcacttggagagagagatcaccaggtacaaagatgaatctagcaaggcccaggcagaagttgatcgactcttagaaatcttgaaggaggtggaaaatgagaagaatgacaaagataagaagatagctgagttggaaagtctcacctcaaggcaagtgaaagaccagaataagaaggtagcaaatctgaagcacaaggaacaggtggaaaaaaagaagagtgcacaaatgttagaggaggcgcgacgacgggaggacaatctcaacgacagctctcagcagctacaggacagtctccgtaagaaggatgacaggattgaagagctggaagaagcactaagagaaagtgtacagataactgcagagcgggaaatggtgctagcacaagaggaatcagccaggaccaatgctgaaaaacaggtggaggagttactgatggccatggagaaggtaaagcaggaactagaatccatgaaagcaaagctgtcctccacccagcagtctctggcagaaaaggaaactcacttgactaatcttcgggcagagagaaggaaacacttagaggaagttctggagatgaagcaagaagctcttctggctgccattagtgaaaaagacgccaatatagctctcttggagctttcgtcctctaagaagaagacccaagaggaagtggctgccctgaagcgggagaaggatcgtctggtacagcagcttaagcagcagacgcaaaatcgaatgaagctaatggccgacaactacgaggatgaccacttcaaatcctcccattccaatcaaacaaatcacaagccctccccagaccaggatgaggaggagggtatatgggcatagccaatcagaggcttagttcagccattttgttcagaacgatcatccagcccctcttagaacttgaccaaaatagaagtaaattaaagttgtacattggacacctgacaaccctctgccatgaccgagaccccctgatcctccgtggactcactccaccagcttcctataacttggacgatgaccaggcggcttgggagaatgagctgcagaagatgacccgggggcagcttcaggatgagttagagaaaggtgaacgggacaatgcagaactgcaggagtttgccaacgccattcttcagcagatagcagaccattgtcccgacatcctagagcaagtggtcaacgccctggaagagtcctcttgaccctgctttatggggaagcctgaggtagtcaacccaggagccaagaaaagagaactacgaggaacaggtgcccggaaccttcttggcaccaaacactacaaacttcatcccaacttgctcacttgaagaagtgtgattccagcaccgtttctacatctgccatcttactctgcctttctgctttggatgtggtctctacactaaccttcttgatgtccagggtagataaagggtcgaatctctctgaagaactgccacctggtcatcagcagtggagaactgtgggagctggtggctctgccctgacagagagccatggagcagaggagcctctcacctcctgtcctctgacatgagaatgaaaccaggaatggacttggagttcaacaggctgagaggatgcctccaatggaccagagagctgagtgttctaatatcacaataggtgctttctcctaaaagggcaaaaaacaatctcaaaaagattagaaaaagagaaggggggaagggaagagaaaatcgactcttctttttactgtctcttctgcttactttccacatgagatgctttgtaccggggagctgtgagcaggcctcacgatggcttgggagcactcgttctcccaaggtctgagtcttcatccagccctgcctgtctgtcgcagccttcctcactctgttcctcggccagttaacaagaagatggtgtgaggtgttctccaccagtctctcctgtttgagactgttgacgttatcatactgaggtgttagatcaaatatctctaattgaagaacatgtgaggttgaaagagcaccagccagggcaacatagcgtgaccctgtctctacaaaaaattaaaaagagaacatacaaagttgacatatgagaccctgttgtccccgcctgcagctttgccccagtaacagatgcccgttgctcttgggctggtttcccctgaacacctccaagaggctgcctgccttgccagcacccgtgtcctgagctcctgcagcccagtggctgctgaagttgtgatccctcactcaccctgctagctttgcccttgactcgtcttctctgaacctcagcctcgtgcattgcctggaaccttcttctagcataaatgaaggtttttcctcctacacacattccttcctcggttatttcattcagagaatatttatgaaatgcctactgtgtgcaagtcatccatccttgaaaaggccacttctcagtgagggagagatgtagtggattctgtgagacatacctgctggagttgaagcagtaaatagcatgtccttcccctccccgatcttaaggtgtgttttctagaaaagttccctaatggaattcatgagtttgggggtctcagtcacccgcttgcctgtaggattccatttgatgattctggatttttgctgtttgttattgcccttagaggggctctgagtatctacttgtgggtggccatttcctgacatctgcatgtacctcgtggaattcagccagcttcatgttgcaaatcagaaagctgaccccaagactgcaaatcaatgaaggtattggcattgttaaggacgtagcgtagacaacagcagtcataaataattaggcaggaacttaacccaaatctagttctttgaccacctctaccaccagaacccagcagacactcacatctcctgataagagttgctggactcgatgtttttgttttgcattttctcctctccttccccacttactcagagaatttaaagtctgtagagtcagcacagccccatcagtccaggaacttcccaccaccagcccttgactgtcccattaactgacatggtcagatttccagctccccctactccctgctgtgaaacaatccctctccctgtgagaggaaactgtggagcgtttcttatcgaaggttaaatggactctgctcataaacctcttactgagatgcttcctgatagccaggctggccagagaggggtgcaggggttagatagtaagtggtggtcgtttgtggtcagttacctcaattctgttcattgcagtgcccgtaaaccatgtagaaagctcccagcactgaaaggcaggagtgttagcatctcgctttatccaccataacgtaaagaactgcggtgtgataacagccttcacggggccacggtggaaccaagacagcaggcgaggccatgcctaaacaagtggtctggcacgggcactggccagctgctctctccaagcaggtggcccagatcccacccacgtggactttctcatcaggtgcagcgcctgccactctcagccactgggtgtgtcactctcctcttcatctcagcattctccatcacttcccctccagaaaaacggatggaaggaagccctctgtgacactgcttctgagaagaagcatttccgggaccgatatcatctgtctggtctctgtgaacagcaaggaatcttcttgaccgttcttgggcactggaggctggctaggagttcagtaataaacgtggccttcgtgctgtagggcagagtggatgcagtttgtagctttcagagtgtctcattgagtctagatcattgaaccaacacttaaccaaatgtcccactcccatcacactaggacttgtcattccatgcccctctcctagtggtcatggtttcatatgggcatacaactgctactgaagttatatagccttgaaaactcagtgcaggttgcccttaattttccccaaacccctccatcggcaagtctagttgccctttagcacctaaagatctgcaccccaaaccaatgtcaccataaagagggcacgaagaagagtgggtgtgatcccaacggggttttgtaactgaagaagcccagtgtgagcttctcatcttttcatatacctctaacccccggtactcattgaatcattgatgaggtatctcaattgagatttgcaaggactttgataccatttgaaatggaaaaattttgaacgggctttaacatgtttaagaaatatggatggggccggccacagtggctcacgcctgtaatcccagaactctggaaggctgaggcaggcggatcacctgagatcaggagttcgaggccagcctggccaagatggcaaaaaccccgactctactaaaaatacaaaattagccaggcgtggtggcgtacgcctgtaatcccagctactcaggaggcaggagaatcgcttgagcctgggaggcagaggctgcggtgagccgagatcgtgtcactgcactccagcctgggtgacagagactccattta

SEQ ID NO: 7354 - protein, 720 aa, Homo sapiens; identical to SEQ ID NO: 1033

SEQ ID NO: 7355 - DNA, 6924 bp, Homo sapiens
gggcgcggtgacgtcgcgggcgcctgggccgtgctgtggcggcggcggcggcggtagtggcggcggcggcggtgcctgggcggcagcagcagcagtagcggcagccctgaggacgatatggtgtaagatacttcttcaagattggacagctggggaccttcttctgattaaccttaaaccaacttgtagccatagagacacctcacaaggttcccatttttgttgttgttgttgttgattttctgctcacacctttcctgaccttgcaaccatgtatggaagtgcccgctctgttgggaaggtggagccgagcagccagagccctgggcgttcacccaggcttccacgttcccctcgcttgggtcaccgtcgaaccaacagtacgggagggagttcgggaagcagtgttggaggtggcagtgggaaaaccctttcaatggaaaatatacaatctttaaatgctgcctatgccacctctggccctatgtatctaagtgaccatgaaaatgtgggttcagaaacacctaaaagcaccatgacacttggccgttctgggggacgtctgccttacggtgttcggatgactgctatgggtagtagccccaatatagctagcagtggggttgctagtgacaccatagcatttggagagcatcacctccctcctgtgagtatggcatccactgtacctcactcccttcgtcaggcgagagataacacaatcatggatctgcagacacagctgaaggaagtattaagagaaaatgatctcttgcggaaggatgtggaagtaaaggagagcaaattgagttcttcaatgaatagcatcaagaccttctggagcccagagctgaagaaggaacgagccctgagaaaagatgaagcttccaaaatcaccatttggaaggaacagtacagagttgtacaggaggaaaaccagcacatgcagatgacaatccaggctctccaggatgaattgcggatccagagggacctgaatcagctgtttcagcaggatagtagcagcaggactggcgaaccttgtgtagcagagctgacagaggagaactttcagaggcttcatgctgagcatgagcggcaggccaaagagctgtttcttcttcgaaagacattggaggaaatggagctgcgtattgagactcaaaagcagaccctaaatgctcgggatgaatccattaagaagcttctggaaatgttgcagagcaaaggactttctgccaaggctaccgaggaagaccatgagagaacaagacgactggcagaggcagagatgcacgttcatcacctagaaagccttttggagcagaaggaaaaagagaacagtatgttgagagaggagatgcatcgaaggtttgagaatgctcctgattctgccaaaacaaaagctctgcaaactgttattgagatgaaggattcaaaaatttcctctatggagcgtgggcttcgagacctggaagaggaaattcagatgctgaaatcgaatggtgctttgagtactgaggaaagggaagaagaaatgaagcaaatggaagtgtatcggagccattctaaatttatgaaaaataaggtagaacaactgaaggaggaactaagttcgaaagaggctcaatgggaggagctgaaaaagaaagcggctggtcttcaggctgagattggccaggtgaaacaggagctgtccagaaaggacacagaactactcgccctgcagacaaagctagaaacactcacaaaccagttctcagatagtaaacagcacattgaagtgttgaaggagtccttgactgctaaggagcagagggctgccatcctgcagactgaggtggatgctctccgattgcgtttggaagagaaggaaaccatgttgaataaaaagacaaaacaaattcaggatatggctgaagagaaggggacacaagctggagagatacatgacctcaaggacatgttggatgtgaaggagcggaaggttaatgttcttcagaagaagattgaaaatcttcaagagcagcttagagacaaggaaaagcagatgagcagcttgaaagaacgggtcaaatccttgcaggctgacaccaccaacactgacactgccttgacaactttggaggaggcccttgcagagaaagagcggacaattgaacgcttaaaggagcagagggacagagatgagcgagagaagcaagaggaaattgataactacaaaaaagatcttaaagacttgaaggaaaaagtcagcctgttgcaaggcgacctttcagagaaagaggcttcacttttggatctgaaagagcatgcttcttctctggcatcctcaggactgaaaaaggactcacggcttaagacactagagattgctttggagcagaagaaggaggagtgtctgaaaatggaatcacaattgaaaaaggcacatgaggcagcattggaagccagagccagtccagagatgagtgaccgaatacagcacttggagagagagatcaccaggtacaaagatgaatctagcaaggcccaggcagaagttgatcgactcttagaaatcttgaaggaggtggaaaatgagaagaatgacaaagataagaagatagctgagttggaaaggcaagtgaaagaccagaataagaaggtagcaaatctgaagcacaaggaacaggtggaaaaaaagaagagtgcacaaatgttagaggaggcgcgacgacgggaggacaatctcaacgacagctctcagcagctacaggacagtctccgtaagaaggatgacaggattgaagagctggaagaagcactaagagaaagtgtacagataactgcagagcgggaaatggtgctagcacaagaggaatcagccaggaccaatgctgaaaaacaggtggaggagttactgatggccatggagaaggtaaagcaggaactagaatccatgaaagcaaagctgtcctccacccagcagtctctggcagaaaaggaaactcacttgactaatcttcgggcagagagaaggaaacacttagaggaagttctggagatgaagcaagaagctcttctggctgccattagtgaaaaagacgccaatatagctctcttggagctttcgtcctctaagaagaagacccaagaggaagtggctgccctgaagcgggagaaggatcgtctggtacagcagcttaagcagcagacgcaaaatcgaatgaagctaatggccgacaactacgaggatgaccacttcaaatcctcccattccaatcaaacaaatcacaagccctccccagaccagatcatccagcccctcttagaacttgaccaaaatagaagtaaattaaagttgtacattggacacctgacaaccctctgccatgaccgagaccccctgatcctccgtggactcactccaccagcttcctataacttggacgatgaccaggcggcttgggagaatgagctgcagaagatgacccgggggcagcttcaggatgagttagagaaaggtgaacgggacaatgcagaactgcaggagtttgccaacgccattcttcagcagatagcagaccattgtcccgacatcctagagcaagtggtcaacgccctggaagagtcctcttgaccctgctttatggggaagcctgaggtagtcaacccaggagccaagaaaagagaactacgaggaacaggtgcccggaaccttcttggcaccaaacactacaaacttcatcccaacttgctcacttgaagaagtgtgattccagcaccgtttctacatctgccatcttactctgcctttctgctttggatgtggtctctacactaaccttcttgatgtccagggtagataaagggtcgaatctctctgaagaactgccacctggtcatcagcagtggagaactgtgggagctggtggctctgccctgacagagagccatggagcagaggagcctctcacctcctgtcctctgacatgagaatgaaaccaggaatggacttggagttcaacaggctgagaggatgcctccaatggaccagagagctgagtgttctaatatcacaataggtgctttctcctaaaagggcaaaaaacaatctcaaaaagattagaaaaagagaaggggggaagggaagagaaaatcgactcttctttttactgtctcttctgcttactttccacatgagatgctttgtaccggggagctgtgagcaggcctcacgatggcttgggagcactcgttctcccaaggtctgagtcttcatccagccctgcctgtctgtcgcagccttcctcactctgttcctcggccagttaacaagaagatggtgtgaggtgttctccaccagtctctcctgtttgagactgttgacgttatcatactgaggtgttagatcaaatatctctaattgaagaacatgtgaggttgaaagagcaccagccagggcaacatagcgtgaccctgtctctacaaaaaattaaaaagagaacatacaaagttgacatatgagaccctgttgtccccgcctgcagctttgccccagtaacagatgcccgttgctcttgggctggtttcccctgaacacctccaagaggctgcctgccttgccagcacccgtgtcctgagctcctgcagcccagtggctgctgaagttgtgatccctcactcaccctgctagctttgcccttgactcgtcttctctgaacctcagcctcgtgcattgcctggaaccttcttctagcataaatgaaggtttttcctcctacacacattccttcctcggttatttcattcagagaatatttatgaaatgcctactgtgtgcaagtcatccatccttgaaaaggccacttctcagtgagggagagatgtagtggattctgtgagacatacctgctggagttgaagcagtaaatagcatgtccttcccctccccgatcttaaggtgtgttttctagaaaagttccctaatggaattcatgagtttgggggtctcagtcacccgcttgcctgtaggattccatttgatgattctggatttttgctgtttgttattgcccttagaggggctctgagtatctacttgtgggtggccatttcctgacatctgcatgtacctcgtggaattcagccagcttcatgttgcaaatcagaaagctgaccccaagactgcaaatcaatgaaggtattggcattgttaaggacgtagcgtagacaacagcagtcataaataattaggcaggaacttaacccaaatctagttctttgaccacctctaccaccagaacccagcagacactcacatctcctgataagagttgctggactcgatgtttttgttttgcattttctcctctccttccccacttactcagagaatttaaagtctgtagagtcagcacagccccatcagtccaggaacttcccaccaccagcccttgactgtcccattaactgacatggtcagatttccagctccccctactccctgctgtgaaacaatccctctccctgtgagaggaaactgtggagcgtttcttatcgaaggttaaatggactctgctcataaacctcttactgagatgcttcctgatagccaggctggccagagaggggtgcaggggttagatagtaagtggtggtcgtttgtggtcagttacctcaattctgttcattgcagtgcccgtaaaccatgtagaaagctcccagcactgaaaggcaggagtgttagcatctcgctttatccaccataacgtaaagaactgcggtgtgataacagccttcacggggccacggtggaaccaagacagcaggcgaggccatgcctaaacaagtggtctggcacgggcactggccagctgctctctccaagcaggtggcccagatcccacccacgtggactttctcatcaggtgcagcgcctgccactctcagccactgggtgtgtcactctcctcttcatctcagcattctccatcacttcccctccagaaaaacggatggaaggaagccctctgtgacactgcttctgagaagaagcatttccgggaccgatatcatctgtctggtctctgtgaacagcaaggaatcttcttgaccgttcttgggcactggaggctggctaggagttcagtaataaacgtggccttcgtgctgtagggcagagtggatgcagtttgtagctttcagagtgtctcattgagtctagatcattgaaccaacacttaaccaaatgtcccactcccatcacactaggacttgtcattccatgcccctctcctagtggtcatggtttcatatgggcatacaactgctactgaagttatatagccttgaaaactcagtgcaggttgcccttaattttccccaaacccctccatcggcaagtctagttgccctttagcacctaaagatctgcaccccaaaccaatgtcaccataaagagggcacgaagaagagtgggtgtgatcccaacggggttttgtaactgaagaagcccagtgtgagcttctcatcttttcatatacctctaacccccggtactcattgaatcattgatgaggtatctcaattgagatttgcaaggactttgataccatttgaaatggaaaaattttgaacgggctttaacatgtttaagaaatatggatggggccggccacagtggctcacgcctgtaatcccagaactctggaaggctgaggcaggcggatcacctgagatcaggagttcgaggccagcctggccaagatggcaaaaaccccgactctactaaaaatacaaaattagccaggcgtggtggcgtacgcctgtaatcccagctactcaggaggcaggagaatcgcttgagcctgggaggcagaggctgcggtgagccgagatcgtgtcactgcactccagcctgggtgacagagactccattta

SEQ ID NO: 7356 - protein, 1116 aa, Homo sapiens; identical to SEQ ID NO: 1037

SEQ ID NO: 7357 - DNA, 6840 bp, Homo sapiens
gggcgcggtgacgtcgcgggcgcctgggccgtgctgtggcggcggcggcggcggtagtggcggcggcggcggtgcctgggcggcagcagcagcagtagcggcagccctgaggacgatatggtgtaagatacttcttcaagattggacagctggggaccttcttctgattaaccttaaaccaacttgtagccatagagacacctcacaaggttcccatttttgttgttgttgttgttgattttctgctcacacctttcctgaccttgcaaccatgtatggaagtgcccgctctgttgggaaggtggagccgagcagccagagccctgggcgttcacccaggcttccacgttcccctcgcttgggtcaccgtcgaaccaacagtacgggagggagttcgggaagcagtgttggaggtggcagtgggaaaaccctttcaatggaaaatatacaatctttaaatgctgcctatgccacctctggccctatgtatctaagtgaccatgaaaatgtgggttcagaaacacctaaaagcaccatgacacttggccgttctgggggacgtctgccttacggtgttcggatgactgctatgggtagtagccccaatatagctagcagtggggttgctagtgacaccatagcatttggagagcatcacctccctcctgtgagtatggcatccactgtacctcactcccttcgtcaggcgagagataacacaatcatggatctgcagacacagctgaaggaagtattaagagaaaatgatctcttgcggaaggatgtggaagtaaaggagagcaaattgagttcttcaatgaatagcatcaagaccttctggagcccagagctgaagaaggaacgagccctgagaaaagatgaagcttccaaaatcaccatttggaaggaacagtacagagttgtacaggaggaaaaccagcacatgcagatgacaatccaggctctccaggatgaattgcggatccagagggacctgaatcagctgtttcagcaggatagtagcagcaggactggcgaaccttgtgtagcagagctgacagaggagaactttcagaggcttcatgctgagcatgagcggcaggccaaagagctgtttcttcttcgaaagacattggaggaaatggagctgcgtattgagactcaaaagcagaccctaaatgctcgggatgaatccattaagaagcttctggaaatgttgcagagcaaaggactttctgccaaggctaccgaggaagaccatgagagaacaagacgactggcagaggcagagatgcacgttcatcacctagaaagccttttggagcagaaggaaaaagagaacagtatgttgagagaggagatgcatcgaaggtttgagaatgctcctgattctgccaaaacaaaagctctgcaaactgttattgagatgaaggattcaaaaatttcctctatggagcgtgggcttcgagacctggaagaggaaattcagatgctgaaatcgaatggtgctttgagtactgaggaaagggaagaagaaatgaagcaaatggaagtgtatcggagccattctaaatttatgaaaaataagattggccaggtgaaacaggagctgtccagaaaggacacagaactactcgccctgcagacaaagctagaaacactcacaaaccagttctcagatagtaaacagcacattgaagtgttgaaggagtccttgactgctaaggagcagagggctgccatcctgcagactgaggtggatgctctccgattgcgtttggaagagaaggaaaccatgttgaataaaaagacaaaacaaattcaggatatggctgaagagaaggggacacaagctggagagatacatgacctcaaggacatgttggatgtgaaggagcggaaggttaatgttcttcagaagaagattgaaaatcttcaagagcagcttagagacaaggaaaagcagatgagcagcttgaaagaacgggtcaaatccttgcaggctgacaccaccaacactgacactgccttgacaactttggaggaggcccttgcagagaaagagcggacaattgaacgcttaaaggagcagagggacagagatgagcgagagaagcaagaggaaattgataactacaaaaaagatcttaaagacttgaaggaaaaagtcagcctgttgcaaggcgacctttcagagaaagaggcttcacttttggatctgaaagagcatgcttcttctctggcatcctcaggactgaaaaaggactcacggcttaagacactagagattgctttggagcagaagaaggaggagtgtctgaaaatggaatcacaattgaaaaaggcacatgaggcagcattggaagccagagccagtccagagatgagtgaccgaatacagcacttggagagagagatcaccaggtacaaagatgaatctagcaaggcccaggcagaagttgatcgactcttagaaatcttgaaggaggtggaaaatgagaagaatgacaaagataagaagatagctgagttggaaaggcaagtgaaagaccagaataagaaggtagcaaatctgaagcacaaggaacaggtggaaaaaaagaagagtgcacaaatgttagaggaggcgcgacgacgggaggacaatctcaacgacagctctcagcagctacaggacagtctccgtaagaaggatgacaggattgaagagctggaagaagcactaagagaaagtgtacagataactgcagagcgggaaatggtgctagcacaagaggaatcagccaggaccaatgctgaaaaacaggtggaggagttactgatggccatggagaaggtaaagcaggaactagaatccatgaaagcaaagctgtcctccacccagcagtctctggcagaaaaggaaactcacttgactaatcttcgggcagagagaaggaaacacttagaggaagttctggagatgaagcaagaagctcttctggctgccattagtgaaaaagacgccaatatagctctcttggagctttcgtcctctaagaagaagacccaagaggaagtggctgccctgaagcgggagaaggatcgtctggtacagcagcttaagcagcagacgcaaaatcgaatgaagctaatggccgacaactacgaggatgaccacttcaaatcctcccattccaatcaaacaaatcacaagccctccccagaccagatcatccagcccctcttagaacttgaccaaaatagaagtaaattaaagttgtacattggacacctgacaaccctctgccatgaccgagaccccctgatcctccgtggactcactccaccagcttcctataacttggacgatgaccaggcggcttgggagaatgagctgcagaagatgacccgggggcagcttcaggatgagttagagaaaggtgaacgggacaatgcagaactgcaggagtttgccaacgccattcttcagcagatagcagaccattgtcccgacatcctagagcaagtggtcaacgccctggaagagtcctcttgaccctgctttatggggaagcctgaggtagtcaacccaggagccaagaaaagagaactacgaggaacaggtgcccggaaccttcttggcaccaaacactacaaacttcatcccaacttgctcacttgaagaagtgtgattccagcaccgtttctacatctgccatcttactctgcctttctgctttggatgtggtctctacactaaccttcttgatgtccagggtagataaagggtcgaatctctctgaagaactgccacctggtcatcagcagtggagaactgtgggagctggtggctctgccctgacagagagccatggagcagaggagcctctcacctcctgtcctctgacatgagaatgaaaccaggaatggacttggagttcaacaggctgagaggatgcctccaatggaccagagagctgagtgttctaatatcacaataggtgctttctcctaaaagggcaaaaaacaatctcaaaaagattagaaaaagagaaggggggaagggaagagaaaatcgactcttctttttactgtctcttctgcttactttccacatgagatgctttgtaccggggagctgtgagcaggcctcacgatggcttgggagcactcgttctcccaaggtctgagtcttcatccagccctgcctgtctgtcgcagccttcctcactctgttcctcggccagttaacaagaagatggtgtgaggtgttctccaccagtctctcctgtttgagactgttgacgttatcatactgaggtgttagatcaaatatctctaattgaagaacatgtgaggttgaaagagcaccagccagggcaacatagcgtgaccctgtctctacaaaaaattaaaaagagaacatacaaagttgacatatgagaccctgttgtccccgcctgcagctttgccccagtaacagatgcccgttgctcttgggctggtttcccctgaacacctccaagaggctgcctgccttgccagcacccgtgtcctgagctcctgcagcccagtggctgctgaagttgtgatccctcactcaccctgctagctttgcccttgactcgtcttctctgaacctcagcctcgtgcattgcctggaaccttcttctagcataaatgaaggtttttcctcctacacacattccttcctcggttatttcattcagagaatatttatgaaatgcctactgtgtgcaagtcatccatccttgaaaaggccacttctcagtgagggagagatgtagtggattctgtgagacatacctgctggagttgaagcagtaaatagcatgtccttcccctccccgatcttaaggtgtgttttctagaaaagttccctaatggaattcatgagtttgggggtctcagtcacccgcttgcctgtaggattccatttgatgattctggatttttgctgtttgttattgcccttagaggggctctgagtatctacttgtgggtggccatttcctgacatctgcatgtacctcgtggaattcagccagcttcatgttgcaaatcagaaagctgaccccaagactgcaaatcaatgaaggtattggcattgttaaggacgtagcgtagacaacagcagtcataaataattaggcaggaacttaacccaaatctagttctttgaccacctctaccaccagaacccagcagacactcacatctcctgataagagttgctggactcgatgtttttgttttgcattttctcctctccttccccacttactcagagaatttaaagtctgtagagtcagcacagccccatcagtccaggaacttcccaccaccagcccttgactgtcccattaactgacatggtcagatttccagctccccctactccctgctgtgaaacaatccctctccctgtgagaggaaactgtggagcgtttcttatcgaaggttaaatggactctgctcataaacctcttactgagatgcttcctgatagccaggctggccagagaggggtgcaggggttagatagtaagtggtggtcgtttgtggtcagttacctcaattctgttcattgcagtgcccgtaaaccatgtagaaagctcccagcactgaaaggcaggagtgttagcatctcgctttatccaccataacgtaaagaactgcggtgtgataacagccttcacggggccacggtggaaccaagacagcaggcgaggccatgcctaaacaagtggtctggcacgggcactggccagctgctctctccaagcaggtggcccagatcccacccacgtggactttctcatcaggtgcagcgcctgccactctcagccactgggtgtgtcactctcctcttcatctcagcattctccatcacttcccctccagaaaaacggatggaaggaagccctctgtgacactgcttctgagaagaagcatttccgggaccgatatcatctgtctggtctctgtgaacagcaaggaatcttcttgaccgttcttgggcactggaggctggctaggagttcagtaataaacgtggccttcgtgctgtagggcagagtggatgcagtttgtagctttcagagtgtctcattgagtctagatcattgaaccaacacttaaccaaatgtcccactcccatcacactaggacttgtcattccatgcccctctcctagtggtcatggtttcatatgggcatacaactgctactgaagttatatagccttgaaaactcagtgcaggttgcccttaattttccccaaacccctccatcggcaagtctagttgccctttagcacctaaagatctgcaccccaaaccaatgtcaccataaagagggcacgaagaagagtgggtgtgatcccaacggggttttgtaactgaagaagcccagtgtgagcttctcatcttttcatatacctctaacccccggtactcattgaatcattgatgaggtatctcaattgagatttgcaaggactttgataccatttgaaatggaaaaattttgaacgggctttaacatgtttaagaaatatggatggggccggccacagtggctcacgcctgtaatcccagaactctggaaggctgaggcaggcggatcacctgagatcaggagttcgaggccagcctggccaagatggcaaaaaccccgactctactaaaaatacaaaattagccaggcgtggtggcgtacgcctgtaatcccagctactcaggaggcaggagaatcgcttgagcctgggaggcagaggctgcggtgagccgagatcgtgtcactgcactccagcctgggtgacagagactccattta

SEQ ID NO: 7358 - protein, 1088 aa, Homo sapiens; identical to SEQ ID NO: 1035

SEQ ID NO: 7359 - DNA, 7052 bp, Homo sapiens
gtgctgtggcggcggcggcggcggtagtggcggcggcggcggtgcctgggcggcagcagcagcagtagcggcagccctgaggacggtgagacggccgcggcggcggcgacagcgcggaagtcgcgcgggacccagagcttcccccctgtcgctagtgctgaggctttcgcctttcctacccagcttcttgctcacggcccgggctgggctgggcagggcaacgcgcccccggggaggggcggagctgtagatatggtgtaagatacttcttcaagattggacagctggggaccttcttctgattaaccttaaaccaacttgtagccatagagacacctcacaaggttcccatttttgttgttgttgttgttgattttctgctcacacctttcctgaccttgcaaccatgtatggaagtgcccgctctgttgggaaggtggagccgagcagccagagccctgggcgttcacccaggcttccacgttcccctcgcttgggtcaccgtcgaaccaacagtacgggagggagttcgggaagcagtgttggaggtggcagtgggaaaaccctttcaatggaaaatatacaatctttaaatgctgcctatgccacctctggccctatgtatctaagtgaccatgaaaatgtgggttcagaaacacctaaaagcaccatgacacttggccgttctgggggacgtctgccttacggtgttcggatgactgctatgggtagtagccccaatatagctagcagtggggttgctagtgacaccatagcatttggagagcatcacctccctcctgtgagtatggcatccactgtacctcactcccttcgtcaggcgagagataacacaatcatggatctgcagacacagctgaaggaagtattaagagaaaatgatctcttgcggaaggatgtggaagtaaaggagagcaaattgagttcttcaatgaatagcatcaagaccttctggagcccagagctgaagaaggaacgagccctgagaaaagatgaagcttccaaaatcaccatttggaaggaacagtacagagttgtacaggaggaaaaccagcacatgcagatgacaatccaggctctccaggatgaattgcggatccagagggacctgaatcagctgtttcagcaggatagtagcagcaggactggcgaaccttgtgtagcagagctgacagaggagaactttcagaggcttcatgctgagcatgagcggcaggccaaagagctgtttcttcttcgaaagacattggaggaaatggagctgcgtattgagactcaaaagcagaccctaaatgctcgggatgaatccattaagaagcttctggaaatgttgcagagcaaaggactttctgccaaggctaccgaggaagaccatgagagaacaagacgactggcagaggcagagatgcacgttcatcacctagaaagccttttggagcagaaggaaaaagagaacagtatgttgagagaggagatgcatcgaaggtttgagaatgctcctgattctgccaaaacaaaagctctgcaaactgttattgagatgaaggattcaaaaatttcctctatggagcgtgggcttcgagacctggaagaggaaattcagatgctgaaatcgaatggtgctttgagtactgaggaaagggaagaagaaatgaagcaaatggaagtgtatcggagccattctaaatttatgaaaaataagattggccaggtgaaacaggagctgtccagaaaggacacagaactactcgccctgcagacaaagctagaaacactcacaaaccagttctcagatagtaaacagcacattgaagtgttgaaggagtccttgactgctaaggagcagagggctgccatcctgcagactgaggtggatgctctccgattgcgtttggaagagaaggaaaccatgttgaataaaaagacaaaacaaattcaggatatggctgaagagaaggggacacaagctggagagatacatgacctcaaggacatgttggatgtgaaggagcggaaggttaatgttcttcagaagaagattgaaaatcttcaagagcagcttagagacaaggaaaagcagatgagcagcttgaaagaacgggtcaaatccttgcaggctgacaccaccaacactgacactgccttgacaactttggaggaggcccttgcagagaaagagcggacaattgaacgcttaaaggagcagagggacagagatgagcgagagaagcaagaggaaattgataactacaaaaaagatcttaaagacttgaaggaaaaagtcagcctgttgcaaggcgacctttcagagaaagaggcttcacttttggatctgaaagagcatgcttcttctctggcatcctcaggactgaaaaaggactcacggcttaagacactagagattgctttggagcagaagaaggaggagtgtctgaaaatggaatcacaattgaaaaaggcacatgaggcagcattggaagccagagccagtccagagatgagtgaccgaatacagcacttggagagagagatcaccaggtacaaagatgaatctagcaaggcccaggcagaagttgatcgactcttagaaatcttgaaggaggtggaaaatgagaagaatgacaaagataagaagatagctgagttggaaagtctcacctcaaggcaagtgaaagaccagaataagaaggtagcaaatctgaagcacaaggaacaggtggaaaaaaagaagagtgcacaaatgttagaggaggcgcgacgacgggaggacaatctcaacgacagctctcagcagctacaggacagtctccgtaagaaggatgacaggattgaagagctggaagaagcactaagagaaagtgtacagataactgcagagcgggaaatggtgctagcacaagaggaatcagccaggaccaatgctgaaaaacaggtggaggagttactgatggccatggagaaggtaaagcaggaactagaatccatgaaagcaaagctgtcctccacccagcagtctctggcagaaaaggaaactcacttgactaatcttcgggcagagagaaggaaacacttagaggaagttctggagatgaagcaagaagctcttctggctgccattagtgaaaaagacgccaatatagctctcttggagctttcgtcctctaagaagaagacccaagaggaagtggctgccctgaagcgggagaaggatcgtctggtacagcagcttaagcagcagacgcaaaatcgaatgaagctaatggccgacaactacgaggatgaccacttcaaatcctcccattccaatcaaacaaatcacaagccctccccagaccaggatgaggaggagggtatatgggcatagccaatcagaggcttagttcagccattttgttcagaacgatcatccagcccctcttagaacttgaccaaaatagaagtaaattaaagttgtacattggacacctgacaaccctctgccatgaccgagaccccctgatcctccgtggactcactccaccagcttcctataacttggacgatgaccaggcggcttgggagaatgagctgcagaagatgacccgggggcagcttcaggatgagttagagaaaggtgaacgggacaatgcagaactgcaggagtttgccaacgccattcttcagcagatagcagaccattgtcccgacatcctagagcaagtggtcaacgccctggaagagtcctcttgaccctgctttatggggaagcctgaggtagtcaacccaggagccaagaaaagagaactacgaggaacaggtgcccggaaccttcttggcaccaaacactacaaacttcatcccaacttgctcacttgaagaagtgtgattccagcaccgtttctacatctgccatcttactctgcctttctgctttggatgtggtctctacactaaccttcttgatgtccagggtagataaagggtcgaatctctctgaagaactgccacctggtcatcagcagtggagaactgtgggagctggtggctctgccctgacagagagccatggagcagaggagcctctcacctcctgtcctctgacatgagaatgaaaccaggaatggacttggagttcaacaggctgagaggatgcctccaatggaccagagagctgagtgttctaatatcacaataggtgctttctcctaaaagggcaaaaaacaatctcaaaaagattagaaaaagagaaggggggaagggaagagaaaatcgactcttctttttactgtctcttctgcttactttccacatgagatgctttgtaccggggagctgtgagcaggcctcacgatggcttgggagcactcgttctcccaaggtctgagtcttcatccagccctgcctgtctgtcgcagccttcctcactctgttcctcggccagttaacaagaagatggtgtgaggtgttctccaccagtctctcctgtttgagactgttgacgttatcatactgaggtgttagatcaaatatctctaattgaagaacatgtgaggttgaaagagcaccagccagggcaacatagcgtgaccctgtctctacaaaaaattaaaaagagaacatacaaagttgacatatgagaccctgttgtccccgcctgcagctttgccccagtaacagatgcccgttgctcttgggctggtttcccctgaacacctccaagaggctgcctgccttgccagcacccgtgtcctgagctcctgcagcccagtggctgctgaagttgtgatccctcactcaccctgctagctttgcccttgactcgtcttctctgaacctcagcctcgtgcattgcctggaaccttcttctagcataaatgaaggtttttcctcctacacacattccttcctcggttatttcattcagagaatatttatgaaatgcctactgtgtgcaagtcatccatccttgaaaaggccacttctcagtgagggagagatgtagtggattctgtgagacatacctgctggagttgaagcagtaaatagcatgtccttcccctccccgatcttaaggtgtgttttctagaaaagttccctaatggaattcatgagtttgggggtctcagtcacccgcttgcctgtaggattccatttgatgattctggatttttgctgtttgttattgcccttagaggggctctgagtatctacttgtgggtggccatttcctgacatctgcatgtacctcgtggaattcagccagcttcatgttgcaaatcagaaagctgaccccaagactgcaaatcaatgaaggtattggcattgttaaggacgtagcgtagacaacagcagtcataaataattaggcaggaacttaacccaaatctagttctttgaccacctctaccaccagaacccagcagacactcacatctcctgataagagttgctggactcgatgtttttgttttgcattttctcctctccttccccacttactcagagaatttaaagtctgtagagtcagcacagccccatcagtccaggaacttcccaccaccagcccttgactgtcccattaactgacatggtcagatttccagctccccctactccctgctgtgaaacaatccctctccctgtgagaggaaactgtggagcgtttcttatcgaaggttaaatggactctgctcataaacctcttactgagatgcttcctgatagccaggctggccagagaggggtgcaggggttagatagtaagtggtggtcgtttgtggtcagttacctcaattctgttcattgcagtgcccgtaaaccatgtagaaagctcccagcactgaaaggcaggagtgttagcatctcgctttatccaccataacgtaaagaactgcggtgtgataacagccttcacggggccacggtggaaccaagacagcaggcgaggccatgcctaaacaagtggtctggcacgggcactggccagctgctctctccaagcaggtggcccagatcccacccacgtggactttctcatcaggtgcagcgcctgccactctcagccactgggtgtgtcactctcctcttcatctcagcattctccatcacttcccctccagaaaaacggatggaaggaagccctctgtgacactgcttctgagaagaagcatttccgggaccgatatcatctgtctggtctctgtgaacagcaaggaatcttcttgaccgttcttgggcactggaggctggctaggagttcagtaataaacgtggccttcgtgctgtagggcagagtggatgcagtttgtagctttcagagtgtctcattgagtctagatcattgaaccaacacttaaccaaatgtcccactcccatcacactaggacttgtcattccatgcccctctcctagtggtcatggtttcatatgggcatacaactgctactgaagttatatagccttgaaaactcagtgcaggttgcccttaattttccccaaacccctccatcggcaagtctagttgccctttagcacctaaagatctgcaccccaaaccaatgtcaccataaagagggcacgaagaagagtgggtgtgatcccaacggggttttgtaactgaagaagcccagtgtgagcttctcatcttttcatatacctctaacccccggtactcattgaatcattgatgaggtatctcaattgagatttgcaaggactttgataccatttgaaatggaaaaattttgaacgggctttaacatgtttaagaaatatggatggggccggccacagtggctcacgcctgtaatcccagaactctggaaggctgaggcaggcggatcacctgagatcaggagttcgaggccagcctggccaagatggcaaaaaccccgactctactaaaaatacaaaattagccaggcgtggtggcgtacgcctgtaatcccagctactcaggaggcaggagaatcgcttgagcctgggaggcagaggctgcggtgagccgagatcgtgtcactgcactccagcctgggtgacagagactccattta

SEQ ID NO: 7360 - protein, 992 aa, Homo sapiens; identical to SEQ ID NO: 1031

SEQ ID NO: 7361 - DNA, 6920 bp, Homo sapiens
gtgctgtggcggcggcggcggcggtagtggcggcggcggcggtgcctgggcggcagcagcagcagtagcggcagccctgaggacggtgagacggccgcggcggcggcgacagcgcggaagtcgcgcgggacccagagcttcccccctgtcgctagtgctgaggctttcgcctttcctacccagcttcttgctcacggcccgggctgggctgggcagggcaacgcgcccccggggaggggcggagctgtagatatggtgtaagatacttcttcaagattggacagctggggaccttcttctgattaaccttaaaccaacttgtagccatagagacacctcacaaggttcccatttttgttgttgttgttgttgattttctgctcacacctttcctgaccttgcaaccatgtatggaagtgcccgctctgttgggaaggtggagccgagcagccagagccctgggcgttcacccaggcttccacgttcccctcgcttgggtcaccgtcgaaccaacagtacgggagggagttcgggaagcagtgttggaggtggcagtgggaaaaccctttcaatggaaaatatacaatctttaaatgctgcctatgccacctctggccctatgtatctaagtgaccatgaaaatgtgggttcagaaacacctaaaagcaccatgacacttggccgttctgggggacgtctgccttacggtgttcggatgactgctatgggtagtagccccaatatagctagcagtggggttgctagtgacaccatagcatttggagagcatcacctccctcctgtgagtatggcatccactgtacctcactcccttcgtcaggcgagagataacacaatcatggatctgcagacacagctgaaggaagtattaagagaaaatgatctcttgcggaaggatgtggaagtaaaggagagcaaattgagttcttcaatgaatagcatcaagaccttctggagcccagagctgaagaaggaacgagccctgagaaaagatgaagcttccaaaatcaccatttggaaggaacagtacagagttgtacaggaggaaaaccagcacatgcagatgacaatccaggctctccaggatgaattgcggatccagagggacctgaatcagctgtttcagcaggatagtagcagcaggactggcgaaccttgtgtagcagagctgacagaggagaactttcagaggcttcatgctgagcatgagcggcaggccaaagagctgtttcttcttcgaaagacattggaggaaatggagctgcgtattgagactcaaaagcagaccctaaatgctcgggatgaatccattaagaagcttctggaaatgttgcagagcaaaggactttctgccaaggctaccgaggaagaccatgagagaacaagacgactggcagaggcagagatgcacgttcatcacctagaaagccttttggagcagaaggaaaaagagaacagtatgttgagagaggagatgcatcgaaggtttgagaatgctcctgattctgccaaaacaaaagctctgcaaactgttattgagatgaaggattcaaaaatttcctctatggagcgtgggcttcgagacctggaagaggaaattcagatgctgaaatcgaatggtgctttgagtactgaggaaagggaagaagaaatgaagcaaatggaagtgtatcggagccattctaaatttatgaaaaataagattggccaggtgaaacaggagctgtccagaaaggacacagaactactcgccctgcagacaaagctagaaacactcacaaaccagttctcagatagtaaacagcacattgaagtgttgaaggagtccttgactgctaaggagcagagggctgccatcctgcagactgaggtggatgctctccgattgcgtttggaagagaaggaaaccatgttgaataaaaagacaaaacaaattcaggatatggctgaagagaaggggacacaagctggagagatacatgacctcaaggacatgttggatgtgaaggagcggaaggttaatgttcttcagaagaagattgaaaatcttcaagagcagcttagagacaaggaaaagcagatgagcagcttgaaagaacgggtcaaatccttgcaggctgacaccaccaacactgacactgccttgacaactttggaggaggcccttgcagagaaagagcggacaattgaacgcttaaaggagcagagggacagagatgagcgagagaagcaagaggaaattgataactacaaaaaagatcttaaagacttgaaggaaaaagtcagcctgttgcaaggcgacctttcagagaaagaggcttcacttttggatctgaaagagcatgcttcttctctggcatcctcaggactgaaaaaggactcacggcttaagacactagagattgctttggagcagaagaaggaggagtgtctgaaaatggaatcacaattgaaaaaggcacatgaggcagcattggaagccagagccagtccagagatgagtgaccgaatacagcacttggagagagagatcaccaggtacaaagatgaatctagcaaggcccaggcagaagttgatcgactcttagaaatcttgaaggaggtggaaaatgagaagaatgacaaagataagaagatagctgagttggaaagtctcacctcaaggcaagtgaaagaccagaataagaaggtagcaaatctgaagcacaaggaacaggtggaaaaaaagaagagtgcacaaatgttagaggaggcgcgacgacgggaggacaatctcaacgacagctctcagcagctacaggtggaggagttactgatggccatggagaaggtaaagcaggaactagaatccatgaaagcaaagctgtcctccacccagcagtctctggcagaaaaggaaactcacttgactaatcttcgggcagagagaaggaaacacttagaggaagttctggagatgaagcaagaagctcttctggctgccattagtgaaaaagacgccaatatagctctcttggagctttcgtcctctaagaagaagacccaagaggaagtggctgccctgaagcgggagaaggatcgtctggtacagcagcttaagcagcagacgcaaaatcgaatgaagctaatggccgacaactacgaggatgaccacttcaaatcctcccattccaatcaaacaaatcacaagccctccccagaccaggatgaggaggagggtatatgggcatagccaatcagaggcttagttcagccattttgttcagaacgatcatccagcccctcttagaacttgaccaaaatagaagtaaattaaagttgtacattggacacctgacaaccctctgccatgaccgagaccccctgatcctccgtggactcactccaccagcttcctataacttggacgatgaccaggcggcttgggagaatgagctgcagaagatgacccgggggcagcttcaggatgagttagagaaaggtgaacgggacaatgcagaactgcaggagtttgccaacgccattcttcagcagatagcagaccattgtcccgacatcctagagcaagtggtcaacgccctggaagagtcctcttgaccctgctttatggggaagcctgaggtagtcaacccaggagccaagaaaagagaactacgaggaacaggtgcccggaaccttcttggcaccaaacactacaaacttcatcccaacttgctcacttgaagaagtgtgattccagcaccgtttctacatctgccatcttactctgcctttctgctttggatgtggtctctacactaaccttcttgatgtccagggtagataaagggtcgaatctctctgaagaactgccacctggtcatcagcagtggagaactgtgggagctggtggctctgccctgacagagagccatggagcagaggagcctctcacctcctgtcctctgacatgagaatgaaaccaggaatggacttggagttcaacaggctgagaggatgcctccaatggaccagagagctgagtgttctaatatcacaataggtgctttctcctaaaagggcaaaaaacaatctcaaaaagattagaaaaagagaaggggggaagggaagagaaaatcgactcttctttttactgtctcttctgcttactttccacatgagatgctttgtaccggggagctgtgagcaggcctcacgatggcttgggagcactcgttctcccaaggtctgagtcttcatccagccctgcctgtctgtcgcagccttcctcactctgttcctcggccagttaacaagaagatggtgtgaggtgttctccaccagtctctcctgtttgagactgttgacgttatcatactgaggtgttagatcaaatatctctaattgaagaacatgtgaggttgaaagagcaccagccagggcaacatagcgtgaccctgtctctacaaaaaattaaaaagagaacatacaaagttgacatatgagaccctgttgtccccgcctgcagctttgccccagtaacagatgcccgttgctcttgggctggtttcccctgaacacctccaagaggctgcctgccttgccagcacccgtgtcctgagctcctgcagcccagtggctgctgaagttgtgatccctcactcaccctgctagctttgcccttgactcgtcttctctgaacctcagcctcgtgcattgcctggaaccttcttctagcataaatgaaggtttttcctcctacacacattccttcctcggttatttcattcagagaatatttatgaaatgcctactgtgtgcaagtcatccatccttgaaaaggccacttctcagtgagggagagatgtagtggattctgtgagacatacctgctggagttgaagcagtaaatagcatgtccttcccctccccgatcttaaggtgtgttttctagaaaagttccctaatggaattcatgagtttgggggtctcagtcacccgcttgcctgtaggattccatttgatgattctggatttttgctgtttgttattgcccttagaggggctctgagtatctacttgtgggtggccatttcctgacatctgcatgtacctcgtggaattcagccagcttcatgttgcaaatcagaaagctgaccccaagactgcaaatcaatgaaggtattggcattgttaaggacgtagcgtagacaacagcagtcataaataattaggcaggaacttaacccaaatctagttctttgaccacctctaccaccagaacccagcagacactcacatctcctgataagagttgctggactcgatgtttttgttttgcattttctcctctccttccccacttactcagagaatttaaagtctgtagagtcagcacagccccatcagtccaggaacttcccaccaccagcccttgactgtcccattaactgacatggtcagatttccagctccccctactccctgctgtgaaacaatccctctccctgtgagaggaaactgtggagcgtttcttatcgaaggttaaatggactctgctcataaacctcttactgagatgcttcctgatagccaggctggccagagaggggtgcaggggttagatagtaagtggtggtcgtttgtggtcagttacctcaattctgttcattgcagtgcccgtaaaccatgtagaaagctcccagcactgaaaggcaggagtgttagcatctcgctttatccaccataacgtaaagaactgcggtgtgataacagccttcacggggccacggtggaaccaagacagcaggcgaggccatgcctaaacaagtggtctggcacgggcactggccagctgctctctccaagcaggtggcccagatcccacccacgtggactttctcatcaggtgcagcgcctgccactctcagccactgggtgtgtcactctcctcttcatctcagcattctccatcacttcccctccagaaaaacggatggaaggaagccctctgtgacactgcttctgagaagaagcatttccgggaccgatatcatctgtctggtctctgtgaacagcaaggaatcttcttgaccgttcttgggcactggaggctggctaggagttcagtaataaacgtggccttcgtgctgtagggcagagtggatgcagtttgtagctttcagagtgtctcattgagtctagatcattgaaccaacacttaaccaaatgtcccactcccatcacactaggacttgtcattccatgcccctctcctagtggtcatggtttcatatgggcatacaactgctactgaagttatatagccttgaaaactcagtgcaggttgcccttaattttccccaaacccctccatcggcaagtctagttgccctttagcacctaaagatctgcaccccaaaccaatgtcaccataaagagggcacgaagaagagtgggtgtgatcccaacggggttttgtaactgaagaagcccagtgtgagcttctcatcttttcatatacctctaacccccggtactcattgaatcattgatgaggtatctcaattgagatttgcaaggactttgataccatttgaaatggaaaaattttgaacgggctttaacatgtttaagaaatatggatggggccggccacagtggctcacgcctgtaatcccagaactctggaaggctgaggcaggcggatcacctgagatcaggagttcgaggccagcctggccaagatggcaaaaaccccgactctactaaaaatacaaaattagccaggcgtggtggcgtacgcctgtaatcccagctactcaggaggcaggagaatcgcttgagcctgggaggcagaggctgcggtgagccgagatcgtgtcactgcactccagcctgggtgacagagactccattta

SEQ ID NO: 7362 - protein, 948 aa, Homo sapiens; identical to SEQ ID NO: 1029

SEQ ID NO: 7363 - DNA, 488 bp, Homo sapiens
agtttccctcttgttgcccaggctggagtgcaatggcgtgatctcggctcaccacaacctccacctcctgggttcaagcaattctcctgcctgggagacggaggttgcagtgagctgagattgcaccactgcactccagcctgggtgacagtgagatttcatttcaaaaaaaggaaaaagaaacaaaaacaaaaaaaaattaagtaaatatctatatctaagatatagatctgacatgcaaaaacatattgtgaagtgggaaaaaaaccaggttacagaagaatgcttacgaggcaatctcatttgtgtacaaaggatatatacacgtatgtttgtatatacacagaaatgatttgtacggtaaaagcctatttctgaaagaccagatggaatcacctttttccttacttacatacttttcttctctgttccattttctttttatagtgagtgtgtattactttactttttttggcctggtgtggtgg

SEQ ID NO: 7364 - protein, 38 aa, Homo sapiens [sequence omitted]

SEQ ID NO: 7365 - DNA, 1872 bp, Homo sapiens
gttccaaaattgtgatgctatactagggacctaccattaaatgtattttcaggatgaattctcaatgtgcagagcagagctgattgtatcaataagccaaaataatgtacaccttactgcttcaaagtagtacaggtttttccccttctccaggaaattgtgttttggaattctgtttattataggtaaggaatataatctatatcttagtaatagtaagaggaagtggttctttttttcggaggtgctcaggagatcagcatctagcacaaggtgaggacctgcccttgctctaggatgttttggcactaggcactagagctaggatgctgttgtttgacgtgcaccctctgcttgcagtcccagcccagttctgacttcttcagcatactaagagttagtaatacattcttagaactagagggcatttttagagatcatccagtctttccgtaatttaaagaatatgtatgataatatctaacctgagtcttgtaccatggagggtttgtatactttcattttcccagttaattcttagagtaaccttctaagaaataagaattgttgtaacattttacagatggggagttaaaacttagagagactgaggttacatgacctagtgcccgatcgattcaaacccgcaaacttgcgttcttgatcataacgctgcaattcctccctgtgcagagagaatatagtgacatgctgaaggcctatacaactacttggtattagttttgggactggaattcatcatttctgacttcgctaattatgatgtgcatagacgaccatgactcttgtttgattggtaggttgaggactagccacaaagaaagatggggagaagaagaaacaattcatgttggtagagaggagaaaaggatttaggttgatggaattacatagcctcagaaagagataggcatcttttgtgacgagattgtgaaagaagagaaagatgtattgattgatctcttcattcaacacggttttgggagtacctgctgagaacccttctgagcactggggatacagtggcaaatgaaacaaaggctgatgatctctatctctatctctatctctatctctatctctatctctatctctatctctatctgtgtctctatctctatctatctctatctctatctctatctctatctctatctctatctgtgtctctatctctatctctatctctatctctatctctatctctatctgtgtctctatctatctctatctctatctctatctctatctctatctgtgtctctatctctatctctatctctatctctatctatctctatctctatctctatctatctctatctctatctatctatctctatctctatctctatatctctatctctatctgtgtctctatctctatctctatctctatctctatctgtgtctctatctctatctctatctctatctctatctctatctgtgtctctatctctatctctatctctatctctatctgtgtctctatctctatctctatctctatctctatctgtgtctctatctctatctctatctctatctctatctgtgtctctatctctatctctatctctatctgtgtctctatctctatctctatctctatctctatctgtgtctctatctctatctctatctctatctgtgtctctatctctatctctatctctatctctatctgtgtctctatctctatctctatctctatctgtgtctctatctctatctctatctctatctctatctgtgtctctatctctatctctatctctatctctatctctatctgtgtctctatctctatctctattctatctctatctctatctgtgtctctatctc

SEQ ID NO: 7366 - protein, 273 aa, Homo sapiens
MKQRLMISISISISISISISISISICVSISIYLYLYLYLYLYLYLCLYLYLYLYLYLYLYLCLYLSLSLSLSLSLSVSLSLSLSLSLSISISISIYLYLYLSISISISISLSLSVSLSLSLSLSLSVSLSLSLSLSLSLSVSLSLSLSLSLSVSLSLSLSLSLSVSLSLSLSLSLSVSLSLSLSLSVSLSLSLSLSLSVSLSLSLSLSVSLSLSLSLSLSVSLSLSLSLSVSLSLSLSLSLSVSLSLSLSLSLSLSVSLSLSLFYLYLYLCLY

SEQ ID NO: 7367 - DNA, 2379 bp, Homo sapiens
ctatctctatctctatctgtgtctctatctctatctctatctctatctctatctctatctctatctgtgtctctatctatctctatctctatctctatctctatctctatctgtgtctctatctctatctctatctctatctctatctatctctatctctatctctatctatctctatctctatctatctatctctatctctatctctatatctctatctctatctgtgtctctatctctatctctatctctatctctatctgtgtctctatctctatcttctatctctatctctatctctatctctatctgtgtctctatctctatctctatctctatctctatctgtgtctctatctctatcttctctatctctatctctatctctatctctatctctatctgtgtctctatctctatctctattctatctctatctctatctgtgtctctatctctatctctatctctatctctatctctatctctgcctattgatatatctgtatatatctatctaaatctctgaaacagctgctcagagtaaaagaggactgggtgctatgaaaagagatagggcttagaatctttttcagatgagtgtgtttctctcactgttgtatgtgggttgttgagttatggggtaggggttgggggtgggtgctgcagggtgacactggtatgatattcaagtctgcttgtgaaggtagactggctttggagtgctccttcccctttcagcatcctctctatacctggggcagagcatttgttctagcagcggtacagatgatcatgccagaggcgttctgatctgggaggcttgcttcctgccacaaccactcccccagctccagctggtgagatggcactgcttacggtggtgatggggtaatgtcttgtttgtgggaagatgtagatactgataagcttaagaagttacattaagttacttaagaagataatgataagcttaagaaaatacagttacttaagaagataatgataagcttaagaaaatacaagcataagtatggctcttaatacgctagaaaaatcaaaatggaatgtataagtttcaaaccgtcagagtaaaacccagtttacccagtggagaatagagaagaatggggaggggagagaaagaaatgtgatagcatgtggacaccatgaaaaagaaggctgagataagtacaaatcatgggaaagtcaataaatacaaataagtacttagatcaaaatgaaaatataaatctcagttgggctaaaaagatacagaaagatactgtcaacaagagttaaacagacaaaaagtaacagcaaagttaaaaatacagagatagaaaaaaatttaaaaataaaagttatatcaggaaaataggccttcccaaatatgatttattttaatattgattaaattatcttttaaggcacacagagcaatgttatatgctgataaaagaaacagtagatcaagaaaatataaccgtgccgatcgatgcacctaacagcatggcatttaaatacataaagcgggccgggcgcggcagcccacgcctgtaatcccagcactttgggaggctgaggcgggtggatcacctgagttcaggagttcgagaccagcctggccaacatagtgaaaccctgtctctactgaaaatacaaaaatgagctgggcgtggtggcacgcacctgtagttttcagctacttgagagcctgaggcaggagaattgcttgaacccaggaggtagaggttgcagtgagctaagatcatacccctgggtgacagcgcaagattctgtctataagtaaacaaataaatgtatatatagcagcaatgaggtgaaacagataaatcaacaattgtagttggtcatttggatgtgctcctgtcagaatttgatcaaataaagaagcatcaacataaagttttaataacattaacaagctcaagttcatagatgtgtatatagaattttgtcctaacatagagaataaacaatattttcaagaacttactgaacagtcgtaaaaactaaccatgtactgggtcataaaggaaactttaaaattcccaagagtcaaagtcacatgactttgcactcctaatgcagcaaaattagaaatcaggagtaaagatagtaaagtagtaataaaggtagtaaagaacagcagcagaaaaccaaaataagtatataatcttgaaacatactaccaaaatgacctgtgggttaaaggaaaaatataaacatttaaaaatgagtggcagtgaaagctctctatataaaaatttgtggaacataattagaaaaaaatctgtggggtgtaactaaagcagtatttagagggaaatagctagtttttaacatatttatcag

SEQ ID NO: 7368 - protein, 63 aa, Homo sapiens
MWVVELWGRGWGWVLQGDTGMIFKSACEGRLALECSFPFQHPLYTWGRAFVLAAVQMIMPEAF

SEQ ID NO: 7369 - DNA, 315 bp, Homo sapiens
ttttttttctttttttttggagacagagtctcattctgtcaccaaggctgagtgcagtggcgtgatctcggaaaaaagacaaaaagttctgattatatccaagttatatcattatgatcacttccccaagccaattgttccttctagttttcttggaaagtcatctgcaaagtactttccttttaacatctcaacttaggccgggcacggtggctcacgcctgtaatcccagcactttgggaggccgaggcgggtggatcacctgagatgggaattcgagaccagcctgaccaacaatggagaaaccctgtctct

SEQ ID NO: 7370 - protein, 50 aa, Homo sapiens
MITSPSQLFLLVFLESHLQSTFLLTSQLRPGTVAHACNPSTLGGRGGWIT

SEQ ID NO: 7371 - DNA, 3242 bp, Homo sapiens
cttctggtgagccttccccatcctaggctggctccctggacgggaccttccttttttttttttttcctccctccatttcactctgtcacccaggctagagtgcaatgatgcaatctcagctcactgcaacctctgtctcccaggctcaagccattctcacgcctcagcctcctgagtaactgggatgacaggtgcgtgccaccacgctcagctaatttttgtatttttagtagagatggagttttgccacgttggtcaggctggcctcaagttgatccgcccaccttggctgggattacaggggagagccaccgcgcccagcttattttttgtatttttagtagagatggggttttgtcatgttggccaggctggaccagaacacctagcctcaggtgatctgcctgcctcggcctcccaaagtgctgggattacaggcacgagccaccatgcctggctgggcccttccttttgtctagaggccctgggatgcagcccgctgacatcttccttgaaatctcacacaaccactttctcttttggggtcagcctctcccccatgcctggctggggcataaaaacatatggtattttctcaacagctccctgcttttctttcctttccagaaacaggcccacagcagcccttcttgagaactctgaggactctcatgactttttttggttcttttttttttttttttttttgagaaagggtctctcactgttgcccaggctggagtgcagtggcatgatctcagctcactgcaacctttgcctcccaggttcaagcgattcttatacatcagcctcccaagtagctgggattataggcaccggccaccatacccggctaattttttgtatttttagtagagacggggtttcactatgttggccaggctggtctcaaactcctggcctcaagtgatctgccctcctcggcctcccaaagtgttgggattacaagcgtgagccactgtgcctggcctctcatgacttttgagagggcctgaccaaccctccacctggcccagtgactgtagcctagatgtcagccaggggcaccctgctccttaaaatctagataagatgctctttgcttcccactcagggcaagtcctgggcaggctgtccacctgcatgagttccagtaggttgggtgttcttgtggctgcctctggctctgatttctctttcagctaaagtcttgttcttgcctccgtgtctcctgtctgttcccttacctgtaccctgcctcaggcccaaattgttggacacaagacttgcttaaagtttcctctaaaccagctctaaacagaaggctgttaggtgtggcagactttgtcttttttctccaatttttatgaatcaataacctgttaaagcgctcagcaggaccagtctctgcaagacctttccttaggaggaagttctgttatgggacaaagatgtccgcaatcactgttcctgacttaggcttcctgagtctcatcacctgaagctctgagtttgtctggccctctttgtcccctgctccccattgcttcctccccgactcccactttcttcgatgaccaccaccagcactgctgcccccaccaccttaaagcctccttcccagcaaggctttgagaggccacctggtcaggacagtgagttaagctcattaatgaggttctgggtcctcgcagctctgtaattttcatttctgcacctccccagtctgggtgacacaggagactgaccaactatgggtatttccagcctctgcccactcctcagaagcccagcacagctcccagtgtctcctagcacgtaaggcactggctaaacattggatggtccagctcagctttgtgctgtagcggctctgtccacaattataaaatggaaacgtcagagggctcaaggccccttagacctcctcattcatttgacaagcgttttttgcacattcattttgtgttaggaaccagccaagtaatggggcacaaagatgaaaaacaaacagacaaatatgtggtttctgccctgacggagttgacacaccagtgtgagagtcagacatcgatcatataatctcaaagacaaattgctgggattacagatgtgagccactgcacccggcatactttgccattctttttctaatgtattggatgcttaattaatttagaaatttcttattttctaatatatgcatttaaggctataaacttcccttgaagatctactttagctacatctcatcagctttgctatattgtttttttcattattgttgatttgcttttcccgttattatttatttttacctatatttcatttataaatgcattacaaattttccagatctgtggggcttaactttttgttgtttattattttaattttaaatttattgtggcccgagcactctgtctgtgtagcatggcaggcagcacgttggtcccccgaggacatctgcgcccctgaactgcatgttaatatggcaaaggggagttaaggctgcagatggaatcaaggttggccttgcaatgggtgattattctgcattatccaggtagacccagtgtaatcacaagcatccttgtaagtggcaaagaggcagaggagacagcgccagagaggcagctgcatgagaaggatcaagatgttgctgactttgaagttggaagaagaaggccatgagcctcagtatgtgggcggcttctagaagctggaaggggcaaggagatggatttgacccttcagcctccaggggcagctgtacctgccatcactgattgtagcctggtgaggcctgttttagacttctgacctgtagagctgtaacataatacatttgggttgttttcaaccactaagtttgtggtaatttgttgtagcagctgtagaaaatgaatacatatgaatcctctggcatttgtttgagatttgctctatggcctagtatgtggttgtaaatgttccatctgtgcctgaaaaaatgtatatttctaattcagtagtctctgctttttttttttattttgtaccccatcaataaaatgattttcagcatgtatccccaaataaacaatattttatttattgattgattgataaacagacatgtttaatgatagcttgcttttcacagaggtgacttcggagacttctaatctataatccaggagtatataaccatgcagcacagaccaattagtcacatgtaaaataaactagattcttaccac

SEQ ID NO: 7372 - protein, 248 aa, Homo sapiens
MTGACHHAQLIFVFLVEMEFCHVGQAGLKLIRPPWLGLQGRATAPSLFFVFLVEMGFCHVGQAGPEHLASGDLPASASQSAGITGTSHHAWLGPSFCLEALGCSPLTSSLKSHTTTFSFGVSLSPMPGWGIKTYGIFSTAPCFSFLSRNRPTAALLENSEDSHDFFWFFFFFFFLRKGLSLLPRLECSGMISAHCNLCLPGSSDSYTSASQVAGIIGTGHHTRLIFCIFSRDGVSLCWPGWSQTPGLK

SEQ ID NO: 7373 - DNA, 1264 bp, Homo sapiens
acgtgtacacaggaaagggccctgacaagaggatgggactgcagttgtggctgccagagtcttgctttgtcgcccaggttggagtgcagtggcacgatctcggctcagtgcaacctccgcctcctgagttcaagtgattctcctgcctcagcctccctagtagctgggattacaggacaaggagagggacaaattccttcttggcatccttatggccctgtgacctgctaatgaatgctgactctgagttgctactagaatttggtttccttgtggcttcccaggaattggtctcactctgctcactctgtctcccaagctggagtgcagtggtacagtcacggctcactgcagcctccacttcctggactcaagtgatcttctcacttcagccttctgagtagctgggactacagccccctctgcagctcttcatgggggtccactcaagtcagaagccacatttgggtgtgattcagagagctgtttatgcaaaaccagctttgtcaccatcaggcaaggcacctgaattcccaccgcagagagtgttgtggccgtgaggacttttctgtcaccagccatttccaggtagacccagtgtaatcacaagcatccttgtaagtggcaaagaggcagaggagacagcgccagagaggcagctgcatgagaaggatcaagatgttgctgactttgaagttggaagaagaaggccatgagcctcagtatgtgggcggcttctagaagctggaaggggcaaggagatggatttgacccttcagcctccaggggcagctgtacctgccatcactgattgtagcctggtgaggcctgttttagacttctgacctgtagagctgtaacataatacatttgggttgttttcaaccactaagtttgtggtaatttgttgtagcagctgtagaaaatgaatacatatgaatcctctggcatttgtttgagatttgctctatggcctagtatgtggttgtaaatgttccatctgtgcctgaaaaaatgtatatttctaattcagtagtctctgctttttttttttattttgtaccccatcaataaaatgattttcagcatgtatccccaaataaacaatattttatttattgattgattgataaacagacatgtttaatgatagcttgcttttcacagaggtgacttcggagacttctaatctataatccaggagtatataaccatgcagcacagaccaattagtcacatgtaaaataaactagattcttaccac

SEQ ID NO: 7374 - protein, 57 aa, Homo sapiens
MNADSELLLEFGFLVASQELVSLCSLCLPSWSAVVQSRLTAASTSWTQVIFSLQPSE

SEQ ID NO: 7375 - DNA, 1926 bp, Homo sapiens
tatttgtcctcgtccctgccagtctcgaaaaggcactctgtcacgtgtacacaggaaagggccctgacaagaggatgggactgcagttgtggctgccagggccccggccagggtgaaaacaaggaacattccagagaagatcacaaggatgcgaataaaatcggagctgcacagggatctttgggctgtaataggaggggacacacaggggttaggggagggtctagcccttggctccctcagcccagccctcctgtcaccttgcctctcccctttcccccaccttattctatcccacccgccaccgttggccaactcctctcctaaacagtggactctgctttttcccctcctcttatccctaatcctaggagctttctgtctggcttccctcctggcccctcgtgtatgcattctctctagcggtggggattaaggagaaaactcacgtggccagtgggtagagagagtccgggcaggcagctgcctgaagtcagccagagtctgcatgtgcccagctgtcctggcctccagcatctctggaaaaacagagacagaatgagtagcagcaggggaccccatagggcacatctgaaggcctgagaggtgctggatgggatgggaaggcagaaacaggctgaccttatctaggggtaggagtggggagtactggttggggtatcaccgctaccccacgtgatggcacagagagttgcctggaacttaccactgacataaggttggagtgcagtggcacgatctcggctcagtgcaacctccgcctcctgagttcaagtgattctcctgcctcagcctccctagtagctgggattacaggacaaggagagggacaaattccttcttggcatccttatggccctgtgacctgctaatgaatgctgactctgagttgctactagaatttggtttccttgtggcttcccaggaattggtctcactctgctcactctgtctcccaagctggagtgcagtggtacagtcacggctcactgcagcctccacttcctggactcaagtgatcttctcacttcagccttctgagtagctgggactacagccccctctgcagctcttcatgggggtccactcaagtcagaagccacatttgggtgtgattcagagagctgtttatgcaaaaccagctttgtcaccatcaggcaaggcacctgaattcccaccgcagagagtgttgtggccgtgaggacttttctgtcaccagccatttccaggtagacccagtgtaatcacaagcatccttgtaagtggcaaagaggcagaggagacagcgccagagaggcagctgcatgagaaggatcaagatgttgctgactttgaagttggaagaagaaggccatgagcctcagtatgtgggcggcttctagaagctggaaggggcaaggagatggatttgacccttcagcctccaggggcagctgtacctgccatcactgattgtagcctggtgaggcctgttttagacttctgacctgtagagctgtaacataatacatttgggttgttttcaaccactaagtttgtggtaatttgttgtagcagctgtagaaaatgaatacatatgaatcctctggcatttgtttgagatttgctctatggcctagtatgtggttgtaaatgttccatctgtgcctgaaaaaatgtatatttctaattcagtagtctctgctttttttttttattttgtaccccatcaataaaatgattttcagcatgtatccccaaataaacaatattttatttattgattgattgataaacagacatgtttaatgatagcttgcttttcacagaggtgacttcggagacttctaatctataatccaggagtatataaccatgcagcacagaccaattagtcacatgtaaaataaactagattcttaccac

SEQ ID NO: 7376 - protein, 57 aa, Homo sapiens; identical to SEQ ID NO: 7374

SEQ ID NO: 7377 - DNA, 2458 bp, Homo sapiens
gcgcagctggctgggctcctgcttcccactctccacctcatccatatttgtcctcgtccctgccagtctcgaaaaggcactctgtcacgtgtacacaggaaagggccctgacaagaggatgggactgcagttgtggctgccaggtctcactctcccttggatggtcggcggggtgggggtggaggccagggctgtagtgcagctcccgcaggtgctggctcagggggagcaggcaggctccggttttcggtaatcctcctggatggggatggtgctgccctcctcctccctggggcagctgtaatgacaaggctctgcaggctccacaggactttctcctttgtctgcagaaggagatccgatgagtcttggccagcagtgggggcagggggagacgggagaaggagatgggtagaggcgggtgcgcttgggggaggggtgtcaggagcacgccagctaaggggagagaaggggtaggaccaaggctggtgaagtggagctggtgggtttcagtgagattccaggcgtgggcagtggggttgagccagtggggtgtggtgcaggggcaggaccggaggcctgtgttctgtctcttacttgatctatatttccttcgttgatggaggaacagggccccggccagggtgaaaacaaggaacattccagagaagatcacaaggatgcgaataaaatcggagctgcacagggatctttgggctgtaataggaggggacacacaggggttaggggagggtctagcccttggctccctcagcccagccctcctgtcaccttgcctctcccctttcccccaccttattctatcccacccgccaccgttggccaactcctctcctaaacagtggactctgctttttcccctcctcttatccctaatcctaggagctttctgtctggcttccctcctggcccctcgtgtatgcattctctctagcggtggggattaaggagaaaactcacgtggccagtgggtagagagagtccgggcaggcagctgcctgaagtcagccagagtctgcatgtgcccagctgtcctggcctccagcatctctggaaaaacagagacagaatgagtagcagcaggggaccccatagggcacatctgaaggcctgagaggtgctggatgggatgggaaggcagaaacaggctgaccttatctaggggtaggagtggggagtactggttggggtatcaccgctaccccacgtgatggcacagagagttgcctggaacttaccactgacataaggttggagtgcagtggcacgatctcggctcagtgcaacctccgcctcctgagttcaagtgattctcctgcctcagcctccctagtagctgggattacaggacaaggagagggacaaattccttcttggcatccttatggccctgtgacctgctaatgaatgctgactctgagttgctactagaatttggtttccttgtggcttcccaggaattggtctcactctgctcactctgtctcccaagctggagtgcagtggtacagtcacggctcactgcagcctccacttcctggactcaagtgatcttctcacttcagccttctgagtagctgggactacagccccctctgcagctcttcatgggggtccactcaagtcagaagccacatttgggtgtgattcagagagctgtttatgcaaaaccagctttgtcaccatcaggcaaggcacctgaattcccaccgcagagagtgttgtggccgtgaggacttttctgtcaccagccatttccaggtagacccagtgtaatcacaagcatccttgtaagtggcaaagaggcagaggagacagcgccagagaggcagctgcatgagaaggatcaagatgttgctgactttgaagttggaagaagaaggccatgagcctcagtatgtgggcggcttctagaagctggaaggggcaaggagatggatttgacccttcagcctccaggggcagctgtacctgccatcactgattgtagcctggtgaggcctgttttagacttctgacctgtagagctgtaacataatacatttgggttgttttcaaccactaagtttgtggtaatttgttgtagcagctgtagaaaatgaatacatatgaatcctctggcatttgtttgagatttgctctatggcctagtatgtggttgtaaatgttccatctgtgcctgaaaaaatgtatatttctaattcagtagtctctgctttttttttttattttgtaccccatcaataaaatgattttcagcatgtatccccaaataaacaatattttatttattgattgattgataaacagacatgtttaatgatagcttgcttttcacagaggtgacttcggagacttctaatctataatccaggagtatataaccatgcagcacagaccaattagtcacatgtaaaataaactagattcttaccac

SEQ ID NO: 7378 - protein, 57 aa, Homo sapiens; identical to SEQ ID NO: 7374

SEQ ID NO: 7379 - DNA, 1855 bp, Homo sapiens
aattccttcttggcatccttatggccctgtgacctgctaatgaatgctgactctgagttgctactagaatttggtttccttgtggcttcccaggaattgtgagccatgttggataaggacctgcaagggaagaatgaggaagcctgggacagtgcaggaggggagagcactggtggtagagaggagtgatgacaagggtctccgccaaaagggaaatggaggggttaaagaagctgctggggagggttaaaaacaatgtgttctcactcgtaggtgggaattgaacaatgagaacacttggacacaggaaggggaacatcacacactggggcctgtcgtggggtgtggggagggaggagggatagcattaggagatatacctaatgtaaatgatgagttaatgggtgcagcacaccaacatggcacatgtatacctatgtaacaaacctgcacattgtgtacatgtaccctagaacttaaagtataattaaaaaacaaaacaaaacaaaacaaaaacaatgaggtgctattgttttagtggtgagtatccggagacctgggagttctatttaccaggtataacctgggctcaaaattccaggctgacttcaggcatgtcctcatctcatagatgccagcactaaggcccagagagggccgagctcattcagcccacccatcttctcacccctgactgcatttcccgggggtccttctgcagccaggtgctgctgtggtactttgggatctattggctgagctcccagagaagggtcatggattgggctagtttggaacaagtgaagggactgaagatgggctcagtatggggcgaagaccttcaggaagggtctgcagagtgagtaggggggttttgactaggaaaagttccaaccctgccggggccgctgtcaagagaaaagcatctattacagttacatttttaagttaagtagactgaagaatatttcttgtgtattaaagacgttcctttttggttgatttgcaatggaaaagcttttgttttctttttttttttggaaacagggtctcactctgctcactctgtctcccaagctggagtgcagtggtacagtcacggctcactgcagcctccacttcctggactcaagtgatcttctcacttcagccttctgagtagctgggactacagccccctctgcagctcttcatgggggtccactcaagtcagaagccacatttgggtgtgattcagagagctgtttatgcaaaaccagctttgtcaccatcaggcaaggcacctgaattcccaccgcagagagtgttgtggccgtgaggacttttctgtcaccagccatttccaggtagacccagtgtaatcacaagcatccttgtaagtggcaaagaggcagaggagacagcgccagagaggcagctgcatgagaaggatcaagatgttgctgactttgaagttggaagaagaaggccatgagcctcagtatgtgggcggcttctagaagctggaaggggcaaggagatggatttgacccttcagcctccaggggcagctgtacctgccatcactgattgtagcctggtgaggcctgttttagacttctgacctgtagagctgtaacataatacatttgggttgttttcaaccactaagtttgtggtaatttgttgtagcagctgtagaaaatgaatacatatgaatcctctggcatttgtttgagatttgctctatggcctagtatgtggttgtaaatgttccatctgtgcctgaaaaaatgtatatttctaattcagtagtctctgctttttttttttattttgtaccccatcaataaaatgattttcagcatgtatcccc

SEQ ID NO: 7380 - protein, 37 aa, Homo sapiens
MQNQLCHHQARHLNSHRRECCGREDFSVTSHFQVDPV

SEQ ID NO: 7381 - DNA, 1097 bp, Homo sapiens
acgtgtacacaggaaagggccctgacaagaggatgggactgcagttgtggctgccagagtcttgctttgtcgcccaggttggagtgcagtggcacgatctcggctcagtgcaacctccgcctcctgagttcaagtgattctcctgcctcagcctccctagtagctgggattacaggacaaggagagggacaaattccttcttggcatccttatggccctgtgacctgctaatgaatgctgactctgagttgctactagaatttggtttccttgtggcttcccaggaattggtctcactctgctcactctgtctcccaagctggagtgcagtggtacagtcacggctcactgcagcctccacttcctggactcaagtgatcttctcacttcagccttctgagtagctgggactacagccccctctgcagctcttcatgggggtccactcaagtcagaagccacatttgggtgtgattcagagagctgtttatgcaaaaccagctttgtcaccatcaggcaaggcacctgaattcccaccgcagagagtgttgtggccgtgaggacttttctgtcaccagccatttccaggtagacccagtgtaatcacaagcatccttgtaagtggcaaagaggcagaggagacagcgccagagaggcagctgcatgagaaggatcaagatgttgctgactttgaagttggaagaagaaggccatgagcctcagtatgtgggcggcttctagaagctggaaggggcaaggagatggatttgacccttcagcctccaggggcagctgtacctgccatcactgattgtagcctggtgaggcctgttttagacttctgacctgtagagctgtaacataatacatttgggttgttttcaaccactaagtttgtggtaatttgttgtagcagctgtagaaaatgaatacatatgaatcctctggcatttgtttgagatttgctctatggcctagtatgtggttgtaaatgttccatctgtgcctgaaaaaatgtatatttctaattcagtagtctctgctttttttttttattttgtaccccatcaataaaatgattttcagcatgtatcccc

SEQ ID NO: 7382 - protein, 57 aa, Homo sapiens; identical to SEQ ID NO: 7374

SEQ ID NO: 7383 - DNA, 1092 bp, Homo sapiens
gtgtacacaggaaagggccctgacaagaggatgggactgcagttgtggctgccagggccccggccagggtgaaaacaaggaacattccagagaagatcacaaggatgcgaataaaatcggagctgcacagggatctttgggctgttggagtgcagtggcacgatctcggctcagtgcaacctccgcctcctgagttcaagtgattctcctgcctcagcctccctagtagctgggattacaggacaaggagagggacaaattccttcttggcatccttatggccctgtgacctgctaatgaatgctgactctgagttgctactagaatttggtttccttgtggcttcccaggaattggtctcactctgctcactctgtctcccaagctggagtgcagtggtacagtcacggctcactgcagcctccacttcctggactcaagtgatcttctcacttcagccttctgagtagctgggactacagccccctctgcagctcttcatgggggtccactcaagtcagaagccacatttgggtgtgattcagagagctgtttatgcaaaaccagctttgtcaccatcaggcaaggcacctgaattcccaccgcagagagtgttgtggccgtgaggacttttctgtcaccagccatttccaggtagacccagtgtaatcacaagcatccttgtaagtggcaaagaggcagaggagacagcgccagagaggcagctgcatgagaaggatcaagatgttgctgactttgaagttggaagaagaaggccatgagcctcagtatgtgggcggcttctagaagctggaaggggcaaggagatggatttgacccttcagcctccaggggcagctgtacctgccatcactgattgtagcctggtgaggcctgttttagacttctgacctgtagagctgtaacataatacatttgggttgttttcaaccactaagtttgtggtaatttgttgtagcagctgtagaaaatgaatacatatgaatcctctggcatttgtttgagatttgctctatggcctagtatgtggttgtaaatgttccatctgtgcctgaaaaaatgtatatttct

SEQ ID NO: 7384 - protein, 57 aa, Homo sapiens; identical to SEQ ID NO: 7374

SEQ ID NO: 7385 - DNA, 1364 bp, Homo sapiens
cagcaggtctcacagagtttgctctttaatactctccccagcacacggaaggggaagggggtggaggttgctgctatgagagagaaaaaaaaaacagccacaatagagattctgccttcaaaggttggcttgccacctgaagcagccactgcccagggggtgcaaagaagagacagcagcgcccagcttggaggtgctaactccagaggccagcatcagcaactgggcacagaaaggagccgcctgggcagggaccatggcacggccacatccctggtggctgtgcgttctggggaccctggtggggctctcagctactccagcccccaagagctgcccagagaggcactactgggctcagggaaagctgtgctgccagatgtgtgagccaggaacattcctcgtgaaggactgtgaccagcatagaaaggctgctcagtgtgatccttgcataccgggggtctccttctctcctgaccaccacacccggccccactgtgagagctgtcggcactgtaactctggtcttctcgttcgcaactgcaccatcactgccaatgctgagtgtgcctgtcgcaatggctggcagtgcagggacaaggagtgcaccgagtgtgatcctcttccaaacccttcgctgaccgctcggtcgtctcaggccctgagcccacaccctcagcccacccacttaccttatgtcagtgagatgctggaggccaggacagctgggcacatgcagactctggctgacttcaggcagctgcctgcccggactctctctacccactggccaccccaaagatccctgtgcagctccgattttattcgcatccttgtgatcttctctggaatgttccttgttttcaccctggccggggccctgttcctccatcaacgaaggaaatatagatcaaacaaaggagaaagtcctgtggagcctgcagagccttgtcattacagctgccccagggaggaggagggcagcaccatccccatccaggaggattaccgaaaaccggagcctgcctgctccccctgagccagcacctgcgggagctgcactacagccctggcctccacccccaccccgccgaccatccaagggagagtgagacctggcagccacaactgcagtcccatcctcttgtcagggccctttcctgtgtacacgtgacagagtgccttttcgagactggcagggacgaggacaaatatggatgaggtggagagtgggaagcaggagcccagccagctgcgcctgcgctgcaggagggcgggggctctggttgtaaaacacacttcctgctgcgaaagacccacatgctacaagacgggcaaaataaagtgacagatgaccaccctgc

SEQ ID NO: 7386 - protein, 260 aa, Homo sapiens
MARPHPWWLCVLGTLVGLSATPAPKSCPERHYWAQGKLCCQMCEPGTFLVKDCDQHRKAAQCDPCIPGVSFSPDHHTRPHCESCRHCNSGLLVRNCTITANAECACRNGWQCRDKECTECDPLPNPSLTARSSQALSPHPQPTHLPYVSEMLEARTAGHMQTLADFRQLPARTLSTHWPPQRSLCSSDFIRILVIFSGMFLVFTLAGALFLHQRRKYRSNKGESPVEPAEPCHYSCPREEEGSTIPIQEDYRKPEPACSP

SEQ ID NO: 7387 - DNA, 1959 bp, Homo sapiens
cagcaggtctcacagagtttgctctttaatactctccccagcacacggaaggggaagggggtggaggttgctgctatgagagagaaaaaaaaaacagccacaatagagattctgccttcaaaggttggcttgccacctgaagcagccactgcccagggggtgcaaagaagagacagcagcgcccagcttggaggtgctaactccagaggccagcatcagcaactgggcacagaaaggagccgcctgggcagggaccatggcacggccacatccctggtggctgtgcgttctggggaccctggtggggctctcagctactccagcccccaagagctgcccagagaggcactactgggctcagggaaagctgtgctgccagatgtgtgagccaggaacattcctcgtgaaggactgtgaccagcatagaaaggctgctcagtgtgatccttgcataccgggggtctccttctctcctgaccaccacacccggccccactgtgagagctgtcggcactgtaactctggtcttctcgttcgcaactgcaccatcactgccaatgctgagtgtgcctgtcgcaatggctggcagtgcagggacaaggagtgcaccgagtgtgatcctcttccaaacccttcgctgaccgctcggtcgtctcaggccctgagcccacaccctcagcccacccacttaccttatgtcagtgagatgctggaggccaggacagctgggcacatgcagactctggctgacttcaggcagctgcctgcccggactctctctacccactggccaccccaaagatccctgtgcagctccgattttattcgcatccttgtgatcttctctggaatgttccttgttttcaccctggccggggccctgttcctccatcaacgaaggaaatatagatcaaacaaaggagaaagtcctgtggagcctgcagagccttgtcattacagctgccccagggaggaggagggcagcaccatccccatccaggaggattaccgaaaaccggagcctgcctgctccccctgagccagcacctgcgggagctgcactacagccctggcctccacccccaccccgccgaccatccaagggagagtgagacctggcagccacaactgcagtcccatcctcttgtcagggccctttcctgtgtacacgtgacagagtgccttttcgagactggcagggacgaggacaaatatggatgaggtggagagtgggaagcaggagcccagccagctgcgcctgcgctgcaggagggcgggggctctggttgtaaaacacacttcctgctgcgaaagacccacatgctacaagacgggcaaaataaagtgacagatgaccaccctgcagctctccagcttcctctctgaaatcccagtcccaaaatccagtttcctggccgcctcctggctcaggtcaggatctggcagaggaggtttctcagccggttatgttggggcctgcttaagggcgggggtgagaaaggtccccaggctactgtggatcctgtgtctgacttcagatccccttttcccacagttatagctccacttttttgggacaggtggggagcaaaagggtgcagaggtcaggtcttgaaatcaccaggggatttccgggtgaggtgggtggtgagaaaggaaacagcaagcagggctctggcagctgctgcagacggcttcacacagggacgcgggctgccatcttgctctaagtgaaagtgaaagaaaagtcggcagcagagggaacagggaagaaacctaaaggctgcaggctgccaggtgtgcttggagagcccccttcttccgccgggcctcgcaagcagcgtaggactgtggagaagggcggtgggcaaggagggaactcgagagcagcctccatgggcacacaggagggctggtgcctgctgctctgcctggctctatctggagcagcagaaacca

SEQ ID NO: 7388 - protein, 260 aa, Homo sapiens; identical to SEQ ID NO: 7386

SEQ ID NO: 7389 - DNA, 1639 bp, Homo sapiens
gggaggcaccaccttgaagagggcagagaaccagcccttctcaggccttgatcccttaccctctcctcccaggaacattcctcgtgaaggactgtgaccagcatagaaaggctgctcagtgtgatccttgcataccgggggtctccttctctcctgaccaccacacccggccccactgtgagagctgtcggcactgtaactctggtcttctcgttcgcaactgcaccatcactgccaatgctgagtgtgcctgtcgcaatggctggcagtgcagggacaaggagtgcaccgagtgtgatcctcttccaaacccttcgctgaccgctcggtcgtctcaggccctgagcccacaccctcagcccacccacttaccttatgtcagtgagatgctggaggccaggacagctgggcacatgcagactctggctgacttcaggcagctgcctgcccggactctctctacccactggccaccccaaagatccctgtgcagctccgattttattcgcatccttgtgatcttctctggaatgttccttgttttcaccctggccggggccctgttcctccatcaacgaaggaaatatagatcaaacaaaggagaaagtcctgtggagcctgcagagccttgtcattacagctgccccagggaggaggagggcagcaccatccccatccaggaggattaccgaaaaccggagcctgcctgctccccctgagccagcacctgcgggagctgcactacagccctggcctccacccccaccccgccgaccatccaagggagagtgagacctggcagccacaactgcagtcccatcctcttgtcagggccctttcctgtgtacacgtgacagagtgccttttcgagactggcagggacgaggacaaatatggatgaggtggagagtgggaagcaggagcccagccagctgcgcctgcgctgcaggagggcgggggctctggttgtaaaacacacttcctgctgcgaaagacccacatgctacaagacgggcaaaataaagtgacagatgaccaccctgcagctctccagcttcctctctgaaatcccagtcccaaaatccagtttcctggccgcctcctggctcaggtcaggatctggcagaggaggtttctcagccggttatgttggggcctgcttaagggcgggggtgagaaaggtccccaggctactgtggatcctgtgtctgacttcagatccccttttcccacagttatagctccacttttttgggacaggtggggagcaaaagggtgcagaggtcaggtcttgaaatcaccaggggatttccgggtgaggtgggtggtgagaaaggaaacagcaagcagggctctggcagctgctgcagacggcttcacacagggacgcgggctgccatcttgctctaagtgaaagtgaaagaaaagtcggcagcagagggaacagggaagaaacctaaaggctgcaggctgccaggtgtgcttggagagcccccttcttccgccgggcctcgcaagcagcgtaggactgtggagaagggcggtgggcaaggagggaactcgagagcagcctccatgggcacacaggagggctggtgcctgctgctctgcctggctctatctggagcagcagaaacca

SEQ ID NO: 7390 - protein, 110 aa, Homo sapiens
MLEARTAGHMQTLADFRQLPARTLSTHWPPQRSLCSSDFIRILVIFSGMFLVFTLAGALFLHQRRKYRSNKGESPVEPAEPCHYSCPREEEGSTIPIQEDYRKPEPACSP

SEQ ID NO: 7391 - DNA, 1038 bp, Homo sapiens
caccaccttgaagagggcagagaaccagcccttctcaggccttgatcccttaccctctcctcccaggaacattcctcgtgaaggactgtgaccagcatagaaaggctgctcagtgtgatccttgcataccgggggtctccttctctcctgaccaccacacccggccccactgtgagagctgtcggcactgtaactctggtcttctcgttcgcaactgcaccatcactgccaatgctgagtgtgcctgtcgcaatggctggcagtgcagggacaaggagtgcaccgagtgtgatcctcttccaaacccttcgctgaccgctcggtcgtctcaggccctgagcccacaccctcagcccacccacttaccttatgtcagtgagatgctggaggccaggacagctgggcacatgcagactctggctgacttcaggcagctgcctgcccggactctctctacccactggccaccccaaagatccctgtgcagctccgattttattcgcatccttgtgatcttctctggaatgttccttgttttcaccctggccggggccctgttcctccatcaacgaaggaaatatagatcaaacaaaggagaaagtcctgtggagcctgcagagccttgtcattacagctgccccagggaggaggagggcagcaccatccccatccaggaggattaccgaaaaccggagcctgcctgctccccctgagccagcacctgcgggagctgcactacagccctggcctccacccccaccccgccgaccatccaagggagagtgagacctggcagccacaactgcagtcccatcctcttgtcagggccctttcctgtgtacacgtgacagagtgccttttcgagactggcagggacgaggacaaatatggatgaggtggagagtgggaagcaggagcccagccagctgcgcctgcgctgcaggagggcgggggctctggttgtaaaacacacttcctgctgcgaaagacccacatgctacaagacgggcaaaataaagtgacagatgaccaccctgc

SEQ ID NO: 7392 - protein, 110 aa, Homo sapiens; identical to SEQ ID NO: 7390

SEQ ID NO: 7393 - DNA, 1406 bp, Homo sapiens
gaggatgggactgcagttgtggctgccagggccccggccagggtgaaaacaaggaacattccagagaagatcacaaggatgcgaataaaatcggagctgcacagggatctttgggctgttggagtgcagtggcacgatctcggctcagtgcaacctccgcctcctgagttcaagtgattctcctgcctcagcctccctagtagctgggattacaggacaaggagagggacaaattccttcttggcatccttatggccctgtgacctgctaatgaatgctgactctgagttgctactagaatttggtttccttgtggcttcccaggaattgtgagccatgttggataaggacctgcaagggaagaatgaggaagcctgggacagtgcaggaggggagagcactggtggtagagaggagtgatgacaagggtctccgccaaaagggaaatggaggggttaaagaagctgctggggagggttaaaaacaatgtgttctcactcgtaggtgggaattgaacaatgagaacacttggacacaggaaggggaacatcacacactggggcctgtcgtggggtgtggggagggaggagggatagcattaggagatatacctaatgtaaatgatgagttaatgggtgcagcacaccaacatggcacatgtatacctatgtaacaaacctgcacattgtgtacatgtaccctagaacttaaagtataattaaaaaacaaaacaaaacaaaacaaaaacaatgaggtgctattgttttagtggtgagtatccggagacctgggagttctatttaccaggtataacctgggctcaaaattccaggctgacttcaggcatgtcctcatctcatagatgccagcactaaggcccagagagggccgagctcattcagcccacccatcttctcacccctgactgcatttcccgggggtccttctgcagccaggtgctgctgtggtactttgggatctattggctgagctcccagagaagggtcatggattgggctagtttggaacaagtgaagggactgaagatgggctcagtatggggcgaagaccttcaggaagggtctgcagagtgagtaggggggttttgactaggaaaagttccaaccctgccggggccgctgtcaagagaaaagcatctattacagttacatttttaagttaagtagactgaagaatatttcttgtgtattaaagacgttcctttttggttgatttgcaatggaaaagcttttgttttctttttttttttggaaacagggtctcactctgctcactctgtctcccaagctggagtgcagtggtacagtcacggctcactgcagcctccacttcctggactcaagtgatcttctcacttcagccttctgagtagctgggactacagg

SEQ ID NO: 7394 - protein, 32 aa, Homo sapiens
MRIKSELHRDLWAVGVQWHDLGSVQPPPPEFK

SEQ ID NO: 7395 - DNA, 1678 bp, Homo sapiens
cactctgtcacgtgtacacaggaaagggccctgacaagaggatgggactgcagttgtggctgccagggccccggccagggtgaaaacaaggaacattccagagaagatcacaaggatgcgaataaaatcggagctgcacagggatctttgggctgagctttctgtctggcttccctcctggcccctcgtgtatgcattctctctagcggtggggattaaggagaaaactcacgtggccagtgggtagagagagtccgggcaggcagctgcctgaagtcagccagagtctgcatgtgcccagctgtcctggcctccagcatctctggaaaaacagagacagaatgagtagcagcaggggaccccatagggcacatctgaaggcctgagaggttggagtgcagtggcacgatctcggctcagtgcaacctccgcctcctgagttcaagtgattctcctgcctcagcctccctagtagctgggattacaggacaaggagagggacaaattccttcttggcatccttatggccctgtgacctgctaatgaatgctgactctgagttgctactagaatttggtttccttgtggcttcccaggaattgtgagccatgttggataaggacctgcaagggaagaatgaggaagcctgggacagtgcaggaggggagagcactggtggtagagaggagtgatgacaagggtctccgccaaaagggaaatggaggggttaaagaagctgctggggagggttaaaaacaatgtgttctcactcgtaggtgggaattgaacaatgagaacacttggacacaggaaggggaacatcacacactggggcctgtcgtggggtgtggggagggaggagggatagcattaggagatatacctaatgtaaatgatgagttaatgggtgcagcacaccaacatggcacatgtatacctatgtaacaaacctgcacattgtgtacatgtaccctagaacttaaagtataattaaaaaacaaaacaaaacaaaacaaaaacaatgaggtgctattgttttagtggtgagtatccggagacctgggagttctatttaccaggtataacctgggctcaaaattccaggctgacttcaggcatgtcctcatctcatagatgccagcactaaggcccagagagggccgagctcattcagcccacccatcttctcacccctgactgcatttcccgggggtccttctgcagccaggtgctgctgtggtactttgggatctattggctgagctcccagagaagggtcatggattgggctagtttggaacaagtgaagggactgaagatgggctcagtatggggcgaagaccttcaggaagggtctgcagagtgagtaggggggttttgactaggaaaagttccaaccctgccggggccgctgtcaagagaaaagcatctattacagttacatttttaagttaagtagactgaagaatatttcttgtgtattaaagacgttcctttttggttgatttgcaatggaaaagcttttgttttctttttttttttggaaacagggtctcactctgctcactctgtctcccaagctggagtgcagtggtacagtcacggctcactgcagcctccacttcctggactcaagtgatcttctcacttcagccttctgagtagctgggactacagg

SEQ ID NO: 7396 - protein, 43 aa, Homo sapiens
MRIKSELHRDLWAELSVWLPSWPLVYAFSLAVGIKEKTHVASG

SEQ ID NO: 7397 - DNA, 1430 bp, Homo sapiens
ttcccactctccacctcatccatatttgtcctcgtccctgccagtctcgaaaaggcactctgtcacgtgtacacaggaaagggccctgacaagaggatgggactgcagttgtggctgccagagtcttgctttgtcgcccaggttggagtgcagtggcacgatctcggctcagtgcaacctccgcctcctgagttcaagtgattctcctgcctcagcctccctagtagctgggattacaggacaaggagagggacaaattccttcttggcatccttatggccctgtgacctgctaatgaatgctgactctgagttgctactagaatttggtttccttgtggcttcccaggaattgtgagccatgttggataaggacctgcaagggaagaatgaggaagcctgggacagtgcaggaggggagagcactggtggtagagaggagtgatgacaagggtctccgccaaaagggaaatggaggggttaaagaagctgctggggagggttaaaaacaatgtgttctcactcgtaggtgggaattgaacaatgagaacacttggacacaggaaggggaacatcacacactggggcctgtcgtggggtgtggggagggaggagggatagcattaggagatatacctaatgtaaatgatgagttaatgggtgcagcacaccaacatggcacatgtatacctatgtaacaaacctgcacattgtgtacatgtaccctagaacttaaagtataattaaaaaacaaaacaaaacaaaacaaaaacaatgaggtgctattgttttagtggtgagtatccggagacctgggagttctatttaccaggtataacctgggctcaaaattccaggctgacttcaggcatgtcctcatctcatagatgccagcactaaggcccagagagggccgagctcattcagcccacccatcttctcacccctgactgcatttcccgggggtccttctgcagccaggtgctgctgtggtactttgggatctattggctgagctcccagagaagggtcatggattgggctagtttggaacaagtgaagggactgaagatgggctcagtatggggcgaagaccttcaggaagggtctgcagagtgagtaggggggttttgactaggaaaagttccaaccctgccggggccgctgtcaagagaaaagcatctattacagttacatttttaagttaagtagactgaagaatatttcttgtgtattaaagacgttcctttttggttgatttgcaatggaaaagcttttgttttctttttttttttggaaacagggtctcactctgctcactctgtctcccaagctggagtgcagtggtacagtcacggctcactgcagcctccacttcctggactcaagtgatcttctcacttcagccttctgagtagctgggactacagg

SEQ ID NO: 7398 - protein, 34 aa, Homo sapiens
MGLQLWLPESCFVAQVGVQWHDLGSVQPPPPEFK

SEQ ID NO: 7399 - DNA, 720 bp, Homo sapiens
gaggatgggactgcagttgtggctgccagggccccggccagggtgaaaacaaggaacattccagagaagatcacaaggatgcgaataaaatcggagctgcacagggatctttgggctgttggagtgcagtggcacgatctcggctcagtgcaacctccgcctcctgagttcaagtgattctcctgcctcagcctccctagtagctgggattacaggacaaggagagggacaaattccttcttggcatccttatggccctgtgacctgctaatgaatgctgactctgagttgctactagaatttggtttccttgtggcttcccaggaattgtgagccatgttggataaggacctgcaagggaagaatgaggaagcctgggacagtgcaggaggggagagcactggtggtagagaggagtgatgacaagggtctccgccaaaagggaaatggaggggttaaagaagctgctggggagggttaaaaacaatgtgttctcactcgtaggtgggaattgaacaatgagaacacttggacacaggaaggggaacatcacacactggggcctgtcgtggggtgtggggagggaggagggatagcattaggagatatacctaatgtaaatgatgagttaatgggtgcagcacaccaacatggcacatgtatacctatgtaacaaacctgcacattgtgtacatgtaccctagaacttaaagtataatt

SEQ ID NO: 7400 - protein, 32 aa, Homo sapiens; identical to SEQ ID NO: 7394

SEQ ID NO: 7401 - DNA, 992 bp, Homo sapiens
cactctgtcacgtgtacacaggaaagggccctgacaagaggatgggactgcagttgtggctgccagggccccggccagggtgaaaacaaggaacattccagagaagatcacaaggatgcgaataaaatcggagctgcacagggatctttgggctgagctttctgtctggcttccctcctggcccctcgtgtatgcattctctctagcggtggggattaaggagaaaactcacgtggccagtgggtagagagagtccgggcaggcagctgcctgaagtcagccagagtctgcatgtgcccagctgtcctggcctccagcatctctggaaaaacagagacagaatgagtagcagcaggggaccccatagggcacatctgaaggcctgagaggttggagtgcagtggcacgatctcggctcagtgcaacctccgcctcctgagttcaagtgattctcctgcctcagcctccctagtagctgggattacaggacaaggagagggacaaattccttcttggcatccttatggccctgtgacctgctaatgaatgctgactctgagttgctactagaatttggtttccttgtggcttcccaggaattgtgagccatgttggataaggacctgcaagggaagaatgaggaagcctgggacagtgcaggaggggagagcactggtggtagagaggagtgatgacaagggtctccgccaaaagggaaatggaggggttaaagaagctgctggggagggttaaaaacaatgtgttctcactcgtaggtgggaattgaacaatgagaacacttggacacaggaaggggaacatcacacactggggcctgtcgtggggtgtggggagggaggagggatagcattaggagatatacctaatgtaaatgatgagttaatgggtgcagcacaccaacatggcacatgtatacctatgtaacaaacctgcacattgtgtacatgtaccctagaacttaaagtataatt

SEQ ID NO: 7402 - protein, 43 aa, Homo sapiens; identical to SEQ ID NO: 7396

SEQ ID NO: 7403 - DNA, 2462 bp, Homo sapiens
acatgctacaagacgggcaaaataaagtgacagatgaccaccctgcagctctccagcttcctctctgaaatcccagtcccaaaatccagtttcctggccgcctcctggctcaggtcaggatctggcagaggaggtttctcagccggttatgttggggcctgcttaagggcgggggtgagaaaggtccccaggctactgtggatcctgtgtctgacttcagatccccttttcccacagttatagctccacttttttgggacaggtggggagcaaaagggtgcagaggtcaggtcttgaaatcaccaggggatttccgggtgaggtgggtggtgagaaaggaaacagcaagcagggctctggcagctgctgcagacggcttcacacagggacgcgggctgccatcttgctctaagtgaaagtgaaagaaaagtcggcagcagagggaacagggaagaaacctaaaggctgcaggctgccaggtgtgcttggagagcccccttcttccgccgggcctcgcaagcagcgtaggactgtggagaagggcggtgggcaaggagggaactcgagagcagcctccatgggcacacaggagggctggtgcctgctgctctgcctggctctatctggagcagcagaaaccagtgagtctgggagtcggggagagctggctgggagaagagctactgaagccccagggtgccaccctccccgagattccagaagagcaaaggggccggggatgaccccatcgccttctaagcccaacaggggaaaggctcagcggctggcaaaggaaggaaccaatagtgtgtgtggagggagggtggggactccacagggaaaatgctaaagaggggctgcctctgtggctgtggtcaggagccactgtcctacagagagggcactggcctgggagctgacacttcagaagaggaaaggactccccagagccccacccagcagaggggcagtggcgggcagtggacgtggtcctagactgcttcctggcgaaggacggtgcgcaccgtggagctctcgccagcagtgaggacagggcaagggcctcccttgtgctgaagcaggtgccagtgctggacgatggctccctggaggacttcaccgatttccaagggggcacactggcccaagatgacccacctattatctttgaggcctcagtggacctggtccagattccccaggccgaggccttgctccatgctgactgcagtgggaaggaggtgacctgtgagatctcccgctactttctccagatgacagagaccactgttaagacagcagcttggttcatggccaacatgcaggtctctggagggggacctagcatctccttggtgatgaagactcccagggtcaccaagaatgaggcgctctggcacccgacgctgaacttgccactgagcccccaggggactgtgcgaactgcagtggagttccaggtgatgacacagacccaatccctgagcttcctgctggggtcctcagcctccttggactgtggcttctccatggcaccgggcttggacctcatcagtgtggagtggcgactgcagcacaagggcaggggtcagttggtgtacagctggaccgcagggcaggggcaggctgtgcggaagggcgctaccctggagcctgcacaactgggcatggccagggatgcctccctcaccctgcccggcctcactatacaggacgaggggacctacatttgccagatcaccacctctctgtaccgagctcagcagatcatccagctcaacatccaagcttcccctaaagtacgactgagcttggcaaacgaagctctgctgcccaccctcatctgcgacattgctggctattaccctctggatgtggtggtgacgtggacccgagaggagctgggtggatccccagcccaagtctctggtgcctccttctccagcctcaggcaaagcgtggcaggcacctacagcatctcctcctctctcaccgcagaacctggctctgcaggtgccacttacacctgccaggtcacacacatctctctggaggagccccttggggccagcacccaggttgtcccaccagagcggagaacagccttgggagtcatctttgccagcagtctcttccttcttgcactgatgttcctggggcttcagagacggcaagcacctacaggacttgggctgcttcaggctgaacgctgggagaccacttcctgtgctgacacacagagctcccatctccatgaagaccgcacagcgcgtgtaagccagcccagctgacctaaagcgacatgagactactagaaagaaacgacacccttccccaagcccccacagctactccaacccaaacaacaaccaagccagtttaatggtaggaatttgtattttttgcctttgttcagaatacatgacattggtaaatatgccacatgcctttggtggaagtac

SEQ ID NO: 7404 - protein, 338 aa, Homo sapiens
MTETTVKTAAWFMANMQVSGGGPSISLVMKTPRVTKNEALWHPTLNLPLSPQGTVRTAVEFQVMTQTQSLSFLLGSSASLDCGFSMAPGLDLISVEWRLQHKGRGQLVYSWTAGQGQAVRKGATLEPAQLGMARDASLTLPGLTIQDEGTYICQITTSLYRAQQIIQLNIQASPKVRLSLANEALLPTLICDIAGYYPLDVVVTWTREELGGSPAQVSGASFSSLRQSVAGTYSISSSLTAEPGSAGATYTCQVTHISLEEPLGASTQVVPPERRTALGVIFASSLFLLALMFLGLQRRQAPTGLGLLQAERWETTSCADTQSSHLHEDRTARVSQPS

SEQ ID NO: 7405 - DNA, 2155 bp, Homo sapiens
acatgctacaagacgggcaaaataaagtgacagatgaccaccctgcagctctccagcttcctctctgaaatcccagtcccaaaatccagtttcctggccgcctcctggctcaggtcaggatctggcagaggaggtttctcagccggttatgttggggcctgcttaagggcgggggtgagaaaggtccccaggctactgtggatcctgtgtctgacttcagatccccttttcccacagttatagctccacttttttgggacaggtggggagcaaaagggtgcagaggtcaggtcttgaaatcaccaggggatttccgggtgaggtgggtggtgagaaaggaaacagcaagcagggctctggcagctgctgcagacggcttcacacagggacgcgggctgccatcttgctctaagtgaaagtgaaagaaaagtcggcagcagagggaacagggaagaaacctaaaggctgcaggctgccaggtgtgcttggagagcccccttcttccgccgggcctcgcaagcagcgtaggactgtggagaagggcggtgggcaaggagggaactcgagagcagcctccatgggcacacaggagggctggtgcctgctgctctgcctggctctatctggagcagcagaaaccaagccccacccagcagaggggcagtggcgggcagtggacgtggtcctagactgcttcctggcgaaggacggtgcgcaccgtggagctctcgccagcagtgaggacagggcaagggcctcccttgtgctgaagcaggtgccagtgctggacgatggctccctggaggacttcaccgatttccaagggggcacactggcccaagatgacccacctattatctttgaggcctcagtggacctggtccagattccccaggccgaggccttgctccatgctgactgcagtgggaaggaggtgacctgtgagatctcccgctactttctccagatgacagagaccactgttaagacagcagcttggttcatggccaacatgcaggtctctggagggggacctagcatctccttggtgatgaagactcccagggtcaccaagaatgaggcgctctggcacccgacgctgaacttgccactgagcccccaggggactgtgcgaactgcagtggagttccaggtgatgacacagacccaatccctgagcttcctgctggggtcctcagcctccttggactgtggcttctccatggcaccgggcttggacctcatcagtgtggagtggcgactgcagcacaagggcaggggtcagttggtgtacagctggaccgcagggcaggggcaggctgtgcggaagggcgctaccctggagcctgcacaactgggcatggccagggatgcctccctcaccctgcccggcctcactatacaggacgaggggacctacatttgccagatcaccacctctctgtaccgagctcagcagatcatccagctcaacatccaagcttcccctaaagtacgactgagcttggcaaacgaagctctgctgcccaccctcatctgcgacattgctggctattaccctctggatgtggtggtgacgtggacccgagaggagctgggtggatccccagcccaagtctctggtgcctccttctccagcctcaggcaaagcgtggcaggcacctacagcatctcctcctctctcaccgcagaacctggctctgcaggtgccacttacacctgccaggtcacacacatctctctggaggagccccttggggccagcacccaggttgtcccaccagagcggagaacagccttgggagtcatctttgccagcagtctcttccttcttgcactgatgttcctggggcttcagagacggcaagcacctacaggacttgggctgcttcaggctgaacgctgggagaccacttcctgtgctgacacacagagctcccatctccatgaagaccgcacagcgcgtgtaagccagcccagctgacctaaagcgacatgagactactagaaagaaacgacacccttccccaagcccccacagctactccaacccaaacaacaaccaagccagtttaatggtaggaatttgtattttttgcctttgttcagaatacatgacattggtaaatatgccacatgcctttggtggaagtac

SEQ ID NO: 7406 - protein, 468 aa, Homo sapiens; identical to SEQ ID NO: 1041

SEQ ID NO: 7407 - DNA, 5343 bp, Homo sapiens
acatgctacaagacgggcaaaataaagtgacagatgaccaccctgcagctctccagcttcctctctgaaatcccagtcccaaaatccagtttcctggccgcctcctggctcaggtcaggatctggcagaggaggtttctcagccggttatgttggggcctgcttaagggcgggggtgagaaaggtccccaggctactgtggatcctgtgtctgacttcagatccccttttcccacagttatagctccacttttttgggacaggtggggagcaaaagggtgcagaggtcaggtcttgaaatcaccaggggatttccgggtgaggtgggtggtgagaaaggaaacagcaagcagggctctggcagctgctgcagacggcttcacacagggacgcgggctgccatcttgctctaagtgaaagtgaaagaaaagtcggcagcagagggaacagggaagaaacctaaaggctgcaggctgccaggtgtgcttggagagcccccttcttccgccgggcctcgcaagcagcgtaggactgtggagaagggcggtgggcaaggagggaactcgagagcagcctccatgggcacacaggagggctggtgcctgctgctctgcctggctctatctggagcagcagaaaccaagccccacccagcagaggggcagtggcgggcagtggacgtggtcctagactgcttcctggcgaaggacggtgcgcaccgtggagctctcgccagcagtgaggacagggcaagggcctcccttgtgctgaagcaggtgccagtgctggacgatggctccctggaggacttcaccgatttccaagggggcacactggcccaagatgacccacctattatctttgaggcctcagtggacctggtccagattccccaggccgaggccttgctccatgctgactgcagtgggaaggaggtgacctgtgagatctcccgctactttctccagatgacagagaccactgttaagacagcagcttggttcatggccaacatgcaggtctctggagggggacctagcatctccttggtgatgaagactcccagggtcaccaagaatgaggcgctctggcacccgacgctgaacttgccactgagcccccaggggactgtgcgaactgcagtggagttccaggtgatgacacagacccaatccctgagcttcctgctggggtcctcagcctccttggactgtggcttctccatggcaccgggcttggacctcatcagtgtggagtggcgactgcagcacaagggcaggggtcagttggtgtacagctggaccgcagggcaggggcaggctgtgcggaagggcgctaccctggagcctgcacaactgggcatggccagggatgcctccctcaccctgcccggcctcactatacaggacgaggggacctacatttgccagatcaccacctctctgtaccgagctcagcagatcatccagctcaacatccaagcttcccctaaagtacgactgagcttggcaaacgaagctctgctgcccaccctcatctgcgacattgctggctattaccctctggatgtggtggtgacgtggacccgagaggagctgggtggatccccagcccaagtctctggtgcctccttctccagcctcaggcaaagcgtggcaggcacctacagcatctcctcctctctcaccgcagaacctggctctgcaggtgccacttacacctgccaggtcacacacatctctctggaggagccccttggggccagcacccaggttgtcccaccagagcggagaacagccttgggagtcatctttgccagcagtctcttccttcttgcactgatgttcctggggcttcagagacggcaagcacctacaggacttgggctgcttcaggctgaacgctgggagaccacttcctgtgctgacacacagagctcccatctccatgaagaccgcacagcgcgtgtaagccagcccagctgacctaaagcgacatgagactactagaaagaaacgacacccttccccaagcccccacagctactccaacccaaacaacaaccaagccagtttaatggtaggaatttgtattttttgcctttgttcagaatacatgacattggtaaatatgccacatgcctttggtggaagtacaactgttgttattactctatacaagtatgagatcagggttaggaaaaaaagacaaagaggtgatgacagacacacagtggaaaccccacatcgtctcatggcaaaccgaagaacgggatgtgggaagctcagcttcatttgactgcaaagtcccagggttttgttgcacatttgctcatgcacatgggtggtgggaggaaagggggatagcagagacacacagaagagggtacagggtgggtgagaaagaaagtagaagggctaatacccccaaagaacaaggccaactacacctggtgagcctcagagggacagaaacccaggaatgattcctgtgatagggctgggagagccaagaggacggattcgctccaggcttgggacacatcgaggacagtggtggttcttctccagcggtgaccccctgcattaggcaaggaggagcccagaggagagtggagaccttcgaggggggccgttgggagggtactgactgctttcttccagctcttcagtcccgcccttgggcaggacgaagggaatgtgggaaacaagggcgaaaggaaaggaaggatggttttgagcaatgaaatgctgctgcatggaaagtgggcatccagaccctgcccagcatggcctcagcctcttcctgttcgtggaccgagggaagaaggaataaagggccatgggcattctccgctctgttcccagcctgccctcctccccttgcacctgggcttatcccacattaatagcccatcctgaagctcagcaattgccccgaagataggctgagcagatcccatcctcaggttccactgtctatacacacaaaccatgcaaagaggaggaagagaaaggaggcaaagtagaattcagacaggaaagggtggttcaaaggggaatatactacaggaagaacagagaggcggctctcaaggagagggccccatgacagcacagcaatacacaagcacacctgacacaggctggcacgcctccccccaaggtggggctggtgggtctacatgacttctctgcatcctgaggatcggccgggccccaggaagaaccacttgcctcatccctgtctttggcaagtgcacgggtggtgtggaggaaaggattccatgggtgtccaaagatctcacactgctaacaccctcacgctccttcatcaacaggaagagaggaacaggaccctctttaacgagggcaaggagtggcttcctctgagcttgttactttcaaattaagcacttgactcactgtttctctataactaacaggcaatctctctctttatgccaacaattaactgggagctaggttaaattatttggctagataaaactaccagctagatggatttatttggtgccctcatacagaatgctgtagaaaatgtaaagaagagaaagctccttccagctagaagcacatgggactgcttctaggatggaaacaagtcctgctattttcacaatccctaagtgttctccaggcctctggagaacaaagtaaagttgtaagatccccaaagacacggaaaatcctggacgaacagattagaaataactacaaaaaacaagtttttactttcgaaaagggtactgcactgaaaccaagttggactttggtccacccccaggaccctcttcaggcctggtccaggaaggaaagctccacatgaccaggcagtactgagtgagctgccatcttcccagcccctccctagctcctaccagtggccaggttttctagaagtcaccatgggcaccgatactcttctcctcccaagtctgggcagcttcatgggtacttcgcctcagccactcccctccctgccccttcccttggcctccaactctttggggctttgggggaacttgagagtacagaaaaagcaggcagggaggaggcgccagctgttgctcttcgggtaatgacttagattgtgccacgagcagcatttctagtgttgagggacagagtgcaaatgaacgcaacgaaaaaggaggaatgggtgatggagaagcctgggctggaatggaggacggtgggtggggaagtgtgttgagagagcaaacagagggcagaggacatgaatgtggatggcaatggacaacagggaaggggtggtacattctcaagtaaaaaagtagactggacacaggaatcaggaagtcccagacggaaaagagaaagagacaggagaaaacaagagggtgaattacaccaagttaccagacattcaggtctctccattgttaagtgccccatccccatggtctccctccaacccaagccagtgacacacagcatagccccacttcctcagaacaggaggcgccatctccctgcaatgcgttgcagggggaaggcttgtccatcaaagaaatcccttgtctctgcccttcccccgtcccgaaccaggtgacgatcccatagcagcggtctccatacctcagtcagagcagccccactccccaggcaggcaggcaggcagggagaagactccaggaccttcccacctcttcaccccaccagcaacttcagcgatacttacttacaataactaccacgatgatggcacagatggctcccagcatgatcatcatctgaggaaacatggacaaaaaatgagcccttggatttcaggaatgaggaaaagagccacatctctagtgggaaacagaattccttccatccttgggacaatggaaaaaaccacccatcacccaggagacctgcaggcctcttagagaggccctacccttctgcttcccaggggatcataaccacagtatgtctgtagcttttcagattcatcacaggacctgcattgagctcctttttgcttagttcctggtgtcttggggctttagaaggcattccaatagagatacagactctggatatttaaccaattagttcaattttcactgtgaagtgttcagctcattctcaaaagttgcagttatttaaaaatatatatttcaatctgagaaagctgatttaaaagaaaaagaaaaaagtatatatatatataaatgtatatatatgtatatatatatataaatgtatatatatgtatatatatatataaatgtatatatatgtatatatacatatgtgtatatatagtgtgtgtgtgtgtgtgtgtgtgtgtatgtatatatgcctga

SEQ ID NO: 7408 - protein, 468 aa, Homo sapiens; identical to SEQ ID NO: 1041

SEQ ID NO: 7409 - DNA, 5650 bp, Homo sapiens
acatgctacaagacgggcaaaataaagtgacagatgaccaccctgcagctctccagcttcctctctgaaatcccagtcccaaaatccagtttcctggccgcctcctggctcaggtcaggatctggcagaggaggtttctcagccggttatgttggggcctgcttaagggcgggggtgagaaaggtccccaggctactgtggatcctgtgtctgacttcagatccccttttcccacagttatagctccacttttttgggacaggtggggagcaaaagggtgcagaggtcaggtcttgaaatcaccaggggatttccgggtgaggtgggtggtgagaaaggaaacagcaagcagggctctggcagctgctgcagacggcttcacacagggacgcgggctgccatcttgctctaagtgaaagtgaaagaaaagtcggcagcagagggaacagggaagaaacctaaaggctgcaggctgccaggtgtgcttggagagcccccttcttccgccgggcctcgcaagcagcgtaggactgtggagaagggcggtgggcaaggagggaactcgagagcagcctccatgggcacacaggagggctggtgcctgctgctctgcctggctctatctggagcagcagaaaccagtgagtctgggagtcggggagagctggctgggagaagagctactgaagccccagggtgccaccctccccgagattccagaagagcaaaggggccggggatgaccccatcgccttctaagcccaacaggggaaaggctcagcggctggcaaaggaaggaaccaatagtgtgtgtggagggagggtggggactccacagggaaaatgctaaagaggggctgcctctgtggctgtggtcaggagccactgtcctacagagagggcactggcctgggagctgacacttcagaagaggaaaggactccccagagccccacccagcagaggggcagtggcgggcagtggacgtggtcctagactgcttcctggcgaaggacggtgcgcaccgtggagctctcgccagcagtgaggacagggcaagggcctcccttgtgctgaagcaggtgccagtgctggacgatggctccctggaggacttcaccgatttccaagggggcacactggcccaagatgacccacctattatctttgaggcctcagtggacctggtccagattccccaggccgaggccttgctccatgctgactgcagtgggaaggaggtgacctgtgagatctcccgctactttctccagatgacagagaccactgttaagacagcagcttggttcatggccaacatgcaggtctctggagggggacctagcatctccttggtgatgaagactcccagggtcaccaagaatgaggcgctctggcacccgacgctgaacttgccactgagcccccaggggactgtgcgaactgcagtggagttccaggtgatgacacagacccaatccctgagcttcctgctggggtcctcagcctccttggactgtggcttctccatggcaccgggcttggacctcatcagtgtggagtggcgactgcagcacaagggcaggggtcagttggtgtacagctggaccgcagggcaggggcaggctgtgcggaagggcgctaccctggagcctgcacaactgggcatggccagggatgcctccctcaccctgcccggcctcactatacaggacgaggggacctacatttgccagatcaccacctctctgtaccgagctcagcagatcatccagctcaacatccaagcttcccctaaagtacgactgagcttggcaaacgaagctctgctgcccaccctcatctgcgacattgctggctattaccctctggatgtggtggtgacgtggacccgagaggagctgggtggatccccagcccaagtctctggtgcctccttctccagcctcaggcaaagcgtggcaggcacctacagcatctcctcctctctcaccgcagaacctggctctgcaggtgccacttacacctgccaggtcacacacatctctctggaggagccccttggggccagcacccaggttgtcccaccagagcggagaacagccttgggagtcatctttgccagcagtctcttccttcttgcactgatgttcctggggcttcagagacggcaagcacctacaggacttgggctgcttcaggctgaacgctgggagaccacttcctgtgctgacacacagagctcccatctccatgaagaccgcacagcgcgtgtaagccagcccagctgacctaaagcgacatgagactactagaaagaaacgacacccttccccaagcccccacagctactccaacccaaacaacaaccaagccagtttaatggtaggaatttgtattttttgcctttgttcagaatacatgacattggtaaatatgccacatgcctttggtggaagtacaactgttgttattactctatacaagtatgagatcagggttaggaaaaaaagacaaagaggtgatgacagacacacagtggaaaccccacatcgtctcatggcaaaccgaagaacgggatgtgggaagctcagcttcatttgactgcaaagtcccagggttttgttgcacatttgctcatgcacatgggtggtgggaggaaagggggatagcagagacacacagaagagggtacagggtgggtgagaaagaaagtagaagggctaatacccccaaagaacaaggccaactacacctggtgagcctcagagggacagaaacccaggaatgattcctgtgatagggctgggagagccaagaggacggattcgctccaggcttgggacacatcgaggacagtggtggttcttctccagcggtgaccccctgcattaggcaaggaggagcccagaggagagtggagaccttcgaggggggccgttgggagggtactgactgctttcttccagctcttcagtcccgcccttgggcaggacgaagggaatgtgggaaacaagggcgaaaggaaaggaaggatggttttgagcaatgaaatgctgctgcatggaaagtgggcatccagaccctgcccagcatggcctcagcctcttcctgttcgtggaccgagggaagaaggaataaagggccatgggcattctccgctctgttcccagcctgccctcctccccttgcacctgggcttatcccacattaatagcccatcctgaagctcagcaattgccccgaagataggctgagcagatcccatcctcaggttccactgtctatacacacaaaccatgcaaagaggaggaagagaaaggaggcaaagtagaattcagacaggaaagggtggttcaaaggggaatatactacaggaagaacagagaggcggctctcaaggagagggccccatgacagcacagcaatacacaagcacacctgacacaggctggcacgcctccccccaaggtggggctggtgggtctacatgacttctctgcatcctgaggatcggccgggccccaggaagaaccacttgcctcatccctgtctttggcaagtgcacgggtggtgtggaggaaaggattccatgggtgtccaaagatctcacactgctaacaccctcacgctccttcatcaacaggaagagaggaacaggaccctctttaacgagggcaaggagtggcttcctctgagcttgttactttcaaattaagcacttgactcactgtttctctataactaacaggcaatctctctctttatgccaacaattaactgggagctaggttaaattatttggctagataaaactaccagctagatggatttatttggtgccctcatacagaatgctgtagaaaatgtaaagaagagaaagctccttccagctagaagcacatgggactgcttctaggatggaaacaagtcctgctattttcacaatccctaagtgttctccaggcctctggagaacaaagtaaagttgtaagatccccaaagacacggaaaatcctggacgaacagattagaaataactacaaaaaacaagtttttactttcgaaaagggtactgcactgaaaccaagttggactttggtccacccccaggaccctcttcaggcctggtccaggaaggaaagctccacatgaccaggcagtactgagtgagctgccatcttcccagcccctccctagctcctaccagtggccaggttttctagaagtcaccatgggcaccgatactcttctcctcccaagtctgggcagcttcatgggtacttcgcctcagccactcccctccctgccccttcccttggcctccaactctttggggctttgggggaacttgagagtacagaaaaagcaggcagggaggaggcgccagctgttgctcttcgggtaatgacttagattgtgccacgagcagcatttctagtgttgagggacagagtgcaaatgaacgcaacgaaaaaggaggaatgggtgatggagaagcctgggctggaatggaggacggtgggtggggaagtgtgttgagagagcaaacagagggcagaggacatgaatgtggatggcaatggacaacagggaaggggtggtacattctcaagtaaaaaagtagactggacacaggaatcaggaagtcccagacggaaaagagaaagagacaggagaaaacaagagggtgaattacaccaagttaccagacattcaggtctctccattgttaagtgccccatccccatggtctccctccaacccaagccagtgacacacagcatagccccacttcctcagaacaggaggcgccatctccctgcaatgcgttgcagggggaaggcttgtccatcaaagaaatcccttgtctctgcccttcccccgtcccgaaccaggtgacgatcccatagcagcggtctccatacctcagtcagagcagccccactccccaggcaggcaggcaggcagggagaagactccaggaccttcccacctcttcaccccaccagcaacttcagcgatacttacttacaataactaccacgatgatggcacagatggctcccagcatgatcatcatctgaggaaacatggacaaaaaatgagcccttggatttcaggaatgaggaaaagagccacatctctagtgggaaacagaattccttccatccttgggacaatggaaaaaaccacccatcacccaggagacctgcaggcctcttagagaggccctacccttctgcttcccaggggatcataaccacagtatgtctgtagcttttcagattcatcacaggacctgcattgagctcctttttgcttagttcctggtgtcttggggctttagaaggcattccaatagagatacagactctggatatttaaccaattagttcaattttcactgtgaagtgttcagctcattctcaaaagttgcagttatttaaaaatatatatttcaatctgagaaagctgatttaaaagaaaaagaaaaaagtatatatatatataaatgtatatatatgtatatatatatataaatgtatatatatgtatatatatatataaatgtatatatatgtatatatacatatgtgtatatatagtgtgtgtgtgtgtgtgtgtgtgtgtatgtatatatgcctga

SEQ ID NO: 7410 - protein, 338 aa, Homo sapiens; identical to SEQ ID NO: 7404

SEQ ID NO: 7411 - DNA, 2816 bp, Homo sapiens
acatgctacaagacgggcaaaataaagtgacagatgaccaccctgcagctctccagcttcctctctgaaatcccagtcccaaaatccagtttcctggccgcctcctggctcaggtcaggatctggcagaggaggtttctcagccggttatgttggggcctgcttaagggcgggggtgagaaaggtccccaggctactgtggatcctgtgtctgacttcagatccccttttcccacagttatagctccacttttttgggacaggtggggagcaaaagggtgcagaggtcaggtcttgaaatcaccaggggatttccgggtgaggtgggtggtgagaaaggaaacagcaagcagggctctggcagctgctgcagacggcttcacacagggacgcgggctgccatcttgctctaagtgaaagtgaaagaaaagtcggcagcagagggaacagggaagaaacctaaaggctgcaggctgccaggtgtgcttggagagcccccttcttccgccgggcctcgcaagcagcgtaggactgtggagaagggcggtgggcaaggagggaactcgagagcagcctccatgggcacacaggagggctggtgcctgctgctctgcctggctctatctggagcagcagaaaccagtgagtctgggagtcggggagagctggctgggagaagagctactgaagccccagggtgccaccctccccgagattccagaagagcaaaggggccggggatgaccccatcgccttctaagcccaacaggggaaaggctcagcggctggcaaaggaaggaaccaatagtgtgtgtggagggagggtggggactccacagggaaaatgctaaagaggggctgcctctgtggctgtggtcaggagccactgtcctacagagagggcactggcctgggagctgacacttcagaagaggaaaggactccccagagccccacccagcagaggggcagtggcgggcagtggacgtggtcctagactgcttcctggcgaaggacggtgcgcaccgtggagctctcgccagcagtgaggacagggcaagggcctcccttgtgctgaagcaggtgccagtgctggacgatggctccctggaggacttcaccgatttccaagggggcacactggcccaagatgacccacctattatctttgaggcctcagtggacctggtccagattccccaggccgaggccttgctccatgctgactgcagtgggaaggaggtgacctgtgagatctcccgctactttctccagatgacagagaccactgttaagacagcagcttggttcatggccaacatgcaggtctctggagggggacctagcatctccttggtgatgaagactcccagggtcaccaagaatgaggcgctctggcacccgacgctgaacttgccactgagcccccaggggactgtgcgaactgcagtggagttccaggtgatgacacagacccaatccctgagcttcctgctggggtcctcagcctccttggactgtggcttctccatggcaccgggcttggacctcatcagtgtggagtggcgactgcagcacaagggcaggggacgaggggacctacatttgccagatcaccacctctctgtaccgagctcagcagatcatccagctcaacatccaagcttcccctaaagtacgactgagcttggcaaacgaagctctgctgcccaccctcatctgcgacattgctggctattaccctctggatgtggtggtgacgtggacccgagaggagctgggtggatccccagcccaagtctctggtgcctccttctccagcctcaggcaaagcgtggcaggcacctacagcatctcctcctctctcaccgcagaacctggctctgcaggtgccacttacacctgccaggtcacacacatctctctggaggagccccttggggccagcacccaggttgtcccaccagagcggagaacagccttgggagtcatctttgccagcagtctcttccttcttgcactgatgttcctggggcttcagagacggcaagcacctacaggacttgggctgcttcaggctgaacgctgggagaccacttcctgtgctgacacacagagctcccatctccatgaagaccgcacagcgcgtgtaagccagcccagctgacctaaagcgacatgagactactagaaagaaacgacacccttccccaagcccccacagctactccaacccaaacaacaaccaagccagtttaatgcttggcagcactgctctcaaattgtgatgctcctgcctgcaaggcatcagctcggtcatccagctctgacagcttctggtccctctccaggaccttgtccacgttcacacgtatgatgtccaccacctgaggagggcacagaaacaaagcagctaagcttcctgccagagacagaggaaaggacaacaaccagagaatcacaagtctggccctgtgcaactctaaagggtgctttgcctctcagggcctttgactattctcctacgaaaaaaggagaaaagataagaagttcccttttgtttccaaactcctagatttggaaactttcagagaaacagctatctacctacctcctccacttgtgcctgggtttgctgtagtcgtctgttactggtcatgttaggaggagggccagggggacccccacctggggcagtcccttctgtcccttcagcaggtggctgagctggagcagacctgtggaaagacatgtgcagagtacacaaagtgaccaagacaagaaaggagctgggcgtggtagcacacacctgtagtc

SEQ ID NO: 7412 - protein, 132 aa, Homo sapiens
MTETTVKTAAWFMANMQVSGGGPSISLVMKTPRVTKNEALWHPTLNLPLSPQGTVRTAVEFQVMTQTQSLSFLLGSSASLDCGFSMAPGLDLISVEWRLQHKGRGRGDLHLPDHHLSVPSSADHPAQHPSFP

SEQ ID NO: 7413 - DNA, 547 bp, Homo sapiens
agaggggcagtggcgggcagtggacgtggtcctagactgcttcctggcgaaggacggtgcgcaccgtggagctctcaccgcagaacctggctctgcaggtgccacttacacctgccaggtcacacacatctctctggaggagccccttggggccagcacccaggttgtcccaccagagcggagaacagccttgggagtcatctttgccagcagtctcttccttcttgcactgatgttcctggggcttcagagacggcaagcacctacaggacttgggctgcttcaggctgaacgctgggagaccacttcctgtgctgacacacagagctcccatctccatgaagaccgcacagcgcgtgtaagccagcccagctgacctaaagcgacatgagactactagaaagaaacgacacccttccccaagcccccacagctactccaacccaaacaacaaccaagccagtttaatggtaggaatttgtattttttgcctttgttcagaatacatgacattggtaaatatgccacatgcctttggtggaagtac

SEQ ID NO: 7414 - protein, 47 aa, Homo sapiens
MFLGLQRRQAPTGLGLLQAERWETTSCADTQSSHLHEDRTARVSQPS

SEQ ID NO: 7415 - DNA, 3735 bp, Homo sapiens
agaggggcagtggcgggcagtggacgtggtcctagactgcttcctggcgaaggacggtgcgcaccgtggagctctcaccgcagaacctggctctgcaggtgccacttacacctgccaggtcacacacatctctctggaggagccccttggggccagcacccaggttgtcccaccagagcggagaacagccttgggagtcatctttgccagcagtctcttccttcttgcactgatgttcctggggcttcagagacggcaagcacctacaggacttgggctgcttcaggctgaacgctgggagaccacttcctgtgctgacacacagagctcccatctccatgaagaccgcacagcgcgtgtaagccagcccagctgacctaaagcgacatgagactactagaaagaaacgacacccttccccaagcccccacagctactccaacccaaacaacaaccaagccagtttaatggtaggaatttgtattttttgcctttgttcagaatacatgacattggtaaatatgccacatgcctttggtggaagtacaactgttgttattactctatacaagtatgagatcagggttaggaaaaaaagacaaagaggtgatgacagacacacagtggaaaccccacatcgtctcatggcaaaccgaagaacgggatgtgggaagctcagcttcatttgactgcaaagtcccagggttttgttgcacatttgctcatgcacatgggtggtgggaggaaagggggatagcagagacacacagaagagggtacagggtgggtgagaaagaaagtagaagggctaatacccccaaagaacaaggccaactacacctggtgagcctcagagggacagaaacccaggaatgattcctgtgatagggctgggagagccaagaggacggattcgctccaggcttgggacacatcgaggacagtggtggttcttctccagcggtgaccccctgcattaggcaaggaggagcccagaggagagtggagaccttcgaggggggccgttgggagggtactgactgctttcttccagctcttcagtcccgcccttgggcaggacgaagggaatgtgggaaacaagggcgaaaggaaaggaaggatggttttgagcaatgaaatgctgctgcatggaaagtgggcatccagaccctgcccagcatggcctcagcctcttcctgttcgtggaccgagggaagaaggaataaagggccatgggcattctccgctctgttcccagcctgccctcctccccttgcacctgggcttatcccacattaatagcccatcctgaagctcagcaattgccccgaagataggctgagcagatcccatcctcaggttccactgtctatacacacaaaccatgcaaagaggaggaagagaaaggaggcaaagtagaattcagacaggaaagggtggttcaaaggggaatatactacaggaagaacagagaggcggctctcaaggagagggccccatgacagcacagcaatacacaagcacacctgacacaggctggcacgcctccccccaaggtggggctggtgggtctacatgacttctctgcatcctgaggatcggccgggccccaggaagaaccacttgcctcatccctgtctttggcaagtgcacgggtggtgtggaggaaaggattccatgggtgtccaaagatctcacactgctaacaccctcacgctccttcatcaacaggaagagaggaacaggaccctctttaacgagggcaaggagtggcttcctctgagcttgttactttcaaattaagcacttgactcactgtttctctataactaacaggcaatctctctctttatgccaacaattaactgggagctaggttaaattatttggctagataaaactaccagctagatggatttatttggtgccctcatacagaatgctgtagaaaatgtaaagaagagaaagctccttccagctagaagcacatgggactgcttctaggatggaaacaagtcctgctattttcacaatccctaagtgttctccaggcctctggagaacaaagtaaagttgtaagatccccaaagacacggaaaatcctggacgaacagattagaaataactacaaaaaacaagtttttactttcgaaaagggtactgcactgaaaccaagttggactttggtccacccccaggaccctcttcaggcctggtccaggaaggaaagctccacatgaccaggcagtactgagtgagctgccatcttcccagcccctccctagctcctaccagtggccaggttttctagaagtcaccatgggcaccgatactcttctcctcccaagtctgggcagcttcatgggtacttcgcctcagccactcccctccctgccccttcccttggcctccaactctttggggctttgggggaacttgagagtacagaaaaagcaggcagggaggaggcgccagctgttgctcttcgggtaatgacttagattgtgccacgagcagcatttctagtgttgagggacagagtgcaaatgaacgcaacgaaaaaggaggaatgggtgatggagaagcctgggctggaatggaggacggtgggtggggaagtgtgttgagagagcaaacagagggcagaggacatgaatgtggatggcaatggacaacagggaaggggtggtacattctcaagtaaaaaagtagactggacacaggaatcaggaagtcccagacggaaaagagaaagagacaggagaaaacaagagggtgaattacaccaagttaccagacattcaggtctctccattgttaagtgccccatccccatggtctccctccaacccaagccagtgacacacagcatagccccacttcctcagaacaggaggcgccatctccctgcaatgcgttgcagggggaaggcttgtccatcaaagaaatcccttgtctctgcccttcccccgtcccgaaccaggtgacgatcccatagcagcggtctccatacctcagtcagagcagccccactccccaggcaggcaggcaggcagggagaagactccaggaccttcccacctcttcaccccaccagcaacttcagcgatacttacttacaataactaccacgatgatggcacagatggctcccagcatgatcatcatctgaggaaacatggacaaaaaatgagcccttggatttcaggaatgaggaaaagagccacatctctagtgggaaacagaattccttccatccttgggacaatggaaaaaaccacccatcacccaggagacctgcaggcctcttagagaggccctacccttctgcttcccaggggatcataaccacagtatgtctgtagcttttcagattcatcacaggacctgcattgagctcctttttgcttagttcctggtgtcttggggctttagaaggcattccaatagagatacagactctggatatttaaccaattagttcaattttcactgtgaagtgttcagctcattctcaaaagttgcagttatttaaaaatatatatttcaatctgagaaagctgatttaaaagaaaaagaaaaaagtatatatatatataaatgtatatatatgtatatatatatataaatgtatatatatgtatatatatatataaatgtatatatatgtatatatacatatgtgtatatatagtgtgtgtgtgtgtgtgtgtgtgtgtatgtatatatgcctga

SEQ ID NO: 7416 - protein, 47 aa, Homo sapiens; identical to SEQ ID NO: 7414

SEQ ID NO: 7417 - DNA, 2122 bp, Homo sapiens
agctgcagagatgaataaacaaagaggaacctactcagaagtgagtctggcccaggacccaaagaggcagcaaaggaaacttaagggcaataaaatctccatttcaggaaccaaacaggaaatattccaagtagaattaaaccttcaaaatgcttcttcggatcatcaagggaatgacaagacatatcactgcaaaggtttactgccacctccagagaagctcactgctgaggtcctaggaatcatttgcattgtcctgatggccactgtgttaaaaacaatagttcttattccttgtattggagtactggagcagaacaatttttccctgaatagaagaatgcagaaagcacgtcattgtggccattgtcctgaggagtggattacatattccaacagttgttattacattggtaaggaaagaagaacttgggaagaaagagtttgctggcctgtgcttcgaagaactctgatctgctttctatagataatgaggaagaaatggtatgtgtggggacttcccagttggctgtaagttgccatttgaactaaacgaaatagatcaggaactgaggacatatctaaattttctagttttatagaaggcttttatccacaagaatcaagatcttccctctctgagcaggaatcctttgtgcattgaagactttagattcctctctgcggtagacgtgcacttataagtatttgatggggtggattcgtggtcggaggtctcgacacagctgggagatgagtgaatttcataattataacttggatctgaagaagagtgatttttcaacacgatggcaaaagcaaagatgtccagtagtcaaaagcaaatgtagagaaaatgcatctccattttttttctgctgcttcatcgctgtagccatgggaatccgtttcattattatggtaacaatatggagtgctgtattcctaaactcattattcaaccaagaagttcaaattcccttgaccgaaagttactgtggcccatgtcctaaaaactggatatgttacaaaaataactgctaccaattttttgatgagagtaaaaactggtatgagagccaggcttcttgtatgtctcaaaatgccagccttctgaaagtatacagcaaagaggaccaggatttacttaaactggtgaagtcatatcattggatgggactagtacacattccaacaaatggatcttggcagtgggaagatggctccattctctcacccaacctactaacaataattgaaatgcagaagggagactgtgcactctatgcctcgagctttaaaggctatatagaaaactgttcaactccaaatacgtacatctgcatgcaaaggactgtgtaaagatgatcaaccatctcaataaaagccaggaacagagaagagattacaccagcggtaacactgccaactgagactaaaggaaacaaacaaaaacaggacaaaatgaccaaagactgtcagatttcttagactccacaggaccaaaccatagaacaatttcactgcaaacatgcatgattctccaagacaaaagaagagagatcctaaaggcaattcagatatccccaaggctgcctctcccaccacaagcccagagtggatgggctgggggaggggtgctgttttaatttctaaaggtaggaccaacacccaggggatcagtgaaggaagagaaggccagcagatcactgagagtgcaaccccaccctccacaggaaattgcctcatgggcagggccacagcagagagacacagcatgggcagtgccttccctgcctgtgggggtcatgctgccacttttaatgggtcctccacccaacggggtcagggaggtggtgctgccccagtgggccatgattatcttaaaggcattattctccagccttaagtaagatcttaggacgtttcctttgctatgatttgtacttgcttgagtcccatgactgtttctcttcctctctttcttccttttggaatagtaatatccatcctatgtttgtcccactattgtattttggaagcacataacttgtttggtttcacaggttcacagttaagaaggaattttgcctctgaataaatagaatcttgagtctcatgc

SEQ ID NO: 7418 - protein, 216 aa, Homo sapiens
MGWIRGRRSRHSWEMSEFHNYNLDLKKSDFSTRWQKQRCPVVKSKCRENASPFFFCCFIAVAMGIRFIIMVTIWSAVFLNSLFNQEVQIPLTESYCGPCPKNWICYKNNCYQFFDESKNWYESQASCMSQNASLLKVYSKEDQDLLKLVKSYHWMGLVHIPTNGSWQWEDGSILSPNLLTIIEMQKGDCALYASSFKGYIENCSTPNTYICMQRTV

SEQ ID NO: 7419 - DNA, 1894 bp, Homo sapiens
agaataaaaaacatttgccaagacctcatgcccttttagtaaacgaatgtttactgccacctccagagaagctcactgctgaggtcctaggaatcatttgcattgtcctgatggccactgtgttaaaaacaatagttcttattccttgtattggagtactggagcagaacaatttttccctgaatagaagaatgcagaaagcacgtcattgtggccattgtcctgaggagtggattacatattccaacagttgttattacattggtaaggaaagaagaacttgggaagaaagagtttgctggcctgtgcttcgaagaactctgatctgctttctatagataatgaggaagaaatgctactggggataaaggaaggagaaataagtcaactaaaatttgagcacctgctaataggtatgtgtggggacttcccagttggctgtaagttgccatttgaactaaacgaaataggaatcctttgtgcattgaagactttagattcctctctgcggtagacgtgcacttataagtatttgatggggtggattcgtggtcggaggtctcgacacagctgggagatgagtgaatttcataattataacttggatctgaagaagagtgatttttcaacacgatggcaaaagcaaagatgtccagtagtcaaaagcaaatgtagagaaaatgcatctccattttttttctgctgcttcatcgctgtagccatgggaatccgtttcattattatggtaacaatatggagtgctgtattcctaaactcattattcaaccaagaagttcaaattcccttgaccgaaagttactgtggcccatgtcctaaaaactggatatgttacaaaaataactgctaccaattttttgatgagagtaaaaactggtatgagagccaggcttcttgtatgtctcaaaatgccagccttctgaaagtatacagcaaagaggaccaggatttacttaaactggtgaagtcatatcattggatgggactagtacacattccaacaaatggatcttggcagtgggaagatggctccattctctcacccaacctactaacaataattgaaatgcagaagggagactgtgcactctatgcctcgagctttaaaggctatatagaaaactgttcaactccaaatacgtacatctgcatgcaaaggactgtgtaaagatgatcaaccatctcaataaaagccaggaacagagaagagattacaccagcggtaacactgccaactgagactaaaggaaacaaacaaaaacaggacaaaatgaccaaagactgtcagatttcttagactccacaggaccaaaccatagaacaatttcactgcaaacatgcatgattctccaagacaaaagaagagagatcctaaaggcaattcagatatccccaaggctgcctctcccaccacaagcccagagtggatgggctgggggaggggtgctgttttaatttctaaaggtaggaccaacacccaggggatcagtgaaggaagagaaggccagcagatcactgagagtgcaaccccaccctccacaggaaattgcctcatgggcagggccacagcagagagacacagcatgggcagtgccttccctgcctgtgggggtcatgctgccacttttaatgggtcctccacccaacggggtcagggaggtggtgctgccccagtgggccatgattatcttaaaggcattattctccagccttaagtaagatcttaggacgtttcctttgctatgatttgtacttgcttgagtcccatgactgtttctcttcctctctttcttccttttggaatagtaatatccatcctatgtttgtcccactattgtattttggaagcacataacttgtttggtttcacaggttc

SEQ ID NO: 7420 - protein, 216 aa, Homo sapiens; identical to SEQ ID NO: 7418

SEQ ID NO: 7421 - DNA, 930 bp, Homo sapiens
taaaactttaggaaattagtaccagacttttatattggtcaacagcaaaatgaacattactactcagcctccaacacatgcagtttgcctataccagggatcctgtcaaaatatacaccacttatagcttcttaagtgcagttatcatagagcacagtccctgacatcacacagctgcagagatgaataaacaaagaggaacctactcagaagtgagtctggcccaggacccaaagaggcagcaaaggaaacttaagggcaataaaatctccatttcaggaaccaaacaggaaatattccaagtagaattaaaccttcaaaatgcttcttcggatcatcaagggaatgacaagacatatcactgcaaaggtttactgccacctccagagaagctcactgctgaggtcctaggaatcatttgcattgtcctgatggccactgtgttaaaaacaatagttcttattccttgtattggagtactggagcagaacaatttttccctgaatagaagaatgcagaaagcacgtcattgtggccattgtcctgaggagtggattacatattccaacagttgttattacattggtaaggaaagaagaacttgggaagaaagagtttgctggcctgtgcttcgaagaactctgatctgctttctatagataatgaggaagaaatggtaagacgtaaatgtttcaacactttactaaaagcttatttctgtcaatatcatatttgtagaaatcatccatatgtttatacatatatttacttcatatatttttaagtctgtgtagtattcaactgacttcataatatttttatattcatatactgttaatgcacatttggttatttccagttttgcttttcatggaaacccatgcttctataaatgtttttatcacaaaataaatataaagaaaactaagc

SEQ ID NO: 7422 - protein, 158 aa, Homo sapiens; identical to SEQ ID NO: 1043

SEQ ID NO: 7423 - DNA, 768 bp, Homo sapiens
gcagttatcatagagcacagtccctgacatcacacagctgcagagatgaataaacaaagaggaacctactcagaagtgagtctggcccaggacccaaagaggcagcaaaggaaacttaagggcaataaaatctccatttcaggaaccaaacaggaaatattccaagtagaattaaaccttcaaaatgcttcttcggatcatcaagggaatgacaagacatatcactgcaaaggtttactgccacctccagagaagctcactgctgaggtcctaggaatcatttgcattgtcctgatggccactgtgttaaaaacaatagttcttattccttgtattggagtactggagcagaacaatttttccctgaatagaagaatgcagaaagcacgtcattgtggccattgtcctgaggagtggattacatattccaacagttgttattacattggtaaggaaagaagaacttgggaagaaagagtttgctggcctgtgcttcgaagaactctgatctgctttctatagataatgaggaagaaatggtaagacgtaaatgtttcaacactttactaaaagcttatttctgtcaatatcatatttgtagaaatcatccatatgtttatacatatatttacttcatatatttttaagtctgtgtagtattcaactgacttcataatatttttatattcatatactgttaatgcacatttggttatttccagttttgcttttcatggaaacccatgcttctataaatgtttttatcac

SEQ ID NO: 7424 - protein, 158 aa, Homo sapiens; identical to SEQ ID NO: 1043

SEQ ID NO: 7425 - DNA, 1026 bp, Homo sapiens
gcagttatcatagagcacagtccctcacatcacacagctgcagagatgagtaaacaaagaggaaccttctcagaagtgagtctggcccaggacccaaagtggcagcaaaggaaacctaaaggcaataaaagctccatttcaggaaccgaacaggaaatattccaagtagaattaaaccttcaaaatgcttctctgaatcatcaagggattgataaaatatatgactgccaaggtttactgccacctccagaaaagctcactgccgaggtcctaggaatcatttgcattgtcctgatggccactgtgttaaaaacaatagttcttattcctttcctggagcagaacaattcttccccgaatgcaagaacccagaaagcacgtcattgtggccattgtcctgaggagtggattacatattccaacagttgttattacattggtaaggaaagaagaacttgggaagagagtttgcaggcctgtgcttcaaagaactcttctagtctgctttgtatagataatgaagaagaaatgaaatttctggccagcattttaccttcctcatggattggtgtgtttcgtaacagcagtcatcatccatgggtgacaataaatggtttggctttcaaacatgagataaaagactcagatcatgctgaacgtaactgtgcaatgctacatgtacgtggacttatatcagaccagtgtggatcttcaagaatcattagacggggtttcatcatgttgaccaggctggtcttgaactcctgagctcaagaaatcaacacatcttggcctcccaagttgctgggattactgacacaagccaccgcccctgagtgctcatgtaccatttagcttgtgttttaaaaatctactttttctgccctccctatttttaactagatgatgttttaaaaattacttttccctctctatatagtttgatttaagcattagtcatttacaacaaatattaatattaaaatgcagaccgttatgattggaaaataaatcaatgaacaatat

SEQ ID NO: 7426 - protein, 240 aa, Homo sapiens; identical to SEQ ID NO: 1045

SEQ ID NO: 7427 - DNA, 991 bp, Homo sapiens
acagctgcagagatgaataaacaaagaggaaccttctcagaagtgagtctggcccaggacccaaagcggcagcaaaggaaacctaaaggcaataaaagctccatttcaggaaccgaacaggaaatattccaagtagaattaaatcttcaaaatccttccctgaatcatcaagggattgataaaatatatgactgccaaggtttactgccacctccagagaagctcactgccgaggtcctaggaatcatttgcattgtcctgatggccactgtgttaaaaacaatagttcttattcctttcctggagcagaacaatttttccccgaatacaagaacgcagaaagcacgtcattgtggccattgtcctgaggagtggattacatattccaacagttgttattacattggtaaggaaagaagaacttgggaagagagtttgcaggcctgtgcttcaaagaactcttctagtctgctttgtatagataatgaagaagaaatgaaatttctggccagcattttaccttcctcatggattggtgtgtttcgtaacagcagtcatcatccatgggtgacaataaatggtttggctttcaaacatgagataaaagactcagatcatgctgaacgtaactgtgcaatgctacatgtacgtggacttatatcagaccagtgtggatcttcaagaatcattagacggggtttcatcatgttgaccaggctggtcttgaactcctgagctcaagaaatcaacacatcttggcctcccaagttgctgggattactgacacaagccaccgcccctgagtgctcatgtaccatttagcttgtgttttaaaaatctactttttctgccctccctatttttaactagatgatgttttaaaaattacttttccctctctatatagtttgatttaagcattagtcatttacaacaaatattaatattaaaatgcagaccgttatgattggaaaataaatcaatgaacaat

SEQ ID NO: 7428 - protein, 240 aa, Homo sapiens
MNKQRGTFSEVSLAQDPKRQQRKPKGNKSSISGTEQEIFQVELNLQNPSLNHQGIDKIYDCQGLLPPPEKLTAEVLGIICIVLMATVLKTIVLIPFLEQNNFSPNTRTQKARHCGHCPEEWITYSNSCYYIGKERRTWEESLQACASKNSSSLLCIDNEEEMKFLASILPSSWIGVFRNSSHHPWVTINGLAFKHEIKDSDHAERNCAMLHVRGLISDQCGSSRIIRRGFIMLTRLVLNS

SEQ ID NO: 7429 - DNA, 843 bp, Homo sapiens; identical to SEQ ID NO: 1046

SEQ ID NO: 7430 - protein, 257 aa, Homo sapiens; identical to SEQ ID NO: 1047

SEQ ID NO: 7431 - DNA, 564 bp, Homo sapiens
gaaatattccaagtagaattaaaccttcaaaatgcttctctgaatcatcaagggattgataaaatatatgactgccaaggtttactgccacctccagaaaagctcactgccgaggtcctaggaatcatttgcattgtcctgatggccactgtgttaaaaacaatagttcttattcctttcctggagcagaacaattcttccccgaatgcaagaacccagaaagttgttattacattggtaaggaaagaagaacttgggaagagagtttgcaggcctgtgcttcaaagaactcttctagtctgctttgtatagataatgaagaagaaatggtaagatgtaaatgtttcaaacattttatgaaaagcttctttcagtgaataatacatttgtagaaaacatccatatgtgtgtacatatatttagcttatatattttcaagtgtatgcattattcagttgattgacttaataatgtttttaaagttatataccgctaatgtacttttattttcagtttttgctttttatggaaaaccatgcttctattaatgctttgaatccacaa

SEQ ID NO: 7432 - protein, 56 aa, Homo sapiens
MATVLKTIVLIPFLEQNNSSPNARTQKVVITLVRKEELGKRVCRPVLQRTLLVCFV

SEQ ID NO: 7433 - DNA, 581 bp, Homo sapiens
ataaaagctccatttcaggaaccgaacaggaaatattccaagtagaattaaaccttcaaaatgcttctctgaatcatcaagggattgataaaatatatgactgccaaggtttactgccacctccagaaaagctcactgccgaggtcctaggaatcatttgcattgtcctgatggccactgtgttaaaaacaatagttcttattcctttcctggagcagaacaattcttccccgaatgcaagaacccagaaagcacgtcattgtggccattgtcctgaggagtggattacatattccaacagttgttattacattggtaaggaaagaagaacttgggaagagagtttgcaggcctgtgcttcaaagaactcttctagtctgctttgtatagataatgaagaagaaatggtaagatgtaaatgtttcaaacattttatgaaaagcttctttcagtgaataatacatttgtagaaaacatccatatgtgtgtacatatatttagcttatatattttcaagtgtatgcattattcagttgattgacttaataatgtttttaaagttatataccgctaatgtactt

SEQ ID NO: 7434 - protein, 94 aa, Homo sapiens
MATVLKTIVLIPFLEQNNSSPNARTQKARHCGHCPEEWITYSNSCYYIGKERRTWEESLQACASKNSSSLLCIDNEEEMVRCKCFKHFMKSFFQ

SEQ ID NO: 7435 - DNA, 1161 bp, Homo sapiens
acagctgcagagatgaataaacaaagaggaaccttctcagaagtgagtctggcccaggacccaaagcggcagcaaaggaaacctaaaggcaataaaagctccatttcaggaaccgaacaggaaatattccaagtagaattaaatcttcaaaatccttccctgaatcatcaagggattgataaaatatatgactgccaaggtttactgccacctccagagaagctcactgccgaggtcctaggaatcatttgcattgtcctgatggccactgtgttaaaaacaatagttcttattcctttcctggagcagaacaatttttccccgaatacaagaacgcagaaagaagaacttgggaagagagtttgctggcctgtacttcgaagaactccagtctgctttctatagataatgaagaagaaatgaaatttctggccagcattttaccttcctcatggattggtgtgtttcgtaacagcagtcatcatccatgggtgacaataaatggtttggctttcaaacataagataaaagactcagataatgctgaacttaactgtgcagtgctacaagtaaatcgacttaaatcagcccagtgtggatcttcaatgatatatcattgtaagcataagctttagaagtaaagcatttgcgtttgcagtgcatcagatacattttatatttcttaaaatagaaatattatgattgcataaatctgaaaatgaattatgttatttgctctgatacaaaaattctaaatcaattattgaaataggatgcacacaattactaaagtacagacatcctagcatttgtgtcgggctcattttgctcaacatggtatttgtggttttcagcctttctaaaagttgcatgttatgtgagtcagcttataggaagtaccaagaacagtcaaacccatggagacagaaagtagaatagtggttgccaatgtctcagggaggttgaaataggagatgaccactaattgatagaacgtttctttgtgtcgtgatgaaaactttctaaatttcagtagtggtgatggttgtaactctgcgaatatactaaacatcattgatttttaatcattttaagtgcatgaaatgtatgctttgtacatgacacttcaataaagctatccagaaaaaaaaaagcctctga

SEQ ID NO: 7436 - protein, 130 aa, Homo sapiens
MNKQRGTFSEVSLAQDPKRQQRKPKGNKSSISGTEQEIFQVELNLQNPSLNHQGIDKIYDCQGLLPPPEKLTAEVLGIICIVLMATVLKTIVLIPFLEQNNFSPNTRTQKEELGKRVCWPVLRRTPVCFL

SEQ ID NO: 7437 - DNA, 1253 bp, Homo sapiens
gcacagtccctcacatcacacagctgcagagatgaataaacaaagaggaaccttctcagaagtgagtctggcccaggacccaaagcggcagcaaaggaaacctaaaggcaataaaagctccatttcaggaaccgaacaggaaatattccaagtagaattaaatcttcaaaatccttccctgaatcatcaagggattgataaaatatatgactgccaaggtttactgccacctccagagaagctcactgccgaggtcctaggaatcatttgcattgtcctgatggccactgtgttaaaaacaatagttcttattcctttcctggagcagaacaatttttccccgaatacaagaacgcagaaagcacgtcattgtggccattgtcctgaggagtggattacatattccaacagttgttattacattggtaaggaaagaagaacttgggaagagagtttgctggcctgtacttcgaagaactccagtctgctttctatagataatgaagaagaaatgaaatttctggccagcattttaccttcctcatggattggtgtgtttcgtaacagcagtcatcatccatgggtgacaataaatggtttggctttcaaacataagataaaagactcagataatgctgaacttaactgtgcagtgctacaagtaaatcgacttaaatcagcccagtgtggatcttcaatgatatatcattgtaagcataagctttagaagtaaagcatttgcgtttgcagtgcatcagatacattttatatttcttaaaatagaaatattatgattgcataaatctgaaaatgaattatgttatttgctctgatacaaaaattctaaatcaattattgaaataggatgcacacaattactaaagtacagacatcctagcatttgtgtcgggctcattttgctcaacatggtatttgtggttttcagcctttctaaaagttgcatgttatgtgagtcagcttataggaagtaccaagaacagtcaaacccatggagacagaaagtagaatagtggttgccaatgtctcagggaggttgaaataggagatgaccactaattgatagaacgtttctttgtgtcgtgatgaaaactttctaaatttcagtagtggtgatggttgtaactctgcgaatatactaaacatcattgatttttaatcattttaagtgcatgaaatgtatgctttgtacatgacacttcaataaagctatccagaaaaaaaaaagcctctga

SEQ ID NO: 7438 - protein, 231 aa, Homo sapiens; identical to SEQ ID NO: 1049

SEQ ID NO: 7439 - DNA, 1077 bp, Homo sapiens
atttaatacaatttacaacacacctgctggcactttgatctgggacctccctgttgtctgaactaggtaacctgacctctccactgaagggcgtgtggctttctgatgacagtaggtttactgccacctccagagaagctcactgccgaggtcctaggaatcatttgcattgtcctgatggccactgtgttaaaaacaatagttcttattcctttcctggagcagaacaatttttccccgaatacaagaacgcagaaagaagaacttgggaagagagtttgctggcctgtacttcgaagaactccagtctgctttctatagataatgaagaagaaatgaaatttctggccagcattttaccttcctcatggattggtgtgtttcgtaacagcagtcatcatccatgggtgacaataaatggtttggctttcaaacataagataaaagactcagataatgctgaacttaactgtgcagtgctacaagtaaatcgacttaaatcagcccagtgtggatcttcaatgatatatcattgtaagcataagctttagaagtaaagcatttgcgtttgcagtgcatcagatacattttatatttcttaaaatagaaatattatgattgcataaatctgaaaatgaattatgttatttgctctgatacaaaaattctaaatcaattattgaaataggatgcacacaattactaaagtacagacatcctagcatttgtgtcgggctcattttgctcaacatggtatttgtggttttcagcctttctaaaagttgcatgttatgtgagtcagcttataggaagtaccaagaacagtcaaacccatggagacagaaagtagaatagtggttgccaatgtctcagggaggttgaaataggagatgaccactaattgatagaacgtttctttgtgtcgtgatgaaaactttctaaatttcagtagtggtgatggttgtaactctgcgaatatactaaacatcattgatttttaatcattttaagtgcatgaaatgtatgctttgtacatgacacttcaataaagctatccagaaaaaaaaaagcctctga

SEQ ID NO: 7440 - protein, 71 aa, Homo sapiens
MTVGLLPPPEKLTAEVLGIICIVLMATVLKTIVLIPFLEQNNFSPNTRTQKEELGKRVCWPVLRRTPVCFL

SEQ ID NO: 7441 - DNA, 1160 bp, Homo sapiens
aaacttgttaatttaatacaatttacaacacacctgctggcactttgatctgggacctccctgttgtctgaactaggtaacctgacctctccactgaagggcgtgtggctttctgatgacagtaggtttactgccacctccagagaagctcactgccgaggtcctaggaatcatttgcattgtcctgatggccactgtgttaaaaacaatagttcttattcctttcctggagcagaacaatttttccccgaatacaagaacgcagaaagcacgtcattgtggccattgtcctgaggagtggattacatattccaacagttgttattacattggtaaggaaagaagaacttgggaagagagtttgctggcctgtacttcgaagaactccagtctgctttctatagataatgaagaagaaatgaaatttctggccagcattttaccttcctcatggattggtgtgtttcgtaacagcagtcatcatccatgggtgacaataaatggtttggctttcaaacataagataaaagactcagataatgctgaacttaactgtgcagtgctacaagtaaatcgacttaaatcagcccagtgtggatcttcaatgatatatcattgtaagcataagctttagaagtaaagcatttgcgtttgcagtgcatcagatacattttatatttcttaaaatagaaatattatgattgcataaatctgaaaatgaattatgttatttgctctgatacaaaaattctaaatcaattattgaaataggatgcacacaattactaaagtacagacatcctagcatttgtgtcgggctcattttgctcaacatggtatttgtggttttcagcctttctaaaagttgcatgttatgtgagtcagcttataggaagtaccaagaacagtcaaacccatggagacagaaagtagaatagtggttgccaatgtctcagggaggttgaaataggagatgaccactaattgatagaacgtttctttgtgtcgtgatgaaaactttctaaatttcagtagtggtgatggttgtaactctgcgaatatactaaacatcattgatttttaatcattttaagtgcatgaaatgtatgctttgtacatgacacttcaataaagctatccagaaaaaaaaaagcctctga

SEQ ID NO: 7442 - protein, 172 aa, Homo sapiens
MTVGLLPPPEKLTAEVLGIICIVLMATVLKTIVLIPFLEQNNFSPNTRTQKARHCGHCPEEWITYSNSCYYIGKERRTWEESLLACTSKNSSLLSIDNEEEMKFLASILPSSWIGVFRNSSHHPWVTINGLAFKHKIKDSDNAELNCAVLQVNRLKSAQCGSSMIYHCKHKL

SEQ ID NO: 7443 - DNA, 1235 bp, Homo sapiens
gcacagtccctcacatcacacagctgcagagatgaataaacaaagaggaaccttctcagaagtgagtctggcccaggacccaaagcggcagcaaaggaaacctaaaggcaataaaagctccatttcaggaaccgaacaggaaatattccaagtagaattaaatcttcaaaatccttccctgaatcatcaagggattgataaaatatatgactgccaaggtttactgccacctccagagaagctcactgccgaggtcctaggaatcatttgcattgtcctgatggccactgtgttaaaaacaatagttcttattcctttcctggagcagaacaatttttccccgaatacaagaacgcagaaagcacgtcattgtggccattgtcctgaggagtggattacatattccaacagttgttattacattggtaaggaaagaagaacttgggaagagagtttgctggcctgtacttcgaagaactccagtctgctttctatagataatgaagaagaaatgaaatttctggccagcattttaccttcctcatggattggtgtgtttcgtaacagcagtcatcatccatgggtgacaataaatggtttggctttcaaacataagataaaagactcagataatgctgaacttaactgtgcagtgctacaagtaaatcgacttaaatcagcccagtgtggatcttcaatgatatatcattgtaagcataagctttagaagtaaagcatttgcgtttgcagtgcatcagatacattttatatttcttaaaatagaaatattatgattgcataaatctgaaaatgaattatgttatttgctctgatacaaaaattctaaatcaattattgaaataggatgcacacaattactaaagtacagacatcctagcatttgtgtcgggctcattttgctcaacatggtatttgtggttttcagcctttctaaaagttgcatgttatgtgagtcagcttataggaagtaccaagaacagtcaaacccatggagacagaaagtagaatagtggttgccaatgtctcagggaggttgaaataggagatgaccactaattgatagaacgtttctttgtgtcgtgatgaaaactttctaaatttcagtagtggtgatggttgtaactctgcgaatatactaaacatcattgatttttaatcattttaagtgcatgaaatgtatgctttgtacatgacacttcaataaagctatccag

SEQ ID NO: 7444 - protein, 231 aa, Homo sapiens; identical to SEQ ID NO: 1049

SEQ ID NO: 7445 - DNA, 1323 bp, Homo sapiens
gcaggcattgtttgttcttgtcttggatttatgcctttaaatttcaccttttattacacagctatagcaggcctttttatgagactaacctggcctctccactaaaggatgtgtgactttctggggacagaagagtacagtccctgacatcacacactgcagagatggataaccaaggagtaatctactcagacctgaatctgcccccaaacccaaagaggcagcaacgaaaacctaaaggcaataaaaactccattttagcaactgaacaggaaataacctatgcggaattaaaccttcaaaaagcttctcaggattttcaagggaatgacaaaacctatcactgcaaagatttaccatcagctccagagaagctcattgttgggatcctgggaattatctgtcttatcttaatggcctctgtggtaacgatagttgttattccctcacgtcattgtggccattgtcctgaggagtggattacatattccaacagttgttactacattggtaaggaaagaagaacttgggaagagagtttgctggcctgtacttcgaagaactccagtctgctttctatagataatgaagaagaaatgaaatttctgtccatcatttcaccatcctcatggattggtgtgtttcgtaacagcagtcatcatccatgggtgacaatgaatggtttggctttcaaacatgagataaaagactcagataatgctgaacttaactgtgcagtgctacaagtaaatcgacttaaatcagcccagtgtggatcttcaataatatatcattgtaagcataagctttagaggtaaagcgtttgcatttgcagtgcatcagataaattgtatatttcttaaaatagaaatatattatgattgcataaatcttaaaatgaattatgttatttgctctaataagaaaattctaaatcaattattgaaacaggatacacacaattactaaagtacagacatcctagcatttgtgtcgggctcattttgctcaacatggtatttgtggttttcagcctttctaaaagttgcatgttatgtgagtcagcttataggaagtaccaagaacagtcaaacccatggagacagaaagtagaatagtggttgccaatgtctgagggaggttgaaataggagatgacctctaactgatagaacgttactttgtgtcgtgatgaaaactttctaaatttcagtagtggtgatggttgtaactctgcgaatatactaaacatcattgatttttaatcattttaagtgcatgaaatgtatgctttgtacacgacacttcaataaagctatccaga

SEQ ID NO: 7446 - protein, 215 aa, Homo sapiens
MDNQGVIYSDLNLPPNPKRQQRKPKGNKNSILATEQEITYAELNLQKASQDFQGNDKTYHCKDLPSAPEKLIVGILGIICLILMASVVTIVVIPSRHCGHCPEEWITYSNSCYYIGKERRTWEESLLACTSKNSSLLSIDNEEEMKFLSIISPSSWIGVFRNSSHHPWVTMNGLAFKHEIKDSDNAELNCAVLQVNRLKSAQCGSSIIYHCKHKL

SEQ ID NO: 7447 - DNA, 1395 bp, Homo sapiens
gggcagtctgcgaagattgcaggcattgtttgttcttgtcttggatttatgcctttaaatttcaccttttattacacagctatagcaggcctttttatgagactaacctggcctctccactaaaggatgtgtgactttctggggacagaagagtacagtccctgacatcacacactgcagagatggataaccaaggagtaatctactcagacctgaatctgcccccaaacccaaagaggcagcaacgaaaacctaaaggcaataaaaactccattttagcaactgaacaggaaataacctatgcggaattaaaccttcaaaaagcttctcaggattttcaagggaatgacaaaacctatcactgcaaagatttaccatcagctccagagaagctcattgttgggatcctgggaattatctgtcttatcttaatggcctctgtggtaacgatagttgttattccctctacattaatacagaggcacaacaattcttccctgaatacaagaactcagaaagcacgtcattgtggccattgtcctgaggagtggattacatattccaacagttgttactacattggtaaggaaagaagaacttgggaagagagtttgctggcctgtacttcgaagaactccagtctgctttctatagataatgaagaagaaatgaaatttctgtccatcatttcaccatcctcatggattggtgtgtttcgtaacagcagtcatcatccatgggtgacaatgaatggtttggctttcaaacatgagataaaagactcagataatgctgaacttaactgtgcagtgctacaagtaaatcgacttaaatcagcccagtgtggatcttcaataatatatcattgtaagcataagctttagaggtaaagcgtttgcatttgcagtgcatcagataaattgtatatttcttaaaatagaaatatattatgattgcataaatcttaaaatgaattatgttatttgctctaataagaaaattctaaatcaattattgaaacaggatacacacaattactaaagtacagacatcctagcatttgtgtcgggctcattttgctcaacatggtatttgtggttttcagcctttctaaaagttgcatgttatgtgagtcagcttataggaagtaccaagaacagtcaaacccatggagacagaaagtagaatagtggttgccaatgtctgagggaggttgaaataggagatgacctctaactgatagaacgttactttgtgtcgtgatgaaaactttctaaatttcagtagtggtgatggttgtaactctgcgaatatactaaacatcattgatttttaatcattttaagtgcatgaaatgtatgctttgtacacgacacttcaataaagctatccaga

SEQ ID NO: 7448 - protein, 233 aa, Homo sapiens
MDNQGVIYSDLNLPPNPKRQQRKPKGNKNSILATEQEITYAELNLQKASQDFQGNDKTYHCKDLPSAPEKLIVGILGIICLILMASVVTIVVIPSTLIQRHNNSSLNTRTQKARHCGHCPEEWITYSNSCYYIGKERRTWEESLLACTSKNSSLLSIDNEEEMKFLSIISPSSWIGVFRNSSHHPWVTMNGLAFKHEIKDSDNAELNCAVLQVNRLKSAQCGSSIIYHCKHKL

SEQ ID NO: 7449 - DNA, 1670 bp, Homo sapiens
acagttgagaggagtttgagtggagattcagggccattttagtatcttctgtaggacagaggtcagcaagcatgccccagaggtacagatgtatatgtctcccaggaagtctctgtgggtgaaggactgatctcaagttgtggctgacactagttaaagccaagttagagggctgtttcagggtctacattgagactacagttgatatgcctacctcctgagacactagtgtgtgagtctcctcctgggcccctgggcaaatggttttggcagcatgaccaaggcctaaatggggctgaaggcaagcacaggaggatgggtcccttttcaggtctggagatggaatcactgttgctatagcaggcctttttatgagactaacctggcctctccactaaaggatgtgtgactttctggggacagaagagtacagtccctgacatcacacactgcagagatggataaccaaggagtaatctactcagacctgaatctgcccccaaacccaaagaggcagcaacgaaaacctaaaggcaataaaaactccattttagcaactgaacaggaaataacctatgcggaattaaaccttcaaaaagcttctcaggattttcaagggaatgacaaaacctatcactgcaaagatttaccatcagctccagagaagctcattgttgggatcctgggaattatctgtcttatcttaatggcctctgtggtaacgatagttgttattccctctacattaatacagaggcacaacaattcttccctgaatacaagaactcagaaagcacgtcattgtggccattgtcctgaggagtggattacatattccaacagttgttactacattggtaaggaaagaagaacttgggaagagagtttgctggcctgtacttcgaagaactccagtctgctttctatagataatgaagaagaaatgaaatttctgtccatcatttcaccatcctcatggattggtgtgtttcgtaacagcagtcatcatccatgggtgacaatgaatggtttggctttcaaacatgagataaaagactcagataatgctgaacttaactgtgcagtgctacaagtaaatcgacttaaatcagcccagtgtggatcttcaataatatatcattgtaagcataagctttagaggtaaagcgtttgcatttgcagtgcatcagataaattgtatatttcttaaaatagaaatatattatgattgcataaatcttaaaatgaattatgttatttgctctaataagaaaattctaaatcaattattgaaacaggatacacacaattactaaagtacagacatcctagcatttgtgtcgggctcattttgctcaacatggtatttgtggttttcagcctttctaaaagttgcatgttatgtgagtcagcttataggaagtaccaagaacagtcaaacccatggagacagaaagtagaatagtggttgccaatgtctgagggaggttgaaataggagatgacctctaactgatagaacgttactttgtgtcgtgatgaaaactttctaaatttcagtagtggtgatggttgtaactctgcgaatatactaaacatcattgatttttaatcattttaagtgcatgaaatgtatgctttgtacacgacacttcaataaagctatccaga

SEQ ID NO: 7450 - protein, 233 aa, Homo sapiens; identical to SEQ ID NO: 7448

SEQ ID NO: 7451 - DNA, 1616 bp, Homo sapiens
acagttgagaggagtttgagtggagattcagggccattttagtatcttctgtaggacagaggtcagcaagcatgccccagaggtacagatgtatatgtctcccaggaagtctctgtgggtgaaggactgatctcaagttgtggctgacactagttaaagccaagttagagggctgtttcagggtctacattgagactacagttgatatgcctacctcctgagacactagtgtgtgagtctcctcctgggcccctgggcaaatggttttggcagcatgaccaaggcctaaatggggctgaaggcaagcacaggaggatgggtcccttttcaggtctggagatggaatcactgttgctatagcaggcctttttatgagactaacctggcctctccactaaaggatgtgtgactttctggggacagaagagtacagtccctgacatcacacactgcagagatggataaccaaggagtaatctactcagacctgaatctgcccccaaacccaaagaggcagcaacgaaaacctaaaggcaataaaaactccattttagcaactgaacaggaaataacctatgcggaattaaaccttcaaaaagcttctcaggattttcaagggaatgacaaaacctatcactgcaaagatttaccatcagctccagagaagctcattgttgggatcctgggaattatctgtcttatcttaatggcctctgtggtaacgatagttgttattccctcacgtcattgtggccattgtcctgaggagtggattacatattccaacagttgttactacattggtaaggaaagaagaacttgggaagagagtttgctggcctgtacttcgaagaactccagtctgctttctatagataatgaagaagaaatgaaatttctgtccatcatttcaccatcctcatggattggtgtgtttcgtaacagcagtcatcatccatgggtgacaatgaatggtttggctttcaaacatgagataaaagactcagataatgctgaacttaactgtgcagtgctacaagtaaatcgacttaaatcagcccagtgtggatcttcaataatatatcattgtaagcataagctttagaggtaaagcgtttgcatttgcagtgcatcagataaattgtatatttcttaaaatagaaatatattatgattgcataaatcttaaaatgaattatgttatttgctctaataagaaaattctaaatcaattattgaaacaggatacacacaattactaaagtacagacatcctagcatttgtgtcgggctcattttgctcaacatggtatttgtggttttcagcctttctaaaagttgcatgttatgtgagtcagcttataggaagtaccaagaacagtcaaacccatggagacagaaagtagaatagtggttgccaatgtctgagggaggttgaaataggagatgacctctaactgatagaacgttactttgtgtcgtgatgaaaactttctaaatttcagtagtggtgatggttgtaactctgcgaatatactaaacatcattgatttttaatcattttaagtgcatgaaatgtatgctttgtacacgacacttcaataaagctatccaga

SEQ ID NO: 7452 - protein, 215 aa, Homo sapiens; identical to SEQ ID NO: 7446

SEQ ID NO: 7453 - DNA, 589 bp, Homo sapiens
taatgcaaaatgagctccaatactcgttctccacctcacccttttaattgcactagggaatcctgtatataaaccatttattaacttcttaactactgttattatagagtacagtccctgacatcacacactgcagagatggataaccaaggagtaatctactcagacctgaatctgcccccaaacccaaagaggcagcaacgaaaacctaaaggcaataaaaactccattttagcaactgaacaggaaataacctatgcggaattaaaccttcaaaaagcttctcaggattttcaagggaatgacaaaacctatcactgcaaagatttaccatcagctccagagaagctcattgttgggatcctgggaattatctgtcttatcttaatggcctctgtggtaacgatagttgttattccctgtaagtctattttcgaagattacaaggggaattttcacgttaatgattgaatgtgcctctaaacatttcatattttcagggaatagagttctcattgtaatgtatatatttggactaaatgtggaatgattattctgaatttgtcaaagaataaatgaaagaataatt

SEQ ID NO: 7454 - protein, 110 aa, Homo sapiens
MDNQGVIYSDLNLPPNPKRQQRKPKGNKNSILATEQEITYAELNLQKASQDFQGNDKTYHCKDLPSAPEKLIVGILGIICLILMASVVTIVVIPCKSIFEDYKGNFHVND

SEQ ID NO: 7455 - DNA, 1871 bp, Homo sapiens
gccggggtgactttcttcctcttttggcaacatggcgggcggagaagctggggtgactctggggcagccgcacctttcgcgtcaggatctcaccaccttggatgttaccaagttgacgccactttcacacgaagttatcagcagacaagccacaattaatataggtacaattggtcatgtagctcatgggaaatccacagtcgtcaaagctatttctggagttcacaccgtcaggttcaaaaatgaactagaaagaaatattacaatcaagcttggatatgctaatgctaagatttatcaacttgatgacccaagttgccctcggccagaatgttatcgatcttgtgggagcagtatgcctgatgagtttcctacagacattccaggaaccaaagggaacttcagattagtcagacatgtttcctttgttgactgtcctggccacgatattttgatggctactatgctgaacggtgcagcagtgatggatgcagctcttctgttgatagctggtaatgaatcttgccctcagcctcagacatctgaacacctggctgctatagagatcatgaaactgaagcatattttgattctacaaaataaaattgatttggtaaaagaaaggcaggctaaagaacaatacgagcagatccttgcgtttgtccaaggtacagtagcagagggagctcccattattccaatttcggctcagctgaaatacaatattgaagttgtttgtgagtacatagtaaagaaaattccagtacccccaagagactttacttcagagccccggcttattgttattagatcttttgatgtcaacaaacctggctgtgaagttgatgaccttaagggaggtgtagctggtggtagtatcctaaaaggagtattaaaggtgggccaggagacagaagtaagacctggtattgtttccaaagatagtgaaggaaaactcatgtgtaaatcaatcttttccaaaattgtttcactttttgcggagcataatgatctgcaatatgctgctccaggcggtcttattggagttggaacaaaaattgaccccactttgtgccgggctgacagaatggtggggcaaatacttggtgcagtcggagctttacctgagatattcacagaattggaaatttcctatttcctgcttagacggcttctaggtgtacgcactgaaggagacaagaaagcagcaaaggttcaaaagctgtctaagaatgaagtgctcatggtgaacataggatccctgtcgacaggagggagagttagtgctgtcaaggccgatttgggcaaaattgttttgaccaatccagtgtgcacagagattcatctaattcaccttgatttgattaaggaattagaatggggcccagttcttaccaatgagacacagaggaagtctgcagcaaacttctaggaaatcatttctttctttaaagaaaaaagacaaaagaaaacatgatcccctttctgctctggagattctttgcaggctgtgatgcccggaattgtgacaaccatatcacaattatgggaagaacttaggttcctgaaaatcttattgcaacatgtttacagccagccctacacctggacttcatgtttattatttatatcagtccaagttcttgaaatgatgctgctttcatctgaaatacacaaacaaataaaattatatttatatacacataaacatgtatatacatacatgtatatatttttatagagtattagaatgctactctttctcaaaatatgttaaatataaactaaacttgactgttaattatgatgtgtcctaatttaattatatgaaaaattctgatgtttaaaaaataaaaaatgaagttatattg

SEQ ID NO: 7456 - protein, 466 aa, Homo sapiens
MAGGEAGVTLGQPHLSRQDLTTLDVTKLTPLSHEVISRQATINIGTIGHVAHGKSTVVKAISGVHTVRFKNELERNITIKLGYANAKIYQLDDPSCPRPECYRSCGSSMPDEFPTDIPGTKGNFRLVRHVSFVDCPGHDILMATMLNGAAVMDAALLLIAGNESCPQPQTSEHLAAIEIMKLKHILILQNKIDLVKERQAKEQYEQILAFVQGTVAEGAPIIPISAQLKYNIEVVCEYIVKKIPVPPRDFTSEPRLIVIRSFDVNKPGCEVDDLKGGVAGGSILKGVLKVGQETEVRPGIVSKDSEGKLMCKSIFSKIVSLFAEHNDLQYAAPGGLIGVGTKIDPTLCRADRMVGQILGAVGALPEIFTELEISYFLLRRLLGVRTEGDKKAAKVQKLSKNEVLMVNIGSLSTGGRVSAVKADLGKIVLTNPVCTEIHLIHLDLIKELEWGPVLTNETQRKSAANF

SEQ ID NO: 7457 - DNA, 1236 bp, Homo sapiens
ctcttgagctgcttgcttggcccactctcactctgtggagtgtacatttgtttccataaatctgtgctttttttttcattgttttgtttgtgcatttcatccaattgtttgttcaaaatgccaagaatctggacaccctccaccagtaacaggcattgggaaggggaaggcagaaaagcggagtgcaaaatgaagtggtagtgggtgctaactaacaagagaacctttgaacacgatgggacagaaataaggtcatgcattttctactatctgtcacctgtggacaacttgccacttcaacagttctggacacttttaagctcccccgaggagaagataggaaacttggacaccctgtgtgggattgagaatcacaaaggggcagtctcgcacctggtcaagataaagctgaactgaactcttcattcacaagtgggattctcgtaagaggcaggaaagcagggaccgtctgtcactacagacagcaagaagaggtgaaccttaatgagggaagaaaacagattctattaggggaaaaaaacatttaatcagaaaataaggctctggaaagaaaaggccaattggggctttgtctgaagaaataacagagtatttttctgccagagaaagcaagtccaagggaggaattttcagattgaccaaagagtattggtctacatcattagtactttcagtgagaaataactgaaaataaactagagcaaaagttccccaggtgtggttccaggaccagcaactgaaacatcacctgggaactgttaaaaatgcaaattcttgggctctccgccagaatcactgaatcagaaactctgaaatgggacccaataatcagcagcttaacaagctctccaggtgattcttatgccaaataaagtttgaaattccctggtgctggcgctggaagcaaatgagtcacagctgtgaagaatccctaccattaataccctgggtgggataaataaaaatgggaaactaaaaagttaaatgatcagaggttggctgtagttcaaaagtaaggatatacctgaatataaaattctttcttaacctaaatgcaaaatgggaatatgtttaatcatttatatagcatctcactggttttttccagcttgagacatgattcacaaaaattgtatatatttaaaatgtacatgatgttttgatatacatatacattgtgaaacaattaccacaatgaagttaacataaccatga

SEQ ID NO: 7458 - protein, 37 aa, Homo sapiens
MHFLLSVTCGQLATSTVLDTFKLPRGEDRKLGHPVWD

SEQ ID NO: 7459 - DNA, 1182 bp, Homo sapiens
ctcggggaggtgctcccgggggcggtgcgcggctcagcccctggctgcagccctcggcgctgctcttcagtctcctgtgtgccttcttctggatgggcttgtacctcctgcgcgccggggtgcgcctgcctctggctgtcgcgctgctggccgcctgctgcgggggggaagcgctcgtccagattgggctgggcgtcggggaggatcacttactctcactccccgccgcgggggtggtgctcagctgcttggccgccgcgacatggctggtgctgaggctgaggctgggcgtcctcatgatcgccttgactagcgcggtcaggaccgtgtccctcatttccttagagaggttcaaggtcgcctggagaccttacctggcgtacctggccggcgtgctggggatcctcttggccaggtacgtggaacaaatcttgccgcagtccgcggaggcggctccaagggagcatttggggtcccagctgattgctgggaccaaggaagatatcccggtgtttaagaggaggaggcggtccagctccgtcgtgtccgccgagatgtccggctgcagcagcaagtcccatcggaggacctccctgccctgtataccgagggaacagctcatggggcattcagaatgggaccacaaacgagggccaagaggatcacaggtaagtttcttttccttttctttttcacgtttcgtttcgtaacactttcagccacgggttttctaaaactcaagagataataaaatgtggagcgaggaagaggcaaaataaccatgccatttgtttttatttaagttaactataattaaagtctggatttcaaatcccaaaggcagatgccaggatattccttctaagagctttctggtatcccagattggttgtgtttatatgaatatagattttatattcatcttgtctcggcagaatacattttgatcagcaacccactctctttattcatttcctttgacaatttttccgtgtattttcttttttcttcagcttcctgtttttggttaaatattttgaaatataatcagactaaactctgaactaattacaagattttgtctctaaattaactctcttcatctgagggaaacagaaagatgaaaggacctattatttttgaaaagaaacaaattctaagtctttctatattaccagagtg

SEQ ID NO: 7460 - protein, 205 aa, Homo sapiens
MGLYLLRAGVRLPLAVALLAACCGGEALVQIGLGVGEDHLLSLPAAGVVLSCLAAATWLVLRLRLGVLMIALTSAVRTVSLISLERFKVAWRPYLAYLAGVLGILLARYVEQILPQSAEAAPREHLGSQLIAGTKEDIPVFKRRRRSSSVVSAEMSGCSSKSHRRTSLPCIPREQLMGHSEWDHKRGPRGSQVSFFSFSFSRFVS

SEQ ID NO: 7461 - DNA, 739 bp, Homo sapiens
ctcggggaggtgctcccgggggcggtgcgcggctcagcccctggctgcagccctcggcgctgctcttcagtctcctgtgtgccttcttctggatgggcttgtacctcctgcgcgccggggtgcgcctgcctctggctgtcgcgctgctggccgcctgctgcgggggggaagcgctcgtccagattgggctgggcgtcggggaggatcacttactctcactccccgccgcgggggtggtgctcagctgcttggccgccgcgacatggctggtgctgaggctgaggctgggcgtcctcatgatcgccttgactagcgcggtcaggaccgtgtccctcatttccttagagaggttcaaggtcgcctggagaccttacctggcgtacctggccggcgtgctggggatcctcttggccaggtacgtggaacaaatcttgccgcagtccgcggaggcggctccaagggagcatttggggtcccagctgattgctgggaccaaggaagatatcccggtgtttaagaggaggaggcggtccagctccgtcgtgtccgccgagatgtccggctgcagcagcaagtcccatcggaggacctccctgccctgtataccgagggaacagctcatggggcattcagaatgggaccacaaacgagggccaagaggatcacagtcttcaggaaccagtattactgtggacatcgccgtcatgggcgaggcccacggcctcattaccgacctcct

SEQ ID NO: 7462 - protein, 214 aa, Homo sapiens
MGLYLLRAGVRLPLAVALLAACCGGEALVQIGLGVGEDHLLSLPAAGVVLSCLAAATWLVLRLRLGVLMIALTSAVRTVSLISLERFKVAWRPYLAYLAGVLGILLARYVEQILPQSAEAAPREHLGSQLIAGTKEDIPVFKRRRRSSSVVSAEMSGCSSKSHRRTSLPCIPREQLMGHSEWDHKRGPRGSQSSGTSITVDIAVMGEAHGLITD

SEQ ID NO: 7463 - DNA, 2792 bp, Homo sapiens
cgggtctgcgcctgccacctgtgcgggggccggcaggaccccgacaagcagctcatgtgcgatgagtgcgacatggccttccacatctactgcctggacccgcccctcagcagtgttcccagcgaggacgagtggtactgccctgagtgccggaatgatgccagcgaggtggtactggcgggagagcggctgagagagagcaagaagaaggcgaagatggcctcggccacatcgtcctcacagcgggactgggacaagggcatggcctgtgtgggccgcaccaaggaatgtaccatcatcccgtccaaccactacggacccatcccggggatccccgtgggcaccatgtggcggttccgagtccaggtcagcgagtcgggtgtccatcggccccacgtggctggcatccatggccggagcaacgacggagcgtactccctagtcctggcggggggctacgaggatgacgtggaccatgggaattttttcacatacacgggtagtggtggtcgagagctttccggcaacaagaggaccgcggaacagtcttgtgatcagaaactcaccaacaccaacagggcgctggctctcaactgctttgctcccatcaatgaccaagaaggggccgaggccaaggactggcggtcggggaagccggtcagggtggtgcgcaatgtcaagggtggcaagaatagcaagtacgcccccgctgagggcaaccgctacgatggcatctacaaggttgtgaaatactggcccgagaaggggaagtccgggtttctcgtgtggcgctaccttctgcggagggacgatgatgagcccggcccttggacgaaggaggggaaggaccggatcaagaagctggggctgaccatgcagtatccagaaggctacctggaagccctggccaaccgagagcgagagaaggagaacagcaagagggaggaggaggagcagcaggaggggggcttcgcgtcccccaggacgggcaagggcaagtggaagcggaagtcggcaggaggtggcccgagcagggccgggtccccgcgccggacatccaagaaaaccaaggtggagccctacagtctcacggcccagcagagcagcctcatcagagaggacaagagcaacgccaagctgtggaatgaggtcctggcgtcactcaaggaccggccggcgagcggcagcccgttccagttgttcctgagtaaagtggaggagacgttccagtgtatctgctgtcaggagctggtgttccggcccatcacgaccgtgtgccagcacaacgtgtgcaaggactgcctggacagatcctttcgggcacaggtgttcagctgccctgcctgccgctacgacctgggccgcagctatgccatgcaggtgaaccagcctctgcagaccgtcctcaaccagctcttccccggctacggcaatggccggtgatctccaagcacttctcgacaggcgttttgctgaaaacgtgtcggagggctcgttcatcggcactgattttgttcttagtgggcttaacttaaacaggtagtgtttcctccgttccctaaaaaggtttgtcttcctttttttttttttatttttatttttcaaatctatacattttcaggaatttatgtattctggctaaaagttggacttctcagtattgtgtttagttctttgaaaacataaaagcctgcaatttctcgacaaaacaacacaagattttttaaagatggaatcagaaactacgtggtgtggaggctgttgatgtttctggtgtcaagttctcagaagttgctgccaccaactctttaagaaggcgacaggatcagtccttctctcgggttctggcccccaaggtcagagcaagcatcttcctgacagcattttgtcatctaaagtccagtgacatggttccccgtggtggcccgtggcagcccgtggcatggcgtggctcagctgtctgttgaagttgttgcaaggaaaagaggaaacatctcgggcctagttcaaacctttgcctcaaagccatcccccaccagactgcttagcgtctgagatccgcgtgaaaagtcctctgcccacgagagcagggagttggggccacgcagaaatggcctcaaggggactccgctccacgtggggccaggcgtgtggctgacgctgtccgacgaaggcggccacggacggacgccagcacatgaagtcacgtgcaagtgcctttgattcgttccttctttctaaagacgacagtctttgttgttagcactgaattattgaaaatgtcaaccagattctagaaactgcggtcatccagttcttcctgacaccggatgggtgcttgggaaccgtttgagccttatagatcatttacattcaatttttttaactcagcaagtgagaacttacaagagggttttttttttaatttttttttctcttaatgaacacattttctaaatgaatttttttgtagttactgtatatgtaccaagaaagatataacgttagggtttggttgtttttgtttttgtattttttttttgaaagggtttgttaatttttctaattttaccaaagtttgcagcctatacctcaataaaacagggatattttaaatcacatacctgcagacaaactggagcaatgttatttttaaagggttttttttcacctccttattcttagattattaatgtattagggaagaatgagacaattttgtgtaggctttttctaaagtccagtactttgtccagattttagattctcagaataaatgtttttcacagata

SEQ ID NO: 7464 - protein, 462 aa, Homo sapiens
MCDECDMAFHIYCLDPPLSSVPSEDEWYCPECRNDASEVVLAGERLRESKKKAKMASATSSSQRDWDKGMACVGRTKECTIIPSNHYGPIPGIPVGTMWRFRVQVSESGVHRPHVAGIHGRSNDGAYSLVLAGGYEDDVDHGNFFTYTGSGGRELSGNKRTAEQSCDQKLTNTNRALALNCFAPINDQEGAEAKDWRSGKPVRVVRNVKGGKNSKYAPAEGNRYDGIYKVVKYWPEKGKSGFLVWRYLLRRDDDEPGPWTKEGKDRIKKLGLTMQYPEGYLEALANREREKENSKREEEEQQEGGFASPRTGKGKWKRKSAGGGPSRAGSPRRTSKKTKVEPYSLTAQQSSLIREDKSNAKLWNEVLASLKDRPASGSPFQLFLSKVEETFQCICCQELVFRPITTVCQHNVCKDCLDRSFRAQVFSCPACRYDLGRSYAMQVNQPLQTVLNQLFPGYGNGR

SEQ ID NO: 7465 - DNA, 4163 bp, Homo sapiens
tttgaaatagaaaaccaacaactaaatcttctctaacaccatgattttctaatctgtattaaagcgttccaggtatttttgtaatgcaatggatttcaattatgttgttcattttcagcacttacttcaaaagaatgatgctttacaattttgtagttaatttaacatatttttttgtttgcttgaaagggtagaagtaagacatatcaagatttaaaacataaatagcttggaacaccctgaagagcaacatgggagaaactgagaaaagaattgaaacccatagaataagatgtctttccaagttgaagatgtttctgttggcaataacatgtgcatttgtatccaaaacactgtctggatcttatatgaattccatgctcacacaaatagagagacaattcaacatcccaacatctctagttggattcattaatggaagctttgagattggaaatcttttgttgattatatttgtgagttattttggaaccaaactgcatagacctataatgattggcattggatgtgtggttatgggcttaggctgtttcttaaaatcactacctcatttcctcatgaaccaatatgaatatgaatctacagtttcagtttcaggcaacttgtcctcaaacagtttcttgtgtatggaaaatggaacccagattttaagaccaacgcaggatccatcagagtgtacaaaggaagttaaatcattaatgtgggtgtacgtcctagtaggcaatattgtacgtggaatgggtgaaactcccatcctgcctttgggtatttcctatatagaagattttgccaaatttgaaaattctcctttatatattgggcttgtagaaacaggagctattattggtcctttgattggacttttgttggcatcattctgtgcaaatgtttatgttgacactggatttgtgaacacagatgatctgatcataactcccactgacactcgttgggtcggtgcatggtggtttggctttctgatttgtgcaggagttaacgtgctcactgccattccttttttctttttgcccaacacacttccaaaggaaggactagagactaatgctgacatcattaaaaatgaaaatgaagacaaacaaaaagaagaggtcaagaaggaaaaatatggaatcactaaagattttctacctttcatgaaaagtctttcctgcaatccaatttatatgcttttcatacttgtaagtgtgatacagttcaatgcattcgttaacatgatctccttcatgcctaaatacctagaacagcaatatggaatatcatcttcagatgcaatctttctaatgggtatttataacttacctccaatatgtattggatatataattggtggtttaattatgaagaagttcaagattactgtcaaacaagctgcccacataggatgttggttatccttacttgagtatcttctctattttttatcttttctcatgacttgtgaaaattcttcagttgttggaataaatacctcttatgaaggaattccacaagatttatatgtggaaaatgacatctttgctgattgcaatgtggattgcaactgtccatctaaaatatgggatcctgtgtgtggaaacaatggcttgtcatatctgtcagcttgtcttgctggttgtgagacatccattggaacgggaataaacatggtgttccaaaattgcagctgtattcaaacatcaggaaattcatctgcagttcttgggctgtgcgacaaaggacctgactgttccttgatgctccagtacttcctaatcttgtcagcgatgagcagtttcatttattctttggctgccatacctggatatatggttctcttgaggtgtatgaaatctgaagagaagtcccttggtgtgggattacatacattttgcacaagagtatttgctggcattcctgcacctatatattttggcgctttaatggattccacatgtttacactggggaactttgaaatgtggtgagtcaggggcatgcaggatatatgattccaccaccttcagatacatctacctcggattgccggcagcactaagaggatcaagctttgttccagccttaatcatcttaattcttttgaggaagtgtcatctacctggtgaaaatgcctcttcaggaacagagcttatagagacaaaagtcaaagggaaggaaaatgagtgcaaagatatataccaaaagtccacggttttgaaagatgatgaattgaaaactaaattgtaattgtcctattatattacttttttcagaattagagaacatgctgtacaacttaattgttttaaaaatcagtagagatataatagataactttttcttgtctttaagaacctaaaaaacctcttaactcaaaataataaaatgttcactaatgatatttctaaggtatcagtgacacttgagttttcctaggagggacatcaataacagccccctaaagaagattcttagagccagctttatttttatgttgaaacagcaatttcccttaattcatcgaagtaagggtgtacttcctacatctccttctactaatacttctaaaaattttctgttatgaaaacctatttaattccactaaatttgttctttgatattggaattattcagatgcctaaattctcattctgttatgtgaagatttaaatattttattcaagtttatcgcttccatgtgagagaagcctacatcttcttattctatttaggaatcgttctttaactcttcttattcattctaggcatgactcctatataatagattactcataaatataccctcctactttcaattttttcttttctttattactcatacatttgctcaatttgtacagaatactgacaaacttaagcaggttattaaacatcatgaggcaaagattgttggattttttttcagtaattcaaatccagtgactaaagtttttcttacaaacaagtgtctgaatcaaaggatgaaaggacaatattataaaaactccagttcttaaaggctgtttgtaatgtcagatattgtcaaagaaccactttctaagattcaggactctttagaccgatgtttatatcacccattgtgtcctaaggtagaacacaaacactaattttcccaaaataatcttagacaatagcttctgttatgaaacagaggttagtaaaggctaaggtacatattaaaagctaaatctacttatattattattttgtaaattatggataaaattaaaaattgaaggattttagacatagaagaggacttattgattaatatagggcttctggtaaaagagaatagaatgaacagacaaatacctgtttgtctactccttactctccttcctgttgaaatgacagtcaatatataagaatgacataaatccctaatggatgaagagaatggagtaaggaagggtgggagaagtgggtgtcaatacactatggttatttatgtgtactataaatggagtgagagtgtctgcagggatacaacagagtggaggaagctgaaatacagaatatacctagaaggagcctggaatggaagtgtgaaactgagttgccagttcaaagtgtgagttggtagctggacagaaagcaggccagttaactgaaggactttgtacagatgctttacaggttaatatgatttcctaaatgatcagatgcatcatatgaaaaaagaaagcaaatgagaagagaaaggctgtatagaacaggtttagggggaaggatgaaaagttaagtttcagtttcatgaagtttgagacttcaactctgggcatataaaaaataaccaaggttcaaaccaagactggctttgaaacaagagagaggaactaaaatcattggaaagggggagtttaactttgatgtaggtatgactgcagcagtgagatatcgtattaagatctgatgacatgaaatttggagccacttcctttgtggtgggaggaagtgaggagaatggcctggaaactaaaacaaggagaagagacttacctatattcacagagcagcaagaaaaagtaaacagccactgcatgagaaggtttcaggggaatcagattttgctgagtgtgcgatggtgaagagaatgctcatttctgaactggaatctgagct

SEQ ID NO: 7466 - protein, 670 aa, Homo sapiens; identical to SEQ ID NO: 1065

SEQ ID NO: 7467 - DNA, 4606 bp, Homo sapiens
agactgctgtgctagcaatcagcgagactccatgggcgtaggaccctccgagccaggtgcgggatataatcttgtggcgcgccgttttttaagcctgttggaagagcgcagtattcgggtgggagtgacccgattttccaggtgcgtccgtcacccctttctttgactcagaaagggaactccctgaccccttgagcttcccaagtgaggcaatgcctcaccctgctttggcttgcgcacggtgcgcgcacccactgacctgcgcccattgtctggcactccctagtgagatgaacccggtacctcagatggaaatgcagaaatcacccgtcttctgcgtcgctcacgctgggagctgtgcaccggagctgttcctatttggccatcttggctcctctccccttgttcctgattttaatgggactaccttggttatttcacagcacacttacggtgctttgtgaagtgcctgctatgttactatcatcatcttcctgacaagatggtgctgtagaaatctttgcatattgctatgggcttccaagaaaaactacctcgaaggaaaacaaagacaagatgacgatcattctaatgagaagaattataatatgacatgcacactctttacaaagggtagaagtaagacatatcaagatttaaaacataaatagcttggaacaccctgaagagcaacatgggagaaactgagaaaagaattgaaacccatagaataagatgtctttccaagttgaagatgtttctgttggcaataacatgtgcatttgtatccaaaacactgtctggatcttatatgaattccatgctcacacaaatagagagacaattcaacatcccaacatctctagttggattcattaatggaagctttgagattggaaatcttttgttgattatatttgtgagttattttggaaccaaactgcatagacctataatgattggcattggatgtgtggttatgggcttaggctgtttcttaaaatcactacctcatttcctcatgaaccaatatgaatatgaatctacagtttcagtttcaggcaacttgtcctcaaacagtttcttgtgtatggaaaatggaacccagattttaagaccaacgcaggatccatcagagtgtacaaaggaagttaaatcattaatgtgggtgtacgtcctagtaggcaatattgtacgtggaatgggtgaaactcccatcctgcctttgggtatttcctatatagaagattttgccaaatttgaaaattctcctttatatattgggcttgtagaaacaggagctattattggtcctttgattggacttttgttggcatcattctgtgcaaatgtttatgttgacactggatttgtgaacacagatgatctgatcataactcccactgacactcgttgggtcggtgcatggtggtttggctttctgatttgtgcaggagttaacgtgctcactgccattccttttttctttttgcccaacacacttccaaaggaaggactagagactaatgctgacatcattaaaaatgaaaatgaagacaaacaaaaagaagaggtcaagaaggaaaaatatggaatcactaaagattttctacctttcatgaaaagtctttcctgcaatccaatttatatgcttttcatacttgtaagtgtgatacagttcaatgcattcgttaacatgatctccttcatgcctaaatacctagaacagcaatatggaatatcatcttcagatgcaatctttctaatgggtatttataacttacctccaatatgtattggatatataattggtggtttaattatgaagaagttcaagattactgtcaaacaagctgcccacataggatgttggttatccttacttgagtatcttctctattttttatcttttctcatgacttgtgaaaattcttcagttgttggaataaatacctcttatgaaggaattccacaagatttatatgtggaaaatgacatctttgctgattgcaatgtggattgcaactgtccatctaaaatatgggatcctgtgtgtggaaacaatggcttgtcatatctgtcagcttgtcttgctggttgtgagacatccattggaacgggaataaacatggtgttccaaaattgcagctgtattcaaacatcaggaaattcatctgcagttcttgggctgtgcgacaaaggacctgactgttccttgatgctccagtacttcctaatcttgtcagcgatgagcagtttcatttattctttggctgccatacctggatatatggttctcttgaggtgtatgaaatctgaagagaagtcccttggtgtgggattacatacattttgcacaagagtatttgctggcattcctgcacctatatattttggcgctttaatggattccacatgtttacactggggaactttgaaatgtggtgagtcaggggcatgcaggatatatgattccaccaccttcagatacatctacctcggattgccggcagcactaagaggatcaagctttgttccagccttaatcatcttaattcttttgaggaagtgtcatctacctggtgaaaatgcctcttcaggaacagagcttatagagacaaaagtcaaagggaaggaaaatgagtgcaaagatatataccaaaagtccacggttttgaaagatgatgaattgaaaactaaattgtaattgtcctattatattacttttttcagaattagagaacatgctgtacaacttaattgttttaaaaatcagtagagatataatagataactttttcttgtctttaagaacctaaaaaacctcttaactcaaaataataaaatgttcactaatgatatttctaaggtatcagtgacacttgagttttcctaggagggacatcaataacagccccctaaagaagattcttagagccagctttatttttatgttgaaacagcaatttcccttaattcatcgaagtaagggtgtacttcctacatctccttctactaatacttctaaaaattttctgttatgaaaacctatttaattccactaaatttgttctttgatattggaattattcagatgcctaaattctcattctgttatgtgaagatttaaatattttattcaagtttatcgcttccatgtgagagaagcctacatcttcttattctatttaggaatcgttctttaactcttcttattcattctaggcatgactcctatataatagattactcataaatataccctcctactttcaattttttcttttctttattactcatacatttgctcaatttgtacagaatactgacaaacttaagcaggttattaaacatcatgaggcaaagattgttggattttttttcagtaattcaaatccagtgactaaagtttttcttacaaacaagtgtctgaatcaaaggatgaaaggacaatattataaaaactccagttcttaaaggctgtttgtaatgtcagatattgtcaaagaaccactttctaagattcaggactctttagaccgatgtttatatcacccattgtgtcctaaggtagaacacaaacactaattttcccaaaataatcttagacaatagcttctgttatgaaacagaggttagtaaaggctaaggtacatattaaaagctaaatctacttatattattattttgtaaattatggataaaattaaaaattgaaggattttagacatagaagaggacttattgattaatatagggcttctggtaaaagagaatagaatgaacagacaaatacctgtttgtctactccttactctccttcctgttgaaatgacagtcaatatataagaatgacataaatccctaatggatgaagagaatggagtaaggaagggtgggagaagtgggtgtcaatacactatggttatttatgtgtactataaatggagtgagagtgtctgcagggatacaacagagtggaggaagctgaaatacagaatatacctagaaggagcctggaatggaagtgtgaaactgagttgccagttcaaagtgtgagttggtagctggacagaaagcaggccagttaactgaaggactttgtacagatgctttacaggttaatatgatttcctaaatgatcagatgcatcatatgaaaaaagaaagcaaatgagaagagaaaggctgtatagaacaggtttagggggaaggatgaaaagttaagtttcagtttcatgaagtttgagacttcaactctgggcatataaaaaataaccaaggttcaaaccaagactggctttgaaacaagagagaggaactaaaatcattggaaagggggagtttaactttgatgtaggtatgactgcagcagtgagatatcgtattaagatctgatgacatgaaatttggagccacttcctttgtggtgggaggaagtgaggagaatggcctggaaactaaaacaaggagaagagacttacctatattcacagagcagcaagaaaaagtaaacagccactgcatgagaaggtttcaggggaatcagattttgctgagtgtgcgatggtgaagagaatgctcatttctgaactggaatctgagct

SEQ ID NO: 7468 - protein, 670 aa, Homo sapiens; identical to SEQ ID NO: 1065

SEQ ID NO: 7469 - DNA, 2256 bp, Homo sapiens
gaaatagaaaaccaacaactaaatcttctctaacaccatgattttctaatctgtattaaagcgttccagggtagaagtaagacatatcaagatttaaaacataaatagcttggaacaccctgaagagcaacatgggagaaactgagaaaagaattgaaacccatagaataagatgtctttccaagttgaagctgagaaaccctgaaaatactctgtcctgggcttatatgccttagacacaactgggattgctgagctcaagggttgcagagcatcctactatgggaagaatgaggacataactcagattgttctggatatttccctcattgctgagaatgcagaatgtttctgaccaagaattgcaagcaagaacaggaaagagtggagtcggccaagatgtttctgttggcaataacatgtgcatttgtatccaaaacactgtctggatcttatatgaattccatgctcacacaaatagagagacaattcaacatcccaacatctctagttggattcattaatggaagctttgagattggaaatcttttgttgattatatttgtgagttattttggaaccaaactgcatagacctataatgattggcattggatgtgtggttatgggcttaggctgtttcttaaaatcactacctcatttcctcatgaaccaatatgaatatgaatctacagtttcagtttcaggcaacttgtcctcaaacagtttcttgtgtatggaaaatggaacccagattttaagaccaacgcaggatccatcagagtgtacaaaggaagttaaatcattaatgtgggtgtacgtcctagtaggcaatattgtacgtggaatgggtgaaactcccatcctgcctttgggtatttcctatatagaagattttgccaaatttgaaaattctcctttatatattgggcttgtagaaacaggagctattattggtcctttgattggacttttgttggcatcattctgtgcaaatgtttatgttgacactggatttgtgaacacagatgatctgatcataactcccactgacactcgttgggtcggtgcatggtggtttggctttctgatttgtgcaggagttaacgtgctcactgccattccttttttctttttgcccaacacacttccaaaggaaggactagagactaatgctgacatcattaaaaatgaaaatgaagacaaacaaaaagaagaggtcaagaaggaaaaatatggaatcactaaagattttctacctttcatgaaaagtctttcctgcaatccaatttatatgcttttcatacttgtaagtgtgatacagttcaatgcattcgttaacatgatctccttcatgcctaaatacctagaacagcaatatggaatatcatcttcagatgcaatctttctaatgggtatttataacttacctccaatatgtattggatatataattggtggtttaattatgaagaagttcaagattactgtcaaacaagctgcccacataggatgttggttatccttacttgagtatcttctctattttttatcttttctcatgacttgtgaaaattcttcagttgttggaataaatacctcttatgaaggaattccacaagatttatatgtggaaaatgacatctttgctgattgcaatgtggattgcaactgtccatctaaaatatgggatcctgtgtgtggaaacaatggcttgtcatatctgtcagcttgtcttgctggttgtgagacatccattggaacgggaataaacatggtgttccaaaattgcagctgtattcaaacatcaggaaattcatctgcagttcttgggctgtgcgacaaaggacctgactgttccttgatgctccagtacttcctaatcttgtcagcgatgagcagtttcatttattctttggctgccatacctggatatatggttctcttgaggtgtatgaaatctgaagagaagtcccttggtgtgggattacatacattttgcacaagagtatttggtaaaaatagttattttttcccacatcctatcagaacaatattattattattacagaacaatattaaatactagataaacaaggtaatattatttcagaaaagcagtctagcaaatgtcccttctgtatgtaaaaagcacgttataaatatgagaatgcagcacacaaagagatagagaatctcttttacttgaaaaggccctgtctgaccttaattacactattctttgtttgaagatttg

SEQ ID NO: 7470 - protein, 580 aa, Homo sapiens
MFLTKNCKQEQERVESAKMFLLAITCAFVSKTLSGSYMNSMLTQIERQFNIPTSLVGFINGSFEIGNLLLIIFVSYFGTKLHRPIMIGIGCVVMGLGCFLKSLPHFLMNQYEYESTVSVSGNLSSNSFLCMENGTQILRPTQDPSECTKEVKSLMWVYVLVGNIVRGMGETPILPLGISYIEDFAKFENSPLYIGLVETGAIIGPLIGLLLASFCANVYVDTGFVNTDDLIITPTDTRWVGAWWFGFLICAGVNVLTAIPFFFLPNTLPKEGLETNADIIKNENEDKQKEEVKKEKYGITKDFLPFMKSLSCNPIYMLFILVSVIQFNAFVNMISFMPKYLEQQYGISSSDAIFLMGIYNLPPICIGYIIGGLIMKKFKITVKQAAHIGCWLSLLEYLLYFLSFLMTCENSSVVGINTSYEGIPQDLYVENDIFADCNVDCNCPSKIWDPVCGNNGLSYLSACLAGCETSIGTGINMVFQNCSCIQTSGNSSAVLGLCDKGPDCSLMLQYFLILSAMSSFIYSLAAIPGYMVLLRCMKSEEKSLGVGLHTFCTRVFGKNSYFFPHPIRTILLLLQNNIKY

SEQ ID NO: 7471 - DNA, 2064 bp, Homo sapiens
atttgatgtaccttttgaaatagaaaaccaacaactaaatcttctctaacaccatgattttctaatctgtattaaagcgttccagggtagaagtaagacatatcaagatttaaaacataaatagcttggaacaccctgaagagcaacatgggagaaactgagaaaagaattgaaacccatagaataagatgtctttccaagttgaagatgtttctgttggcaataacatgtgcatttgtatccaaaacactgtctggatcttatatgaattccatgctcacacaaatagagagacaattcaacatcccaacatctctagttggattcattaatggaagctttgagattggaaatcttttgttgattatatttgtgagttattttggaaccaaactgcatagacctataatgattggcattggatgtgtggttatgggcttaggctgtttcttaaaatcactacctcatttcctcatgaaccaatatgaatatgaatctacagtttcagtttcaggcaacttgtcctcaaacagtttcttgtgtatggaaaatggaacccagattttaagaccaacgcaggatccatcagagtgtacaaaggaagttaaatcattaatgtgggtgtacgtcctagtaggcaatattgtacgtggaatgggtgaaactcccatcctgcctttgggtatttcctatatagaagattttgccaaatttgaaaattctcctttatatattgggcttgtagaaacaggagctattattggtcctttgattggacttttgttggcatcattctgtgcaaatgtttatgttgacactggatttgtgaacacagatgatctgatcataactcccactgacactcgttgggtcggtgcatggtggtttggctttctgatttgtgcaggagttaacgtgctcactgccattccttttttctttttgcccaacacacttccaaaggaaggactagagactaatgctgacatcattaaaaatgaaaatgaagacaaacaaaaagaagaggtcaagaaggaaaaatatggaatcactaaagattttctacctttcatgaaaagtctttcctgcaatccaatttatatgcttttcatacttgtaagtgtgatacagttcaatgcattcgttaacatgatctccttcatgcctaaatacctagaacagcaatatggaatatcatcttcagatgcaatctttctaatgggtatttataacttacctccaatatgtattggatatataattggtggtttaattatgaagaagttcaagattactgtcaaacaagctgcccacataggatgttggttatccttacttgagtatcttctctattttttatcttttctcatgacttgtgaaaattcttcagttgttggaataaatacctcttatgaaggaattccacaagatttatatgtggaaaatgacatctttgctgattgcaatgtggattgcaactgtccatctaaaatatgggatcctgtgtgtggaaacaatggcttgtcatatctgtcagcttgtcttgctggttgtgagacatccattggaacgggaataaacatggtgttccaaaattgcagctgtattcaaacatcaggaaattcatctgcagttcttgggctgtgcgacaaaggacctgactgttccttgatgctccagtacttcctaatcttgtcagcgatgagcagtttcatttattctttggctgccatacctggatatatggttctcttgaggtgtatgaaatctgaagagaagtcccttggtgtgggattacatacattttgcacaagagtatttggtaaaaatagttattttttcccacatcctatcagaacaatattattattattacagaacaatattaaatactagataaacaaggtaatattatttcagaaaagcagtctagcaaatgtcccttctgtatgtaaaaagcacgttataaatatgagaatgcagcacacaaagagatagagaatctcttttacttgaaaaggccctgtctgaccttaattacactattctttgtttgaagatttg

SEQ ID NO: 7472 - protein, 582 aa, Homo sapiens
MGETEKRIETHRIRCLSKLKMFLLAITCAFVSKTLSGSYMNSMLTQIERQFNIPTSLVGFINGSFEIGNLLLIIFVSYFGTKLHRPIMIGIGCVVMGLGCFLKSLPHFLMNQYEYESTVSVSGNLSSNSFLCMENGTQILRPTQDPSECTKEVKSLMWVYVLVGNIVRGMGETPILPLGISYIEDFAKFENSPLYIGLVETGAIIGPLIGLLLASFCANVYVDTGFVNTDDLIITPTDTRWVGAWWFGFLICAGVNVLTAIPFFFLPNTLPKEGLETNADIIKNENEDKQKEEVKKEKYGITKDFLPFMKSLSCNPIYMLFILVSVIQFNAFVNMISFMPKYLEQQYGISSSDAIFLMGIYNLPPICIGYIIGGLIMKKFKITVKQAAHIGCWLSLLEYLLYFLSFLMTCENSSVVGINTSYEGIPQDLYVENDIFADCNVDCNCPSKIWDPVCGNNGLSYLSACLAGCETSIGTGINMVFQNCSCIQTSGNSSAVLGLCDKGPDCSLMLQYFLILSAMSSFIYSLAAIPGYMVLLRCMKSEEKSLGVGLHTFCTRVFGKNSYFFPHPIRTILLLLQNNIKY

SEQ ID NO: 7473 - DNA, 2017 bp, Homo sapiens
agcaatcagcgagactccatgggcgtaggaccctccgagccagaagtaagacatatcaagatttaaaacataaatagcttggaacaccctgaagagcaacatgggagaaactgagaaaagaattgaaacccatagaataagatgtctttccaagttgaagatgtttctgttggcaataacatgtgcatttgtatccaaaacactgtctggatcttatatgaattccatgctcacacaaatagagagacaattcaacatcccaacatctctagttggattcattaatggaagctttgagattggaaatcttttgttgattatatttgtgagttattttggaaccaaactgcatagacctataatgattggcattggatgtgtggttatgggcttaggctgtttcttaaaatcactacctcatttcctcatgaaccaatatgaatatgaatctacagtttcagtttcaggcaacttgtcctcaaacagtttcttgtgtatggaaaatggaacccagattttaagaccaacgcaggatccatcagagtgtacaaaggaagttaaatcattaatgtgggtgtacgtcctagtaggcaatattgtacgtggaatgggtgaaactcccatcctgcctttgggtatttcctatatagaagattttgccaaatttgaaaattctcctttatatattgggcttgtagaaacaggagctattattggtcctttgattggacttttgttggcatcattctgtgcaaatgtttatgttgacactggatttgtgaacacagatgatctgatcataactcccactgacactcgttgggtcggtgcatggtggtttggctttctgatttgtgcaggagttaacgtgctcactgccattccttttttctttttgcccaacacacttccaaaggaaggactagagactaatgctgacatcattaaaaatgaaaatgaagacaaacaaaaagaagaggtcaagaaggaaaaatatggaatcactaaagattttctacctttcatgaaaagtctttcctgcaatccaatttatatgcttttcatacttgtaagtgtgatacagttcaatgcattcgttaacatgatctccttcatgcctaaatacctagaacagcaatatggaatatcatcttcagatgcaatctttctaatgggtatttataacttacctccaatatgtattggatatataattggtggtttaattatgaagaagttcaagattactgtcaaacaagctgcccacataggatgttggttatccttacttgagtatcttctctattttttatcttttctcatgacttgtgaaaattcttcagttgttggaataaatacctcttatgaaggaattccacaagatttatatgtggaaaatgacatctttgctgattgcaatgtggattgcaactgtccatctaaaatatgggatcctgtgtgtggaaacaatggcttgtcatatctgtcagcttgtcttgctggttgtgagacatccattggaacgggaataaacatggtgttccaaaattgcagctgtattcaaacatcaggaaattcatctgcagttcttgggctgtgcgacaaaggacctgactgttccttgatgctccagtacttcctaatcttgtcagcgatgagcagtttcatttattctttggctgccatacctggatatatggttctcttgaggtgtatgaaatctgaagagaagtcccttggtgtgggattacatacattttgcacaagagtatttggtaaaaatagttattttttcccacatcctatcagaacaatattattattattacagaacaatattaaatactagataaacaaggtaatattatttcagaaaagcagtctagcaaatgtcccttctgtatgtaaaaagcacgttataaatatgagaatgcagcacacaaagagatagagaatctcttttacttgaaaaggccctgtctgaccttaattacactattctttgtttgaagatttg

SEQ ID NO: 7474 - protein, 582 aa, Homo sapiens; identical to SEQ ID NO: 7472

SEQ ID NO: 7475 - DNA, 2120 bp, Homo sapiens
agactgctgtgctagcaatcagcgagactccatgggcgtaggaccctccgagccaggtgcgggatataatcttgtggcgcgccgttttttaagcctgttggaagagcgcagtattcgggtgggagtgacccgattttccagggtagaagtaagacatatcaagatttaaaacataaatagcttggaacaccctgaagagcaacatgggagaaactgagaaaagaattgaaacccatagaataagatgtctttccaagttgaagatgtttctgttggcaataacatgtgcatttgtatccaaaacactgtctggatcttatatgaattccatgctcacacaaatagagagacaattcaacatcccaacatctctagttggattcattaatggaagctttgagattggaaatcttttgttgattatatttgtgagttattttggaaccaaactgcatagacctataatgattggcattggatgtgtggttatgggcttaggctgtttcttaaaatcactacctcatttcctcatgaaccaatatgaatatgaatctacagtttcagtttcaggcaacttgtcctcaaacagtttcttgtgtatggaaaatggaacccagattttaagaccaacgcaggatccatcagagtgtacaaaggaagttaaatcattaatgtgggtgtacgtcctagtaggcaatattgtacgtggaatgggtgaaactcccatcctgcctttgggtatttcctatatagaagattttgccaaatttgaaaattctcctttatatattgggcttgtagaaacaggagctattattggtcctttgattggacttttgttggcatcattctgtgcaaatgtttatgttgacactggatttgtgaacacagatgatctgatcataactcccactgacactcgttgggtcggtgcatggtggtttggctttctgatttgtgcaggagttaacgtgctcactgccattccttttttctttttgcccaacacacttccaaaggaaggactagagactaatgctgacatcattaaaaatgaaaatgaagacaaacaaaaagaagaggtcaagaaggaaaaatatggaatcactaaagattttctacctttcatgaaaagtctttcctgcaatccaatttatatgcttttcatacttgtaagtgtgatacagttcaatgcattcgttaacatgatctccttcatgcctaaatacctagaacagcaatatggaatatcatcttcagatgcaatctttctaatgggtatttataacttacctccaatatgtattggatatataattggtggtttaattatgaagaagttcaagattactgtcaaacaagctgcccacataggatgttggttatccttacttgagtatcttctctattttttatcttttctcatgacttgtgaaaattcttcagttgttggaataaatacctcttatgaaggaattccacaagatttatatgtggaaaatgacatctttgctgattgcaatgtggattgcaactgtccatctaaaatatgggatcctgtgtgtggaaacaatggcttgtcatatctgtcagcttgtcttgctggttgtgagacatccattggaacgggaataaacatggtgttccaaaattgcagctgtattcaaacatcaggaaattcatctgcagttcttgggctgtgcgacaaaggacctgactgttccttgatgctccagtacttcctaatcttgtcagcgatgagcagtttcatttattctttggctgccatacctggatatatggttctcttgaggtgtatgaaatctgaagagaagtcccttggtgtgggattacatacattttgcacaagagtatttggtaaaaatagttattttttcccacatcctatcagaacaatattattattattacagaacaatattaaatactagataaacaaggtaatattatttcagaaaagcagtctagcaaatgtcccttctgtatgtaaaaagcacgttataaatatgagaatgcagcacacaaagagatagagaatctcttttacttgaaaaggccctgtctgaccttaattacactattctttgtttgaagatttg

SEQ ID NO: 7476 - protein, 582 aa, Homo sapiens; identical to SEQ ID NO: 7472

SEQ ID NO: 7477 - DNA, 2219 bp, Homo sapiens
gttcccaagattataacctgctttatgcaaccatcagagccaaagaaacttaaccaaaggtttaaaacttacataaacaaagattcttttatttacaactctgcttctctgatgaacaagaagctgcagcttacacgtttgaggtgccttattcatactggctactcaatatgtaattttttaaaaaatctgttggtcttacagtatggaagcaaaaatgaatggtgatgttggtgaatgctaagaagtaagacatatcaagatttaaaacataaatagcttggaacaccctgaagagcaacatgggagaaactgagaaaagaattgaaacccatagaataagatgtctttccaagttgaagatgtttctgttggcaataacatgtgcatttgtatccaaaacactgtctggatcttatatgaattccatgctcacacaaatagagagacaattcaacatcccaacatctctagttggattcattaatggaagctttgagattggaaatcttttgttgattatatttgtgagttattttggaaccaaactgcatagacctataatgattggcattggatgtgtggttatgggcttaggctgtttcttaaaatcactacctcatttcctcatgaaccaatatgaatatgaatctacagtttcagtttcaggcaacttgtcctcaaacagtttcttgtgtatggaaaatggaacccagattttaagaccaacgcaggatccatcagagtgtacaaaggaagttaaatcattaatgtgggtgtacgtcctagtaggcaatattgtacgtggaatgggtgaaactcccatcctgcctttgggtatttcctatatagaagattttgccaaatttgaaaattctcctttatatattgggcttgtagaaacaggagctattattggtcctttgattggacttttgttggcatcattctgtgcaaatgtttatgttgacactggatttgtgaacacagatgatctgatcataactcccactgacactcgttgggtcggtgcatggtggtttggctttctgatttgtgcaggagttaacgtgctcactgccattccttttttctttttgcccaacacacttccaaaggaaggactagagactaatgctgacatcattaaaaatgaaaatgaagacaaacaaaaagaagaggtcaagaaggaaaaatatggaatcactaaagattttctacctttcatgaaaagtctttcctgcaatccaatttatatgcttttcatacttgtaagtgtgatacagttcaatgcattcgttaacatgatctccttcatgcctaaatacctagaacagcaatatggaatatcatcttcagatgcaatctttctaatgggtatttataacttacctccaatatgtattggatatataattggtggtttaattatgaagaagttcaagattactgtcaaacaagctgcccacataggatgttggttatccttacttgagtatcttctctattttttatcttttctcatgacttgtgaaaattcttcagttgttggaataaatacctcttatgaaggaattccacaagatttatatgtggaaaatgacatctttgctgattgcaatgtggattgcaactgtccatctaaaatatgggatcctgtgtgtggaaacaatggcttgtcatatctgtcagcttgtcttgctggttgtgagacatccattggaacgggaataaacatggtgttccaaaattgcagctgtattcaaacatcaggaaattcatctgcagttcttgggctgtgcgacaaaggacctgactgttccttgatgctccagtacttcctaatcttgtcagcgatgagcagtttcatttattctttggctgccatacctggatatatggttctcttgaggtgtatgaaatctgaagagaagtcccttggtgtgggattacatacattttgcacaagagtatttggtaaaaatagttattttttcccacatcctatcagaacaatattattattattacagaacaatattaaatactagataaacaaggtaatattatttcagaaaagcagtctagcaaatgtcccttctgtatgtaaaaagcacgttataaatatgagaatgcagcacacaaagagatagagaatctcttttacttgaaaaggccctgtctgaccttaattacactattctttgtttgaagatttg

SEQ ID NO: 7478 - protein, 582 aa, Homo sapiens; identical to SEQ ID NO: 7472

SEQ ID NO: 7479 - DNA, 563 bp, Homo sapiens
atcacccgtcttctgcgtcgctcacgctgggagctgtagaccggagctgttcctattcggccatcttgggggagctcgagattattaaccaaaaaatttcctgtccaaaagctgtgttctttagtgggaaagtcttgcagaactcccctctgaactaatactggaagcaaagaagtaagacatatcaagatttaaaacataaatagcttggaacaccctgaagagcaacatgggagaaactgagaaaagaattgaaacccatagaataagatgtctttccaagttgaagatgtttctgttggcaataacatgtgcatttgtatccaaaacactgtctggatcttatatgaattccatgctcacacaaatagagagacaattcaacatcccaacatctctagttggattcattaatggaagctttgagattgtgacggagtttcaccatgttggtcaggctggtctcaaacttcagacctcaggtgatctgtctgcctcggcctcccgaagtggaaacagccttcttttgaaagaagatgccatctcggactttcagagatagg

SEQ ID NO: 7480 - protein, 110 aa, Homo sapiens
MGETEKRIETHRIRCLSKLKMFLLAITCAFVSKTLSGSYMNSMLTQIERQFNIPTSLVGFINGSFEIVTEFHHVGQAGLKLQTSGDLSASASRSGNSLLLKEDAISDFQR

SEQ ID NO: 7481 - DNA, 539 bp, Homo sapiens
gctttgcacatctccaggtcagacctatcctaatatctacatctacatttccagaaaatttgagaagcaatgggcatcctgaagctgcaagtatttctcattgtgctctctgttgcattgaaccatctgaaagctacacccattgaaagtcatcaggtggaaaagcggaaatgcaacactgccacatgtgcaacgcagcgcctggcaaattttttagttcattccagcaacaactttggtgccattctctcatctaccaacgtgggatccaatacatatggcaagaggaatgcagtagaggttttaaagagagagccactgaattacttgcccctttagaggacaatgtaactctatagttattgttttatgttctagtgatttcctgtataatttaacagtgcccttttcatctccagtgtgaatatatggtctgtgtgtctgatgtttgttgctaggacatataccttctcaaaagattgttttatatgtagtactaactaaggtcccataataaaaagatagtatcttttaaaatg

SEQ ID NO: 7482 - protein, 89 aa, Homo sapiens
MGILKLQVFLIVLSVALNHLKATPIESHQVEKRKCNTATCATQRLANFLVHSSNNFGAILSSTNVGSNTYGKRNAVEVLKREPLNYLPL

SEQ ID NO: 7483 - DNA, 1401 bp, Homo sapiens
gctttgcacatctccaggtcagacctatcctaatatctacatctacatttccagaaaatttgagaagcaatgggcatcctgaagctgcaagtatttctcattgtgctctctgttgcattgaaccatctgaaagctacacccattgaaagtcatcaggtggaaaagcggaaatgcaacactgccacatgtgcaacgcagcgcctggcaaattttttagttcattccagcaacaactttggtgccattctctcatctaccaacgtgggatccaatacatatggcaagaggaatgcagtagaggttttaaagagagagccactgaattacttgcccctttagaggacaatgtaactctatagttattgttttatgttctagtgatttcctgtataatttaacagtgcccttttcatctccagtgtgaatatatggtctgtgtgtctgatgtttgttgctaggacatataccttctcaaaagattgttttatatgtagtactaactaaggtcccataataaaaagatagtatcttttaaaatgaaatgtttttgctatagatttgtattttaaaacataagaacgtcattttgggacctatatctcagtggcacaggtttaagaacgaaggagaaaaaggtagtttgaaccttggtaaattgtaaacagctaataatgaagttattcttgacatgagaaaatcagtaattggaccaggcgcggtggctcttgcctgtaatcccagcactttgggaggccgaggcaggcagatcacaaggtcaggagttcgagaccagcctgaccaacatggtgaaaccctgtctctactaaaaatacaaaaattagccgggggtggtgacatgtgcctgtaatcccagctactcaggaggctaaggcaggagaatcgcttaaacccaggaggcggaggttgcagtgagccgagattgcaccactgcactccagcctgggtggcagagtgagactcgtctcaaaaaaaagaaagaaaattagtaattgtaagtacccctgataagcaaattagtaattgtcaatacccctgttaagcaattcctttttgcagtatatttctgaaatgacagaatgctgttttaaaaacaaagaaataaaatcctgctcctgactcggtcaaaatattttttaaagtctattgtttgttgtgcttgctggtactaagaggctatttaaaagtataaaactgctttgtatccatgagggtttcattgtgtgttagcagcagtgagcttctattaaatgtatatgtcatttattttgtttaagtggctttcagcaaacctcagtcatattcttatgcagggtattgcgaaacaacttgtgttctattaatcgtgtcttcaattaaaagaccacagacttctggaaactc

SEQ ID NO: 7484 - protein, 89 aa, Homo sapiens; identical to SEQ ID NO: 7482

SEQ ID NO: 7485 - DNA, 1893 bp, Homo sapiens
gctttgcacatctccaggtcagacctatcctaatatctacatctacatttccagaaaatttgagaagcaatgggcatcctgaagctgcaagtatttctcattgtgctctctgttgcattgaaccatctgaaagctacacccattgaaagtcatcaggtggaaaagcggaaatgcaacactgccacatgtgcaacgcagcgcctggcaaattttttagttcattccagcaacaactttggtgccattctctcatctaccaacgtgggatccaatacatatggcaagaggaatgcagtagaggttttaaagagagagccactgaattacttgcccctttagaggacaatgtaactctatagttattgttttatgttctagtgatttcctgtataatttaacagtgcccttttcatctccagtgtgaatatatggtctgtgtgtctgatgtttgttgctaggacatataccttctcaaaagattgttttatatgtagtactaactaaggtcccataataaaaagatagtatcttttaaaatgaaatgtttttgctatagatttgtattttaaaacataagaacgtcattttgggacctatatctcagtggcacaggtttaagaacgaaggagaaaaaggtagtttgaaccttggtaaattgtaaacagctaataatgaagttattcttgacatgagaaaatcagtaattggaccaggcgcggtggctcttgcctgtaatcccagcactttgggaggccgaggcaggcagatcacaaggtcaggagttcgagaccagcctgaccaacatggtgaaaccctgtctctactaaaaatacaaaaattagccgggggtggtgacatgtgcctgtaatcccagctactcaggaggctaaggcaggagaatcgcttaaacccaggaggcggaggttgcagtgagccgagattgcaccactgcactccagcctgggtggcagagtgagactcgtctcaaaaaaaagaaagaaaattagtaattgtaagtacccctgataagcaaattagtaattgtcaatacccctgttaagcaattcctttttgcagtatatttctgaaatgacagaatgctgttttaaaaacaaagaaataaaatcctgctcctgactcggtcaaaatattttttaaagtctattgtttgttgtgcttgctggtactaagaggctatttaaaagtataaaactgctttgtatccatgagggtttcattgtgtgttagcagcagtgagcttctattaaatgtatatgtcatttattttgtttaagtggctttcagcaaacctcagtcatattcttatgcagggtattgcgaaacaacttgtgttctattaatcgtgtcttcaattaaaagaccacagacttctggaaactctttgctgtataagaattatttcttttgtttaacaaattagacatttctggcagaggttatgtatatgatacactttttttgatagcagctgcaatgttggacagaagatgaaatgctttgctttgagtcagattcttatgaatatctgcttttccctgactttgagttaggtagctttggaagtagcattaattcagataaactgccatcatgctgcgttatgccatttctaaagacactcaacttgtacttttaaaaaaatagaaaaaataagcatttcaatctaagtggaaatttgactcattgacttacatttctaagttaaaatttccctttatgaagtgtgccttaggttaccaaattgtagaggctttcgttggtggtggtaagtggtagcggtagtgagtgtatagaggcagggaaatatatttataataaattctatgtcatgaattacatattgaaataaataggtgaatatacaaatttata

SEQ ID NO: 7486 - protein, 89 aa, Homo sapiens; identical to SEQ ID NO: 7482

SEQ ID NO: 7487 - DNA, 670 bp, Homo sapiens
ttctcatcctttgaattcttaggttagacgagaagatacatgagatctctaaatcttcaggtttaaacgtagatgtctttcactacaccagagtaaatagcttattcaatattcattttatgatcgttattggacttcggcttcctactgcctttcaaataggccatcgcaagattttgtccagtagtaacgccttggaaagaaggcctgcagtagaaaaaacactccattcattttccatggaatacatttgtttgccagcattcatcctttaatgttcgtgcccgtctccttagtgcttgatagaaaggatgcacttcttatgttagcaatgcttgtggagcctttgtggtcattctcagacatgcacagagtggggaaaaacattgagtcacctggaatccacgttcagctgaggttgaaccagcaatcctggaatcagggcactacgggtaaccacattctcactttacaaatgataactcacacaccccatggaagatccgggaagtcttctgatgcccctgctttccaagacaatatgatgcttctctacattccatggactatgacaagtatatcagtcgtcgaagtgggtggtttaatggcatgattagctccattttctcttcctgcagcatagcaaagtgcataaagcttgagctctgtg

SEQ ID NO: 7488 - protein, 112 aa, Homo sapiens
MFVPVSLVLDRKDALLMLAMLVEPLWSFSDMHRVGKNIESPGIHVQLRLNQQSWNQGTTGNHILTLQMITHTPHGRSGKSSDAPAFQDNMMLLYIPWTMTSISVVEVGGLMA

SEQ ID NO: 7489 - DNA, 8352 bp, Homo sapiens
agtagggaggtgggcaggagccagtgatgacggaatggcaatcacatttgacctctgatctgtttatttcctcctccttgacgtctccatataaatgttacacgggcatccccacactcggatacgcacccacagtggctgattcgggggtaaccgtgtcatttgcttgcaacactggcacctctgccctgcaccccgggagtgagcagtgagtgaggctcgggtctgggcgctggctccgaatcttcgggctgggagagactccaccatctgggggcggcctgggggagcagccttagtgtcttcctgctgatgcaatccgctaggtcgcgagtctccgccgcgagagggccggtctgcaatccagcccgccacgtgtactcgccgccgcctcgggcactgccccaggtcttgctgcagccgggaccgcgctctgcagccgcagacccggtccacacggccaggggctacgacccttgggatctgccctccgctcagctcgagcttccctcgtggccgacggaacaatgaaggattgcagtaacggatgctccgcagagtgtaccggagaaggaggatcaaaagaggtggtggggacttttaaggctaaagacctaatagtcacaccagctaccattttaaaggaaaaaccagaccccaataatctggtttttggaactgtgttcacggatcatatgctgacggtggagtggtcctcagagtttggatgggagaaacctcatatcaagcctcttcagaacctgtcattgcaccctggctcatcagctttgcactatgcagtggaattatttgaaggattgaaggcatttcgaggagtagataataaaattcgactgtttcagccaaacctcaacatggatagaatgtatcgctctgctgtgagggcaactctgccggtatttgacaaagaagagctcttagagtgtattcaacagcttgtgaaattggatcaagaatgggtcccatattcaacatctgctagtctgtatattcgtcctacattcattggaactgagccttctcttggagtcaagaagcctaccaaagccctgctctttgtactcttgagcccagtgggaccttatttttcaagtggaacctttaatccagtgtccctgtgggccaatcccaagtatgtaagagcctggaaaggtggaactggggactgcaagatgggagggaattacggctcatctctttttgcccaatgtgaagcagtagataatgggtgtcagcaggtcctgtggctctatggagaggaccatcagatcactgaagtgggaactatgaatctttttctttactggataaatgaagatggagaagaagaactggcaactcctccactagatggcatcattcttccaggagtgacaaggcggtgcattctggacctggcacatcagtggggtgaatttaaggtgtcagagagatacctcaccatggatgacttgacaacagccctggaggggaacagagtgagagagatgtttggctctggtacagcctgtgttgtttgcccagtttctgatatactgtacaaaggcgagacaatacacattccaactatggagaatggtcctaagctggcaagccgcatcttgagcaaattaactgatatccagtatggaagagaagagagcgactggacaattgtgctatcctgaatggaaaatagaggatacaatggaaaatagaggataccaactgtatgctactgggacagactgttgcatttgaattgtgatagatttctttggctacctgtgcataatgtagtttgtagtatcaatgtgttacaagagtgattgtttcttcatgccagagaaaatgaattgcaatcatcaaatggtgtttcataacttggtagtagtaacttaccttaccttacctagaaaaacattaatgtaagccatataacatgggattttcctcaatgattttagtgcctccttttgtacttcactcagatactaaatagtagtttattctttaatataagttacattctgctcctcaaacaaatgcaattttttgtgtgtgtttgaaagctaatttgagaaaatttcataggttacatttcctgcagcctatctttatccacagaaagtgttttcttttttttaaatcaagacttttaaaactggatttcctcccatcactgttttttgaaggtcctccaagtccgtgttaaggtaaatatctgttttcttcctgatgtcacagcctgagcatactctgtgcattaggaagacctgagtgcatttcccaccattgtcctttccacattatgttgtagctggctggctgtcaggcgactacaagactgagggtcttgtgccttatagatctttgtatcccccatggctgacatatagtaggtactcagtaaatggttttataatgaatcagtgaacattttgcttctatagaagtgtaccttctttgtttctatattatgaaacctctttattagaatttgtgattgattctgacagtgtatagatttaccttatattgtctttattttccatgagctactaagtcattagagatactctgaagcatagttagtttaggaaatcacttcatattgattgtattagaattatcttggaattgaagatatatccctagagcaggggaccccaacccccaggccatgggccacacagcaggaagaggtgagtggtgggccattgaggagcttcatctgtatttatggctacttcccatcactcgaattaccacctgaactccacctcttgtcagctcagtggcagcattagattctcataggagcacaaatcctattgtgaactctgcatgcaagggatctaggctatgcgctccttatgagaatctaatgcttgatgacctgaggtgtaacagtttcatcctgaaaccacccttcaccctgcagtctgtggaaaaattgtcttccacaaaactggtccctggtgccaaaaatgttggggaccactgctctagagagaggtcatgatatcataccaaccaaatggaaatgacaaatgttttatgtcaagtgttaattgcagaaataaatcttttttttttttttttggtagaaaacaaagaggcatactctgatttttatactctgtttttgcaggtgctcttttctttgaatggagatttgatgagcaagtggttaggatgcagggagagctactatgggtgatattttccttgtttaggagctgtgagttaaaattgtatcctttgtggtttatctaaggaaagtcaaatcttgacagaaaacatttttccttggaaggtcaactctcagacattgtattttggtttccctcagtcctcataacttccttcttgctgaacatattttattctcttttcagagaaggaaaataaaaaggattctaaaagtttgatgcattggaaaaatttccttgaggcatttagcaacacatagaaaatgggctttgattcttttccaaaacttttagccatagggtcttttatagacagggatagtaaaatgaaaattgagaaatataagatgaaaaggaatgataaaaatatcttttagggggcttttaattggtgatctgaaatcttgggagaagctgttcttttcaggcctgaggtgctcttgactgtcgcctgcgcactgtgtaccccgagcaacattctaagggtgtgctttcgccttggctaactcctttgacctcattcttcatatagtagtctaggaaaaagttgcaggtaatttaaactgtctagtggtacatagtaactaaatttctattcctatgagaaatgagaattatttatttgccatcaacacattttatactttgcatctccaaatttattgtggcgagacttgtccattgtgaaagttagagaacattatgtttgtatcatttctttcataaaacctcaagagcatttttaagcccttttcatcagacccagtgaaaactaaggatagatgtttaaaaactggaggtctcctgataaggagaacacaatccaccattgtcatttaagtaataagacaggaaattgaccttgacgctttcttgttaaatagatttaacaggaacatctgcacatcttttttccttgtgcactatttgtttaattgcagtggattaatacagcaagagtgccacattataactaggcaattatccattcttcaagacttagttattgtcacactaattgatcgtttaaggcataagatggtctagcattaggaacatgtgaagctaatctgctcaaaaagatcaacaaattaatattgttgctgatatttgcataattggctgcaattatttaatgtttaattgggttgatcaaatgagattcagcaattcacaagtgcattaatataaacagaactggtggcacttaaaatgataatgattaacttatattgcatgttctcttcctttcacttttttcagtttctacatttcagaccgagcttgtcagcttttttgaaaacacatcagtagaaaccaagattttaaaatgaagtgtcaagacaaaggcaaaacctgagcagttcctaaaaagatttgctgttagaaattttctttgtggcagtcatttattaaggattcaactcgtgatacaccaaaagaagagttgacttcagagatgtgttccatgctctctagcacaggaatgaataaatttataacacctgctttagcctttgttttcaaaagcacaaaggaaaagtgaaagggaaagagaaacaagtgactgagaagtcttgttaaggaatcaggttttttctacctggtaaacattctctattcttttctcaaaagattgctgtaagaaaaaatgtaagacaaaaaaaaaaaaaaaaaacaaacagaggcagaggcaggcagtagcaagaaagcagagcgtaacatcagctagatggtaacatgcaatgtcagctctcttgaagacatgggaaacctaagttacaccttgggttaaaattcttcaccatattagttttgttgcttcataaaatttacctaagcaagtggtcttgcttgcctcaaatccaagcagtcttgaacacttggaggcaattaatgagtatatcttagtcaaaagaattgttggagctttttattaaagctacagtttcagttctgcttttggggaattgtgctatgaaagcagctgccaaaataagctcatttattttcttcaatcccactcagtgctcagtcactatattctgtttcctttttttttttcaagttgcatatttggtttccccttatgattgggaaagatgaattttcagcagaaaacattgtttgttcactttcaaagagtgatagtttctaaaacatttagagcaataaatattcatcagaggtaccaagtaagccggcagaagagttaagggttagagaaatcccttatttcatgtcttgactctaaaattatcaaagtacttttccttgtaatgtggatttcttcttatgcggatatgcaaaaacttcagttatacgtagtaatgctagcaggtaattttagtagacattttataacaactgtcactttgtttcgccacatgtagagtttgttcagctattttccagatatctccccacaaaaggaggcaaagggtaccagcttttcaatgagcattacctattacttggcaaagatgatgaagactctattaatagttcatttgataaatgttgacataaccaacaatagagattaggaagttagttttaagaaatcaatggcatatagacattaccctcatggagtttgtattctactacttgaactgattgtagctataaaagcatagttagatagctgaatagttagatcataagcaaagaaggccagaacacatctcttatcaagaaatcaatgaatagtttatctcatttttaaagcaactttatccttctttaattccttcctttcttctagtgcaaaactacttaataaggttggtgtttaggttagtgttcacaccattcctcatctggtgtgaattaccttctctttctttactatttactaccaacctagtacatgtgttgactgaattcttttcaaacaatgttgagttatcatggtgcacctaataaattaacaccacagattacagcatccttgctgattttctcagcaaagccagattagatggaaataaacaaagaaaatgatcctagagtgaatttttctagaaaatatctattatgaaccatgctgtttaaagtattagcttgaaggtgatggatccagctattcagaaaataactttcatataaccatgattttgcacagtatgaggtcttaaatgtgtggaaagagataaattttttatcattaccacaaaccccttttaaagattcaaaggtggaagaaagtgatttattttttctcttcagcatacatatataaaagacttgtcagatgtttaatttggggaggttgataatgaaacatatcaacagagtatagtagttatagtagtgtttgtgggtaaataatttcctggggtcagacatatataaacatatttgcttcaaaatgataaaggcatgaaatcagtcttaaaaattgaaatgggggtgatgggggagaaaaagaagaacaaatttgaagtgccctttcaaatctgctggatacaagtattgaagttttaagtcatcttattctgtctgaaagtgtatttttcattctacaatagacccaatcaacaagacgtataacttgagttgcatgatgttcagtttatgtaatctactgttgggatggtaagaattgatgtaggctgtggtgtaagaatgaattaaaatatagtttcactggcttttctctacatatccactatcacaatggctaggtttcctgttgctcactattggattctggagaaaaatttaatgaaagatgatatcagaggaagaataagtggaggtagagaagaaaggaatgatagaggaggggaaaaaaacaaaacatatttttgtgttatccaaaggagctttttccttattctgtcaagcattgagatcttcttcagctttcaatgtagttgctaaatacaaataatgctactaggtagtgactaaatatagcaaacacttcatcagatattagaattaggtcacactattgaggttataatctgaaggttgtgttacatagaaaccactttagattattatcaacttggactaggctttattttataatagcatagtaagtaatatctattgtgtcatttcttcaaccattttattctaagatccatgaagcttcttgaggccaaataaaataataagtttagacaagaagtagattgtgacttttttcccttagagatactatttactatctcctatcctgataggtggaaggtttactgaattggaaattggttgactattagtttttaactaaaatgtgcaataacacattgcagtttcctcaaactagtttcctatgatcattaaactcattctcagggttaagaaaggaatgtaaatttctgcctcaatttgtacttcatcaataagtttttgaagagtgcagatttttagtcaggtcttaaaaataaactcacaaatctggatgcatttctaaattctgcaaatgtttcctggggtgacttaacaaggaataatcccacaatatacctagctacctaatacatggagctggggctcaacccactgtttttaaggatttgcgcttacttgtggctgaggaaaaataagtagttcgaggaagtagtttttaaatgtgagcttatagatagaaacagaatatcaacttaattatgaaattgttagaacctgttctcttgtatctgaatctgattgcaattactattgtactgatagactccagccattgcaagtctcagatatcttagctgtgtagtgattcttgaaattctttttaagaaaaattgagtagaaagaaataaaccctttgtaaatgaggcttggcttttgtgaaagatcatccgcaggctatgttaaaaggattttagctcactaaaagtgtaataatggaaatgtggaaaatatcgtaggtaaaggaaactacctcatgctctgaaggttttgtagaagcacaattaaacatctaaaatggctttgttacaccagagccatctggtgtgaagaactctatatttgtatgttgagagggcatggaataattgtattttgctggcaatagacacattctttattatttgcagattcctcatcaaatctgtaattatgcacagtttctgttatcaataaaacaaaagaatcctgtttgtgtggtttcatgaaa

SEQ ID NO: 7490 - protein, 386 aa, Homo sapiens; identical to SEQ ID NO: 1069

SEQ ID NO: 7491 - DNA, 6092 bp, Homo sapiens
gaaaaggcatgtacctaaatagataaaggacctataccagctatgaatttgagttcagcaataattgtaaaatttgtaattcttttcaggtatttggtttttaaaaaactccctatgtatgcttttatcttatgttttatatggtgtccctcttttcctctctttctctctaatccagtttttaatgtgaacatgtttaatgtgaaaatgttgttcaaagcagaagcgaaccttttgtgtaaccttggcggtattaagtttgtttgtaagctatttctgccctgttagcttctgtactgaaacacgttttcttgcttttgttgcagtatggaagagaagagagcgactggacaattgtgctatcctgaatggaaaatagaggatacaatggaaaatagaggataccaactgtatgctactgggacagactgttgcatttgaattgtgatagatttctttggctacctgtgcataatgtagtttgtagtatcaatgtgttacaagagtgattgtttcttcatgccagagaaaatgaattgcaatcatcaaatggtgtttcataacttggtagtagtaacttaccttaccttacctagaaaaacattaatgtaagccatataacatgggattttcctcaatgattttagtgcctccttttgtacttcactcagatactaaatagtagtttattctttaatataagttacattctgctcctcaaacaaatgcaattttttgtgtgtgtttgaaagctaatttgagaaaatttcataggttacatttcctgcagcctatctttatccacagaaagtgttttcttttttttaaatcaagacttttaaaactggatttcctcccatcactgttttttgaaggtcctccaagtccgtgttaaggtgctcttttctttgaatggagatttgatgagcaagtggttaggatgcagggagagctactatgggtgatattttccttgtttaggagctgtgagttaaaattgtatcctttgtggtttatctaaggaaagtcaaatcttgacagaaaacatttttccttggaaggtcaactctcagacattgtattttggtttccctcagtcctcataacttccttcttgctgaacatattttattctcttttcagagaaggaaaataaaaaggattctaaaagtttgatgcattggaaaaatttccttgaggcatttagcaacacatagaaaatgggctttgattcttttccaaaacttttagccatagggtcttttatagacagggatagtaaaatgaaaattgagaaatataagatgaaaaggaatgataaaaatatcttttagggggcttttaattggtgatctgaaatcttgggagaagctgttcttttcaggcctgaggtgctcttgactgtcgcctgcgcactgtgtaccccgagcaacattctaagggtgtgctttcgccttggctaactcctttgacctcattcttcatatagtagtctaggaaaaagttgcaggtaatttaaactgtctagtggtacatagtaactaaatttctattcctatgagaaatgagaattatttatttgccatcaacacattttatactttgcatctccaaatttattgtggcgagacttgtccattgtgaaagttagagaacattatgtttgtatcatttctttcataaaacctcaagagcatttttaagcccttttcatcagacccagtgaaaactaaggatagatgtttaaaaactggaggtctcctgataaggagaacacaatccaccattgtcatttaagtaataagacaggaaattgaccttgacgctttcttgttaaatagatttaacaggaacatctgcacatcttttttccttgtgcactatttgtttaattgcagtggattaatacagcaagagtgccacattataactaggcaattatccattcttcaagacttagttattgtcacactaattgatcgtttaaggcataagatggtctagcattaggaacatgtgaagctaatctgctcaaaaagatcaacaaattaatattgttgctgatatttgcataattggctgcaattatttaatgtttaattgggttgatcaaatgagattcagcaattcacaagtgcattaatataaacagaactggtggcacttaaaatgataatgattaacttatattgcatgttctcttcctttcacttttttcagtttctacatttcagaccgagcttgtcagcttttttgaaaacacatcagtagaaaccaagattttaaaatgaagtgtcaagacaaaggcaaaacctgagcagttcctaaaaagatttgctgttagaaattttctttgtggcagtcatttattaaggattcaactcgtgatacaccaaaagaagagttgacttcagagatgtgttccatgctctctagcacaggaatgaataaatttataacacctgctttagcctttgttttcaaaagcacaaaggaaaagtgaaagggaaagagaaacaagtgactgagaagtcttgttaaggaatcaggttttttctacctggtaaacattctctattcttttctcaaaagattgctgtaagaaaaaatgtaagacaaaaaaaaaaaaaaaaaacaaacagaggcagaggcaggcagtagcaagaaagcagagcgtaacatcagctagatggtaacatgcaatgtcagctctcttgaagacatgggaaacctaagttacaccttgggttaaaattcttcaccatattagttttgttgcttcataaaatttacctaagcaagtggtcttgcttgcctcaaatccaagcagtcttgaacacttggaggcaattaatgagtatatcttagtcaaaagaattgttggagctttttattaaagctacagtttcagttctgcttttggggaattgtgctatgaaagcagctgccaaaataagctcatttattttcttcaatcccactcagtgctcagtcactatattctgtttcctttttttttttcaagttgcatatttggtttccccttatgattgggaaagatgaattttcagcagaaaacattgtttgttcactttcaaagagtgatagtttctaaaacatttagagcaataaatattcatcagaggtaccaagtaagccggcagaagagttaagggttagagaaatcccttatttcatgtcttgactctaaaattatcaaagtacttttccttgtaatgtggatttcttcttatgcggatatgcaaaaacttcagttatacgtagtaatgctagcaggtaattttagtagacattttataacaactgtcactttgtttcgccacatgtagagtttgttcagctattttccagatatctccccacaaaaggaggcaaagggtaccagcttttcaatgagcattacctattacttggcaaagatgatgaagactctattaatagttcatttgataaatgttgacataaccaacaatagagattaggaagttagttttaagaaatcaatggcatatagacattaccctcatggagtttgtattctactacttgaactgattgtagctataaaagcatagttagatagctgaatagttagatcataagcaaagaaggccagaacacatctcttatcaagaaatcaatgaatagtttatctcatttttaaagcaactttatccttctttaattccttcctttcttctagtgcaaaactacttaataaggttggtgtttaggttagtgttcacaccattcctcatctggtgtgaattaccttctctttctttactatttactaccaacctagtacatgtgttgactgaattcttttcaaacaatgttgagttatcatggtgcacctaataaattaacaccacagattacagcatccttgctgattttctcagcaaagccagattagatggaaataaacaaagaaaatgatcctagagtgaatttttctagaaaatatctattatgaaccatgctgtttaaagtattagcttgaaggtgatggatccagctattcagaaaataactttcatataaccatgattttgcacagtatgaggtcttaaatgtgtggaaagagataaattttttatcattaccacaaaccccttttaaagattcaaaggtggaagaaagtgatttattttttctcttcagcatacatatataaaagacttgtcagatgtttaatttggggaggttgataatgaaacatatcaacagagtatagtagttatagtagtgtttgtgggtaaataatttcctggggtcagacatatataaacatatttgcttcaaaatgataaaggcatgaaatcagtcttaaaaattgaaatgggggtgatgggggagaaaaagaagaacaaatttgaagtgccctttcaaatctgctggatacaagtattgaagttttaagtcatcttattctgtctgaaagtgtatttttcattctacaatagacccaatcaacaagacgtataacttgagttgcatgatgttcagtttatgtaatctactgttgggatggtaagaattgatgtaggctgtggtgtaagaatgaattaaaatatagtttcactggcttttctctacatatccactatcacaatggctaggtttcctgttgctcactattggattctggagaaaaatttaatgaaagatgatatcagaggaagaataagtggaggtagagaagaaaggaatgatagaggaggggaaaaaaacaaaacatatttttgtgttatccaaaggagctttttccttattctgtcaagcattgagatcttcttcagctttcaatgtagttgctaaatacaaataatgctactaggtagtgactaaatatagcaaacacttcatcagatattagaattaggtcacactattgaggttataatctgaaggttgtgttacatagaaaccactttagattattatcaacttggactaggctttattttataatagcatagtaagtaatatctattgtgtcatttcttcaaccattttattctaagatccatgaagcttcttgaggccaaataaaataataagtttagacaagaagtagattgtgacttttttcccttagagatactatttactatctcctatcctgataggtggaaggtttactgaattggaaattggttgactattagtttttaactaaaatgtgcaataacacattgcagtttcctcaaactagtttcctatgatcattaaactcattctcagggttaagaaaggaatgtaaatttctgcctcaatttgtacttcatcaataagtttttgaagagtgcagatttttagtcaggtcttaaaaataaactcacaaatctggatgcatttctaaattctgcaaatgtttcctggggtgacttaacaaggaataatcccacaatatacctagctacctaatacatggagctggggctcaacccactgtttttaaggatttgcgcttacttgtggctgaggaaaaataagtagttcgaggaagtagtttttaaatgtgagcttatagatagaaacagaatatcaacttaattatgaaattgttagaacctgttctcttgtatctgaatctgattgcaattactattgtactgatagactccagccattgcaagtctcagatatcttagctgtgtagtgattcttgaaattctttttaagaaaaattgagtagaaagaaataaaccctttgtaaatgaggcttggcttttgtgaaagatcatccgcaggctatgttaaaaggattttagctcactaaaagtgtaataatggaaatgtggaaaatatcgtaggtaaaggaaactacctcatgctctgaaggttttgtagaagcacaattaaacatctaaaatggctttgttacaccagagccatctggtgtgaagaactctatatttgtatgttgagagggcatggaataattgtattttgctggcaatagacacattctttattatttgcagattcctcatcaaatctgtaattatgcacagtttctgttatcaataaaacaaaagaatcctgtttgtgtggtttcatga

SEQ ID NO: 7492 - protein, 81 aa, Homo sapiens [sequence omitted]

SEQ ID NO: 7493 - DNA, 4768 bp, Homo sapiens
gaaaaggcatgtacctaaatagataaaggacctataccagctatgaatttgagttcagcaataattgtaaaatttgtaattcttttcaggtatttggtttttaaaaaactccctatgtatgcttttatcttatgttttatatggtgtccctcttttcctctctttctctctaatccagtttttaatgtgaacatgtttaatgtgaaaatgttgttcaaagcagaagcgaaccttttgtgtaaccttggcggtattaagtttgtttgtaagctatttctgccctgttagcttctgtactgaaacacgttttcttgcttttgttgcagtatggaagagaagagagcgactggacaattgtgctatcctgaatggaaaatagaggatacaatggaaaatagaggataccaactgtatgctactgggacagactgttgcatttgaattgtgatagatttctttggctacctgtgcataatgtagtttgtagtatcaatgtgttacaagagtgattgtttcttcatgccagagaaaatgaattgcaatcatcaaatggtgtttcataacttggtagtagtaacttaccttaccttacctagaaaaacattaatgtaagccatataacatgggattttcctcaatgattttagtgcctccttttgtacttcactcagatactaaatagtagtttattctttaatataagttacattctgctcctcaaacaaatgcaattttttgtgtgtgtttgaaagctaatttgagaaaatttcataggttacatttcctgcagcctatctttatccacagaaagtgttttcttttttttaaatcaagacttttaaaactggatttcctcccatcactgttttttgaaggtcctccaagtccgtgttaagtttctacatttcagaccgagcttgtcagcttttttgaaaacacatcagtagaaaccaagattttaaaatgaagtgtcaagacaaaggcaaaacctgagcagttcctaaaaagatttgctgttagaaattttctttgtggcagtcatttattaaggattcaactcgtgatacaccaaaagaagagttgacttcagagatgtgttccatgctctctagcacaggaatgaataaatttataacacctgctttagcctttgttttcaaaagcacaaaggaaaagtgaaagggaaagagaaacaagtgactgagaagtcttgttaaggaatcaggttttttctacctggtaaacattctctattcttttctcaaaagattgctgtaagaaaaaatgtaagacaaaaaaaaaaaaaaaaaacaaacagaggcagaggcaggcagtagcaagaaagcagagcgtaacatcagctagatggtaacatgcaatgtcagctctcttgaagacatgggaaacctaagttacaccttgggttaaaattcttcaccatattagttttgttgcttcataaaatttacctaagcaagtggtcttgcttgcctcaaatccaagcagtcttgaacacttggaggcaattaatgagtatatcttagtcaaaagaattgttggagctttttattaaagctacagtttcagttctgcttttggggaattgtgctatgaaagcagctgccaaaataagctcatttattttcttcaatcccactcagtgctcagtcactatattctgtttcctttttttttttcaagttgcatatttggtttccccttatgattgggaaagatgaattttcagcagaaaacattgtttgttcactttcaaagagtgatagtttctaaaacatttagagcaataaatattcatcagaggtaccaagtaagccggcagaagagttaagggttagagaaatcccttatttcatgtcttgactctaaaattatcaaagtacttttccttgtaatgtggatttcttcttatgcggatatgcaaaaacttcagttatacgtagtaatgctagcaggtaattttagtagacattttataacaactgtcactttgtttcgccacatgtagagtttgttcagctattttccagatatctccccacaaaaggaggcaaagggtaccagcttttcaatgagcattacctattacttggcaaagatgatgaagactctattaatagttcatttgataaatgttgacataaccaacaatagagattaggaagttagttttaagaaatcaatggcatatagacattaccctcatggagtttgtattctactacttgaactgattgtagctataaaagcatagttagatagctgaatagttagatcataagcaaagaaggccagaacacatctcttatcaagaaatcaatgaatagtttatctcatttttaaagcaactttatccttctttaattccttcctttcttctagtgcaaaactacttaataaggttggtgtttaggttagtgttcacaccattcctcatctggtgtgaattaccttctctttctttactatttactaccaacctagtacatgtgttgactgaattcttttcaaacaatgttgagttatcatggtgcacctaataaattaacaccacagattacagcatccttgctgattttctcagcaaagccagattagatggaaataaacaaagaaaatgatcctagagtgaatttttctagaaaatatctattatgaaccatgctgtttaaagtattagcttgaaggtgatggatccagctattcagaaaataactttcatataaccatgattttgcacagtatgaggtcttaaatgtgtggaaagagataaattttttatcattaccacaaaccccttttaaagattcaaaggtggaagaaagtgatttattttttctcttcagcatacatatataaaagacttgtcagatgtttaatttggggaggttgataatgaaacatatcaacagagtatagtagttatagtagtgtttgtgggtaaataatttcctggggtcagacatatataaacatatttgcttcaaaatgataaaggcatgaaatcagtcttaaaaattgaaatgggggtgatgggggagaaaaagaagaacaaatttgaagtgccctttcaaatctgctggatacaagtattgaagttttaagtcatcttattctgtctgaaagtgtatttttcattctacaatagacccaatcaacaagacgtataacttgagttgcatgatgttcagtttatgtaatctactgttgggatggtaagaattgatgtaggctgtggtgtaagaatgaattaaaatatagtttcactggcttttctctacatatccactatcacaatggctaggtttcctgttgctcactattggattctggagaaaaatttaatgaaagatgatatcagaggaagaataagtggaggtagagaagaaaggaatgatagaggaggggaaaaaaacaaaacatatttttgtgttatccaaaggagctttttccttattctgtcaagcattgagatcttcttcagctttcaatgtagttgctaaatacaaataatgctactaggtagtgactaaatatagcaaacacttcatcagatattagaattaggtcacactattgaggttataatctgaaggttgtgttacatagaaaccactttagattattatcaacttggactaggctttattttataatagcatagtaagtaatatctattgtgtcatttcttcaaccattttattctaagatccatgaagcttcttgaggccaaataaaataataagtttagacaagaagtagattgtgacttttttcccttagagatactatttactatctcctatcctgataggtggaaggtttactgaattggaaattggttgactattagtttttaactaaaatgtgcaataacacattgcagtttcctcaaactagtttcctatgatcattaaactcattctcagggttaagaaaggaatgtaaatttctgcctcaatttgtacttcatcaataagtttttgaagagtgcagatttttagtcaggtcttaaaaataaactcacaaatctggatgcatttctaaattctgcaaatgtttcctggggtgacttaacaaggaataatcccacaatatacctagctacctaatacatggagctggggctcaacccactgtttttaaggatttgcgcttacttgtggctgaggaaaaataagtagttcgaggaagtagtttttaaatgtgagcttatagatagaaacagaatatcaacttaattatgaaattgttagaacctgttctcttgtatctgaatctgattgcaattactattgtactgatagactccagccattgcaagtctcagatatcttagctgtgtagtgattcttgaaattctttttaagaaaaattgagtagaaagaaataaaccctttgtaaatgaggcttggcttttgtgaaagatcatccgcaggctatgttaaaaggattttagctcactaaaagtgtaataatggaaatgtggaaaatatcgtaggtaaaggaaactacctcatgctctgaaggttttgtagaagcacaattaaacatctaaaatggctttgttacaccagagccatctggtgtgaagaactctatatttgtatgttgagagggcatggaataattgtattttgctggcaatagacacattctttattatttgcagattcctcatcaaatctgtaattatgcacagtttctgttatcaataaaacaaaagaatcctgtttgtgtggtttcatga

SEQ ID NO: 7494 - protein, 81 aa, Homo sapiens [sequence omitted]

SEQ ID NO: 7495 - DNA, 6878 bp, Homo sapiens
aaactgtggcaaaatatctttgagttctcatattagccagagggttaatatgtagaagacaatcattcatccttacagattctcagaatcttggaagagacaatacacattccaactatggagaatggtcctaagctggcaagccgcatcttgagcaaattaactgatatccagtatggaagagaagagagcgactggacaattgtgctatcctgaatggaaaatagaggatacaatggaaaatagaggataccaactgtatgctactgggacagactgttgcatttgaattgtgatagatttctttggctacctgtgcataatgtagtttgtagtatcaatgtgttacaagagtgattgtttcttcatgccagagaaaatgaattgcaatcatcaaatggtgtttcataacttggtagtagtaacttaccttaccttacctagaaaaacattaatgtaagccatataacatgggattttcctcaatgattttagtgcctccttttgtacttcactcagatactaaatagtagtttattctttaatataagttacattctgctcctcaaacaaatgcaattttttgtgtgtgtttgaaagctaatttgagaaaatttcataggttacatttcctgcagcctatctttatccacagaaagtgttttcttttttttaaatcaagacttttaaaactggatttcctcccatcactgttttttgaaggtcctccaagtccgtgttaaggtaaatatctgttttcttcctgatgtcacagcctgagcatactctgtgcattaggaagacctgagtgcatttcccaccattgtcctttccacattatgttgtagctggctggctgtcaggcgactacaagactgagggtcttgtgccttatagatctttgtatcccccatggctgacatatagtaggtactcagtaaatggttttataatgaatcagtgaacattttgcttctatagaagtgtaccttctttgtttctatattatgaaacctctttattagaatttgtgattgattctgacagtgtatagatttaccttatattgtctttattttccatgagctactaagtcattagagatactctgaagcatagttagtttaggaaatcacttcatattgattgtattagaattatcttggaattgaagatatatccctagagcaggggaccccaacccccaggccatgggccacacagcaggaagaggtgagtggtgggccattgaggagcttcatctgtatttatggctacttcccatcactcgaattaccacctgaactccacctcttgtcagctcagtggcagcattagattctcataggagcacaaatcctattgtgaactctgcatgcaagggatctaggctatgcgctccttatgagaatctaatgcttgatgacctgaggtgtaacagtttcatcctgaaaccacccttcaccctgcagtctgtggaaaaattgtcttccacaaaactggtccctggtgccaaaaatgttggggaccactgctctagagagaggtcatgatatcataccaaccaaatggaaatgacaaatgttttatgtcaagtgttaattgcagaaataaatcttttttttttttttttggtagaaaacaaagaggcatactctgatttttatactctgtttttgcaggtgctcttttctttgaatggagatttgatgagcaagtggttaggatgcagggagagctactatgggtgatattttccttgtttaggagctgtgagttaaaattgtatcctttgtggtttatctaaggaaagtcaaatcttgacagaaaacatttttccttggaaggtcaactctcagacattgtattttggtttccctcagtcctcataacttccttcttgctgaacatattttattctcttttcagagaaggaaaataaaaaggattctaaaagtttgatgcattggaaaaatttccttgaggcatttagcaacacatagaaaatgggctttgattcttttccaaaacttttagccatagggtcttttatagacagggatagtaaaatgaaaattgagaaatataagatgaaaaggaatgataaaaatatcttttagggggcttttaattggtgatctgaaatcttgggagaagctgttcttttcaggcctgaggtgctcttgactgtcgcctgcgcactgtgtaccccgagcaacattctaagggtgtgctttcgccttggctaactcctttgacctcattcttcatatagtagtctaggaaaaagttgcaggtaatttaaactgtctagtggtacatagtaactaaatttctattcctatgagaaatgagaattatttatttgccatcaacacattttatactttgcatctccaaatttattgtggcgagacttgtccattgtgaaagttagagaacattatgtttgtatcatttctttcataaaacctcaagagcatttttaagcccttttcatcagacccagtgaaaactaaggatagatgtttaaaaactggaggtctcctgataaggagaacacaatccaccattgtcatttaagtaataagacaggaaattgaccttgacgctttcttgttaaatagatttaacaggaacatctgcacatcttttttccttgtgcactatttgtttaattgcagtggattaatacagcaagagtgccacattataactaggcaattatccattcttcaagacttagttattgtcacactaattgatcgtttaaggcataagatggtctagcattaggaacatgtgaagctaatctgctcaaaaagatcaacaaattaatattgttgctgatatttgcataattggctgcaattatttaatgtttaattgggttgatcaaatgagattcagcaattcacaagtgcattaatataaacagaactggtggcacttaaaatgataatgattaacttatattgcatgttctcttcctttcacttttttcagtttctacatttcagaccgagcttgtcagcttttttgaaaacacatcagtagaaaccaagattttaaaatgaagtgtcaagacaaaggcaaaacctgagcagttcctaaaaagatttgctgttagaaattttctttgtggcagtcatttattaaggattcaactcgtgatacaccaaaagaagagttgacttcagagatgtgttccatgctctctagcacaggaatgaataaatttataacacctgctttagcctttgttttcaaaagcacaaaggaaaagtgaaagggaaagagaaacaagtgactgagaagtcttgttaaggaatcaggttttttctacctggtaaacattctctattcttttctcaaaagattgctgtaagaaaaaatgtaagacaaaaaaaaaaaaaaaaaacaaacagaggcagaggcaggcagtagcaagaaagcagagcgtaacatcagctagatggtaacatgcaatgtcagctctcttgaagacatgggaaacctaagttacaccttgggttaaaattcttcaccatattagttttgttgcttcataaaatttacctaagcaagtggtcttgcttgcctcaaatccaagcagtcttgaacacttggaggcaattaatgagtatatcttagtcaaaagaattgttggagctttttattaaagctacagtttcagttctgcttttggggaattgtgctatgaaagcagctgccaaaataagctcatttattttcttcaatcccactcagtgctcagtcactatattctgtttcctttttttttttcaagttgcatatttggtttccccttatgattgggaaagatgaattttcagcagaaaacattgtttgttcactttcaaagagtgatagtttctaaaacatttagagcaataaatattcatcagaggtaccaagtaagccggcagaagagttaagggttagagaaatcccttatttcatgtcttgactctaaaattatcaaagtacttttccttgtaatgtggatttcttcttatgcggatatgcaaaaacttcagttatacgtagtaatgctagcaggtaattttagtagacattttataacaactgtcactttgtttcgccacatgtagagtttgttcagctattttccagatatctccccacaaaaggaggcaaagggtaccagcttttcaatgagcattacctattacttggcaaagatgatgaagactctattaatagttcatttgataaatgttgacataaccaacaatagagattaggaagttagttttaagaaatcaatggcatatagacattaccctcatggagtttgtattctactacttgaactgattgtagctataaaagcatagttagatagctgaatagttagatcataagcaaagaaggccagaacacatctcttatcaagaaatcaatgaatagtttatctcatttttaaagcaactttatccttctttaattccttcctttcttctagtgcaaaactacttaataaggttggtgtttaggttagtgttcacaccattcctcatctggtgtgaattaccttctctttctttactatttactaccaacctagtacatgtgttgactgaattcttttcaaacaatgttgagttatcatggtgcacctaataaattaacaccacagattacagcatccttgctgattttctcagcaaagccagattagatggaaataaacaaagaaaatgatcctagagtgaatttttctagaaaatatctattatgaaccatgctgtttaaagtattagcttgaaggtgatggatccagctattcagaaaataactttcatataaccatgattttgcacagtatgaggtcttaaatgtgtggaaagagataaattttttatcattaccacaaaccccttttaaagattcaaaggtggaagaaagtgatttattttttctcttcagcatacatatataaaagacttgtcagatgtttaatttggggaggttgataatgaaacatatcaacagagtatagtagttatagtagtgtttgtgggtaaataatttcctggggtcagacatatataaacatatttgcttcaaaatgataaaggcatgaaatcagtcttaaaaattgaaatgggggtgatgggggagaaaaagaagaacaaatttgaagtgccctttcaaatctgctggatacaagtattgaagttttaagtcatcttattctgtctgaaagtgtatttttcattctacaatagacccaatcaacaagacgtataacttgagttgcatgatgttcagtttatgtaatctactgttgggatggtaagaattgatgtaggctgtggtgtaagaatgaattaaaatatagtttcactggcttttctctacatatccactatcacaatggctaggtttcctgttgctcactattggattctggagaaaaatttaatgaaagatgatatcagaggaagaataagtggaggtagagaagaaaggaatgatagaggaggggaaaaaaacaaaacatatttttgtgttatccaaaggagctttttccttattctgtcaagcattgagatcttcttcagctttcaatgtagttgctaaatacaaataatgctactaggtagtgactaaatatagcaaacacttcatcagatattagaattaggtcacactattgaggttataatctgaaggttgtgttacatagaaaccactttagattattatcaacttggactaggctttattttataatagcatagtaagtaatatctattgtgtcatttcttcaaccattttattctaagatccatgaagcttcttgaggccaaataaaataataagtttagacaagaagtagattgtgacttttttcccttagagatactatttactatctcctatcctgataggtggaaggtttactgaattggaaattggttgactattagtttttaactaaaatgtgcaataacacattgcagtttcctcaaactagtttcctatgatcattaaactcattctcagggttaagaaaggaatgtaaatttctgcctcaatttgtacttcatcaataagtttttgaagagtgcagatttttagtcaggtcttaaaaataaactcacaaatctggatgcatttctaaattctgcaaatgtttcctggggtgacttaacaaggaataatcccacaatatacctagctacctaatacatggagctggggctcaacccactgtttttaaggatttgcgcttacttgtggctgaggaaaaataagtagttcgaggaagtagtttttaaatgtgagcttatagatagaaacagaatatcaacttaattatgaaattgttagaacctgttctcttgtatctgaatctgattgcaattactattgtactgatagactccagccattgcaagtctcagatatcttagctgtgtagtgattcttgaaattctttttaagaaaaattgagtagaaagaaataaaccctttgtaaatgaggcttggcttttgtgaaagatcatccgcaggctatgttaaaaggattttagctcactaaaagtgtaataatggaaatgtggaaaatatcgtaggtaaaggaaactacctcatgctctgaaggttttgtagaagcacaattaaacatctaaaatggctttgttacaccagagccatctggtgtgaagaactctatatttgtatgttgagagggcatggaataattgtattttgctggcaatagacacattctttattatttgcagattcctcatcaaatctgtaattatgcacagtttctgttatcaataaaacaaaagaatcctgtttgtgtggtttcatga

SEQ ID NO: 7496 - protein, 32 aa, Homo sapiens
MENGPKLASRILSKLTDIQYGREESDWTIVLS

SEQ ID NO: 7497 - DNA, 7042 bp, Homo sapiens
tgaatctttttctttactggataaatgaagatggagaagaagaactggcaactcctccactagatggcatcattcttccaggagtgacaaggcggtgcattctggacctggcacatcagtggggtgaatttaaggtgtcagagagatacctcaccatggatgacttgacaacagccctggaggggaacagagtgagagagatgtttggctctggtacagcctgtgttgtttgcccagtttctgatatactgtacaaaggcgagacaatacacattccaactatggagaatggtcctaagctggcaagccgcatcttgagcaaattaactgatatccagtatggaagagaagagagcgactggacaattgtgctatcctgaatggaaaatagaggatacaatggaaaatagaggataccaactgtatgctactgggacagactgttgcatttgaattgtgatagatttctttggctacctgtgcataatgtagtttgtagtatcaatgtgttacaagagtgattgtttcttcatgccagagaaaatgaattgcaatcatcaaatggtgtttcataacttggtagtagtaacttaccttaccttacctagaaaaacattaatgtaagccatataacatgggattttcctcaatgattttagtgcctccttttgtacttcactcagatactaaatagtagtttattctttaatataagttacattctgctcctcaaacaaatgcaattttttgtgtgtgtttgaaagctaatttgagaaaatttcataggttacatttcctgcagcctatctttatccacagaaagtgttttcttttttttaaatcaagacttttaaaactggatttcctcccatcactgttttttgaaggtcctccaagtccgtgttaaggtaaatatctgttttcttcctgatgtcacagcctgagcatactctgtgcattaggaagacctgagtgcatttcccaccattgtcctttccacattatgttgtagctggctggctgtcaggcgactacaagactgagggtcttgtgccttatagatctttgtatcccccatggctgacatatagtaggtactcagtaaatggttttataatgaatcagtgaacattttgcttctatagaagtgtaccttctttgtttctatattatgaaacctctttattagaatttgtgattgattctgacagtgtatagatttaccttatattgtctttattttccatgagctactaagtcattagagatactctgaagcatagttagtttaggaaatcacttcatattgattgtattagaattatcttggaattgaagatatatccctagagcaggggaccccaacccccaggccatgggccacacagcaggaagaggtgagtggtgggccattgaggagcttcatctgtatttatggctacttcccatcactcgaattaccacctgaactccacctcttgtcagctcagtggcagcattagattctcataggagcacaaatcctattgtgaactctgcatgcaagggatctaggctatgcgctccttatgagaatctaatgcttgatgacctgaggtgtaacagtttcatcctgaaaccacccttcaccctgcagtctgtggaaaaattgtcttccacaaaactggtccctggtgccaaaaatgttggggaccactgctctagagagaggtcatgatatcataccaaccaaatggaaatgacaaatgttttatgtcaagtgttaattgcagaaataaatcttttttttttttttttggtagaaaacaaagaggcatactctgatttttatactctgtttttgcaggtgctcttttctttgaatggagatttgatgagcaagtggttaggatgcagggagagctactatgggtgatattttccttgtttaggagctgtgagttaaaattgtatcctttgtggtttatctaaggaaagtcaaatcttgacagaaaacatttttccttggaaggtcaactctcagacattgtattttggtttccctcagtcctcataacttccttcttgctgaacatattttattctcttttcagagaaggaaaataaaaaggattctaaaagtttgatgcattggaaaaatttccttgaggcatttagcaacacatagaaaatgggctttgattcttttccaaaacttttagccatagggtcttttatagacagggatagtaaaatgaaaattgagaaatataagatgaaaaggaatgataaaaatatcttttagggggcttttaattggtgatctgaaatcttgggagaagctgttcttttcaggcctgaggtgctcttgactgtcgcctgcgcactgtgtaccccgagcaacattctaagggtgtgctttcgccttggctaactcctttgacctcattcttcatatagtagtctaggaaaaagttgcaggtaatttaaactgtctagtggtacatagtaactaaatttctattcctatgagaaatgagaattatttatttgccatcaacacattttatactttgcatctccaaatttattgtggcgagacttgtccattgtgaaagttagagaacattatgtttgtatcatttctttcataaaacctcaagagcatttttaagcccttttcatcagacccagtgaaaactaaggatagatgtttaaaaactggaggtctcctgataaggagaacacaatccaccattgtcatttaagtaataagacaggaaattgaccttgacgctttcttgttaaatagatttaacaggaacatctgcacatcttttttccttgtgcactatttgtttaattgcagtggattaatacagcaagagtgccacattataactaggcaattatccattcttcaagacttagttattgtcacactaattgatcgtttaaggcataagatggtctagcattaggaacatgtgaagctaatctgctcaaaaagatcaacaaattaatattgttgctgatatttgcataattggctgcaattatttaatgtttaattgggttgatcaaatgagattcagcaattcacaagtgcattaatataaacagaactggtggcacttaaaatgataatgattaacttatattgcatgttctcttcctttcacttttttcagtttctacatttcagaccgagcttgtcagcttttttgaaaacacatcagtagaaaccaagattttaaaatgaagtgtcaagacaaaggcaaaacctgagcagttcctaaaaagatttgctgttagaaattttctttgtggcagtcatttattaaggattcaactcgtgatacaccaaaagaagagttgacttcagagatgtgttccatgctctctagcacaggaatgaataaatttataacacctgctttagcctttgttttcaaaagcacaaaggaaaagtgaaagggaaagagaaacaagtgactgagaagtcttgttaaggaatcaggttttttctacctggtaaacattctctattcttttctcaaaagattgctgtaagaaaaaatgtaagacaaaaaaaaaaaaaaaaaacaaacagaggcagaggcaggcagtagcaagaaagcagagcgtaacatcagctagatggtaacatgcaatgtcagctctcttgaagacatgggaaacctaagttacaccttgggttaaaattcttcaccatattagttttgttgcttcataaaatttacctaagcaagtggtcttgcttgcctcaaatccaagcagtcttgaacacttggaggcaattaatgagtatatcttagtcaaaagaattgttggagctttttattaaagctacagtttcagttctgcttttggggaattgtgctatgaaagcagctgccaaaataagctcatttattttcttcaatcccactcagtgctcagtcactatattctgtttcctttttttttttcaagttgcatatttggtttccccttatgattgggaaagatgaattttcagcagaaaacattgtttgttcactttcaaagagtgatagtttctaaaacatttagagcaataaatattcatcagaggtaccaagtaagccggcagaagagttaagggttagagaaatcccttatttcatgtcttgactctaaaattatcaaagtacttttccttgtaatgtggatttcttcttatgcggatatgcaaaaacttcagttatacgtagtaatgctagcaggtaattttagtagacattttataacaactgtcactttgtttcgccacatgtagagtttgttcagctattttccagatatctccccacaaaaggaggcaaagggtaccagcttttcaatgagcattacctattacttggcaaagatgatgaagactctattaatagttcatttgataaatgttgacataaccaacaatagagattaggaagttagttttaagaaatcaatggcatatagacattaccctcatggagtttgtattctactacttgaactgattgtagctataaaagcatagttagatagctgaatagttagatcataagcaaagaaggccagaacacatctcttatcaagaaatcaatgaatagtttatctcatttttaaagcaactttatccttctttaattccttcctttcttctagtgcaaaactacttaataaggttggtgtttaggttagtgttcacaccattcctcatctggtgtgaattaccttctctttctttactatttactaccaacctagtacatgtgttgactgaattcttttcaaacaatgttgagttatcatggtgcacctaataaattaacaccacagattacagcatccttgctgattttctcagcaaagccagattagatggaaataaacaaagaaaatgatcctagagtgaatttttctagaaaatatctattatgaaccatgctgtttaaagtattagcttgaaggtgatggatccagctattcagaaaataactttcatataaccatgattttgcacagtatgaggtcttaaatgtgtggaaagagataaattttttatcattaccacaaaccccttttaaagattcaaaggtggaagaaagtgatttattttttctcttcagcatacatatataaaagacttgtcagatgtttaatttggggaggttgataatgaaacatatcaacagagtatagtagttatagtagtgtttgtgggtaaataatttcctggggtcagacatatataaacatatttgcttcaaaatgataaaggcatgaaatcagtcttaaaaattgaaatgggggtgatgggggagaaaaagaagaacaaatttgaagtgccctttcaaatctgctggatacaagtattgaagttttaagtcatcttattctgtctgaaagtgtatttttcattctacaatagacccaatcaacaagacgtataacttgagttgcatgatgttcagtttatgtaatctactgttgggatggtaagaattgatgtaggctgtggtgtaagaatgaattaaaatatagtttcactggcttttctctacatatccactatcacaatggctaggtttcctgttgctcactattggattctggagaaaaatttaatgaaagatgatatcagaggaagaataagtggaggtagagaagaaaggaatgatagaggaggggaaaaaaacaaaacatatttttgtgttatccaaaggagctttttccttattctgtcaagcattgagatcttcttcagctttcaatgtagttgctaaatacaaataatgctactaggtagtgactaaatatagcaaacacttcatcagatattagaattaggtcacactattgaggttataatctgaaggttgtgttacatagaaaccactttagattattatcaacttggactaggctttattttataatagcatagtaagtaatatctattgtgtcatttcttcaaccattttattctaagatccatgaagcttcttgaggccaaataaaataataagtttagacaagaagtagattgtgacttttttcccttagagatactatttactatctcctatcctgataggtggaaggtttactgaattggaaattggttgactattagtttttaactaaaatgtgcaataacacattgcagtttcctcaaactagtttcctatgatcattaaactcattctcagggttaagaaaggaatgtaaatttctgcctcaatttgtacttcatcaataagtttttgaagagtgcagatttttagtcaggtcttaaaaataaactcacaaatctggatgcatttctaaattctgcaaatgtttcctggggtgacttaacaaggaataatcccacaatatacctagctacctaatacatggagctggggctcaacccactgtttttaaggatttgcgcttacttgtggctgaggaaaaataagtagttcgaggaagtagtttttaaatgtgagcttatagatagaaacagaatatcaacttaattatgaaattgttagaacctgttctcttgtatctgaatctgattgcaattactattgtactgatagactccagccattgcaagtctcagatatcttagctgtgtagtgattcttgaaattctttttaagaaaaattgagtagaaagaaataaaccctttgtaaatgaggcttggcttttgtgaaagatcatccgcaggctatgttaaaaggattttagctcactaaaagtgtaataatggaaatgtggaaaatatcgtaggtaaaggaaactacctcatgctctgaaggttttgtagaagcacaattaaacatctaaaatggctttgttacaccagagccatctggtgtgaagaactctatatttgtatgttgagagggcatggaataattgtattttgctggcaatagacacattctttattatttgcagattcctcatcaaatctgtaattatgcacagtttctgttatcaataaaacaaaagaatcctgtttgtgtggtttcatga

SEQ ID NO: 7498 - protein, 74 aa, Homo sapiens [sequence omitted]

SEQ ID NO: 7499 - DNA, 7838 bp, Homo sapiens
ctttatcttttaaattgcccactaataccatgaggtttaaggtgtggggtggatgctgcggcatcggaggaccctgctggtggaggaaatggttcacgcccgtccccgttccctttgcaggcttgctattgtgcgtctgtgattgacaagaccacgaggctgagcgcgccctggagatttttctataaatggcttaacaccccagtctagactatttgctcggatataagggagacaattgtttttttgttctttgccggcgaaccctggctctgtagggctgacctggaatttaaccagtcttccctgagccggcggaggaggacaaaaaccgccgcgaccccggcagggtgggaagtgcagggcagcgctcccaagacacgcttgttggaggttcgggcctgggtgcttggttgtctgagcctccttttttgtgtttgcctgggtcctggagaggagcgcacggtatcatggattgcagtaacggatgctccgcagagtgtaccggagaaggaggatcaaaagaggtggtggggacttttaaggctaaagacctaatagtcacaccagctaccattttaaaggaaaaaccagaccccaataatctggtttttggaactgtgttcacggatcatatgctgacggtggagtggtcctcagagtttggatgggagaaacctcatatcaagcctcttcagaacctgtcattgcaccctggctcatcagctttgcactatgcagtggaattatttgaaggattgaaggcatttcgaggagtagataataaaattcgactgtttcagccaaacctcaacatggatagaatgtatcgctctgctgtgagggcaactctgccggtatttgacaaagaagagctcttagagtgtattcaacagcttgtgaaattggatcaagaatgggtcccatattcaacatctgctagtctgtatattcgtcctacattcattggaactgagccttctcttggagtcaagaagcctaccaaagccctgctctttgtactcttgagcccagtgggaccttatttttcaagtggaacctttaatccagtgtccctgtgggccaatcccaagtatgtaagagcctggaaaggtggaactggggactgcaagatgggagggaattacggctcatctctttttgcccaatgtgaagcagtagataatgggtgtcagcaggtcctgtggctctatggagaggaccatcagatcactgaagtgggaactatgaatctttttctttactggataaatgaagatggagaagaagaactggcaactcctccactagatggcatcattcttccaggagtgacaaggcggtgcattctggacctggcacatcagtggggtgaatttaaggtgtcagagagatacctcaccatggatgacttgacaacagccctggaggggaacagagtgagagagatgtttggctctggtacagcctgtgttgtttgcccagtttctgatatactgtacaaaggcgagacaatacacattccaactatggagaatggtcctaagctggcaagccgcatcttgagcaaattaactgatatccagtatggaagagaagagagcgactggacaattgtgctatcctgaatggaaaatagaggatacaatggaaaatagaggataccaactgtatgctactgggacagactgttgcatttgaattgtgatagatttctttggctacctgtgcataatgtagtttgtagtatcaatgtgttacaagagtgattgtttcttcatgccagagaaaatgaattgcaatcatcaaatggtgtttcataacttggtagtagtaacttaccttaccttacctagaaaaacattaatgtaagccatataacatgggattttcctcaatgattttagtgcctccttttgtacttcactcagatactaaatagtagtttattctttaatataagttacattctgctcctcaaacaaatgcaattttttgtgtgtgtttgaaagctaatttgagaaaatttcataggttacatttcctgcagcctatctttatccacagaaagtgttttcttttttttaaatcaagacttttaaaactggatttcctcccatcactgttttttgaaggtcctccaagtccgtgttaaggtaaatatctgttttcttcctgatgtcacagcctgagcatactctgtgcattaggaagacctgagtgcatttcccaccattgtcctttccacattatgttgtagctggcagtgaacattttgcttctatagaagtgtaccttctttgtttctatattatgaaacctctttattagaatttgtgattgattctgacagtgtatagatttaccttatattgtctttattttccatgagctactaagtcattagagatactctgaagcatagttagtttaggaaatcacttcatattgattgtattagaattatcttggaattgaagatatatccctagagctctagagagaggtcatgatatcataccaaccaaatggaaatgacaaatgttttatgtcaagtgttaattgcagaaataaatcttttttttttttttttggtagaaaacaaagaggcatactctgatttttatactctgtttttgcaggtgctcttttctttgaatggagatttgatgagcaagtggttaggatgcagggagagctactatgggtgatattttccttgtttaggagctgtgagttaaaattgtatcctttgtggtttatctaaggaaagtcaaatcttgacagaaaacatttttccttggaaggtcaactctcagacattgtattttggtttccctcagtcctcataacttccttcttgctgaacatattttattctcttttcagagaaggaaaataaaaaggattctaaaagtttgatgcattggaaaaatttccttgaggcatttagcaacacatagaaaatgggctttgattcttttccaaaacttttagccatagggtcttttatagacagggatagtaaaatgaaaattgagaaatataagatgaaaaggaatgataaaaatatcttttagggggcttttaattggtgatctgaaatcttgggagaagctgttcttttcaggcctgaggtgctcttgactgtcgcctgcgcactgtgtaccccgagcaacattctaagggtgtgctttcgccttggctaactcctttgacctcattcttcatatagtagtctaggaaaaagttgcaggtaatttaaactgtctagtggtacatagtaactaaatttctattcctatgagaaatgagaattatttatttgccatcaacacattttatactttgcatctccaaatttattgtggcgagacttgtccattgtgaaagttagagaacattatgtttgtatcatttctttcataaaacctcaagagcatttttaagcccttttcatcagacccagtgaaaactaaggatagatgtttaaaaactggaggtctcctgataaggagaacacaatccaccattgtcatttaagtaataagacaggaaattgaccttgacgctttcttgttaaatagatttaacaggaacatctgcacatcttttttccttgtgcactatttgtttaattgcagtggattaatacagcaagagtgccacattataactaggcaattatccattcttcaagacttagttattgtcacactaattgatcgtttaaggcataagatggtctagcattaggaacatgtgaagctaatctgctcaaaaagatcaacaaattaatattgttgctgatatttgcataattggctgcaattatttaatgtttaattgggttgatcaaatgagattcagcaattcacaagtgcattaatataaacagaactggtggcacttaaaatgataatgattaacttatattgcatgttctcttcctttcacttttttcagtttctacatttcagaccgagcttgtcagcttttttgaaaacacatcagtagaaaccaagattttaaaatgaagtgtcaagacaaaggcaaaacctgagcagttcctaaaaagatttgctgttagaaattttctttgtggcagtcatttattaaggattcaactcgtgatacaccaaaagaagagttgacttcagagatgtgttccatgctctctagcacaggaatgaataaatttataacacctgctttagcctttgttttcaaaagcacaaaggaaaagtgaaagggaaagagaaacaagtgactgagaagtcttgttaaggaatcaggttttttctacctggtaaacattctctattcttttctcaaaagattgctgtaagaaaaaatgtaagacaaaaaaaaaaaaaaaaaacaaacagaggcagaggcaggcagtagcaagaaagcagagcgtaacatcagctagatggtaacatgcaatgtcagctctcttgaagacatgggaaacctaagttacaccttgggttaaaattcttcaccatattagttttgttgcttcataaaatttacctaagcaagtggtcttgcttgcctcaaatccaagcagtcttgaacacttggaggcaattaatgagtatatcttagtcaaaagaattgttggagctttttattaaagctacagtttcagttctgcttttggggaattgtgctatgaaagcagctgccaaaataagctcatttattttcttcaatcccactcagtgctcagtcactatattctgtttcctttttttttttcaagttgcatatttggtttccccttatgattgggaaagatgaattttcagcagaaaacattgtttgttcactttcaaagagtgatagtttctaaaacatttagagcaataaatattcatcagaggtaccaagtaagccggcagaagagttaagggttagagaaatcccttatttcatgtcttgactctaaaattatcaaagtacttttccttgtaatgtggatttcttcttatgcggatatgcaaaaacttcagttatacgtagtaatgctagcaggtaattttagtagacattttataacaactgtcactttgtttcgccacatgtagagtttgttcagctattttccagatatctccccacaaaaggaggcaaagggtaccagcttttcaatgagcattacctattacttggcaaagatgatgaagactctattaatagttcatttgataaatgttgacataaccaacaatagagattaggaagttagttttaagaaatcaatggcatatagacattaccctcatggagtttgtattctactacttgaactgattgtagctataaaagcatagttagatagctgaatagttagatcataagcaaagaaggccagaacacatctcttatcaagaaatcaatgaatagtttatctcatttttaaagcaactttatccttctttaattccttcctttcttctagtgcaaaactacttaataaggttggtgtttaggttagtgttcacaccattcctcatctggtgtgaattaccttctctttctttactatttactaccaacctagtacatgtgttgactgaattcttttcaaacaatgttgagttatcatggtgcacctaataaattaacaccacagattacagcatccttgctgattttctcagcaaagccagattagatggaaataaacaaagaaaatgatcctagagtgaatttttctagaaaatatctattatgaaccatgctgtttaaagtattagcttgaaggtgatggatccagctattcagaaaataactttcatataaccatgattttgcacagtatgaggtcttaaatgtgtggaaagagataaattttttatcattaccacaaaccccttttaaagattcaaaggtggaagaaagtgatttattttttctcttcagcatacatatataaaagacttgtcagatgtttaatttggggaggttgataatgaaacatatcaacagagtatagtagttatagtagtgtttgtgggtaaataatttcctggggtcagacatatataaacatatttgcttcaaaatgataaaggcatgaaatcagtcttaaaaattgaaatgggggtgatgggggagaaaaagaagaacaaatttgaagtgccctttcaaatctgctggatacaagtattgaagttttaagtcatcttattctgtctgaaagtgtatttttcattctacaatagacccaatcaacaagacgtataacttgagttgcatgatgttcagtttatgtaatctactgttgggatggtaagaattgatgtaggctgtggtgtaagaatgaattaaaatatagtttcactggcttttctctacatatccactatcacaatggctaggtttcctgttgctcactattggattctggagaaaaatttaatgaaagatgatatcagaggaagaataagtggaggtagagaagaaaggaatgatagaggaggggaaaaaaacaaaacatatttttgtgttatccaaaggagctttttccttattctgtcaagcattgagatcttcttcagctttcaatgtagttgctaaatacaaataatgctactaggtagtgactaaatatagcaaacacttcatcagatattagaattaggtcacactattgaggttataatctgaaggttgtgttacatagaaaccactttagattattatcaacttggactaggctttattttataatagcatagtaagtaatatctattgtgtcatttcttcaaccattttattctaagatccatgaagcttcttgaggccaaataaaataataagtttagacaagaagtagattgtgacttttttcccttagagatactatttactatctcctatcctgataggtggaaggtttactgaattggaaattggttgactattagtttttaactaaaatgtgcaataacacattgcagtttcctcaaactagtttcctatgatcattaaactcattctcagggttaagaaaggaatgtaaatttctgcctcaatttgtacttcatcaataagtttttgaagagtgcagatttttagtcaggtcttaaaaataaactcacaaatctggatgcatttctaaattctgcaaatgtttcctggggtgacttaacaaggaataatcccacaatatacctagctacctaatacatggagctggggctcaacccactgtttttaaggatttgcgcttacttgtggctgaggaaaaataagtagttcgaggaagtagtttttaaatgtgagcttatagatagaaacagaatatcaacttaattatgaaattgttagaacctgttctcttgtatctgaatctgattgcaattactattgtactgatagactccagccattgcaagtctcagatatcttagctgtgtagtgattcttgaaattctttttaagaaaaattgagtagaaagaaataaaccctttgtaaatgaggcttggcttttgtgaaagatcatccgcaggctatgttaaaaggattttagctcactaaaagtgtaataatggaaatgtggaaaatatcgtaggtaaaggaaactacctcatgctctgaaggttttgtagaagcacaattaaacatctaaaatggctttgttacaccagagccatctggtgtgaagaactctatatttgtatgttgagagggcatggaataattgtattttgctggcaatagacacattctttattatttgcagattcctcatcaaatctgtaattatgcacagtttctgttatcaataaaacaaaagaatcctgtttgtgtggtttcatga

SEQ ID NO: 7500 - protein, 385 aa, Homo sapiens
MDCSNGCSAECTGEGGSKEVVGTFKAKDLIVTPATILKEKPDPNNLVFGTVFTDHMLTVEWSSEFGWEKPHIKPLQNLSLHPGSSALHYAVELFEGLKAFRGVDNKIRLFQPNLNMDRMYRSAVRATLPVFDKEELLECIQQLVKLDQEWVPYSTSASLYIRPTFIGTEPSLGVKKPTKALLFVLLSPVGPYFSSGTFNPVSLWANPKYVRAWKGGTGDCKMGGNYGSSLFAQCEAVDNGCQQVLWLYGEDHQITEVGTMNLFLYWINEDGEEELATPPLDGIILPGVTRRCILDLAHQWGEFKVSERYLTMDDLTTALEGNRVREMFGSGTACVVCPVSDILYKGETIHIPTMENGPKLASRILSKLTDIQYGREESDWTIVLS

SEQ ID NO: 7501 - DNA, 8167 bp, Homo sapiens
agtagggaggtgggcaggagccagtgatgacggaatggcaatcacatttgacctctgatctgtttatttcctcctccttgacgtctccatataaatgttacacgggcatccccacactcggatacgcacccacagtggctgattcgggggtaaccgtgtcatttgcttgcaacactggcacctctgccctgcaccccgggagtgagcagtgagtgaggctcgggtctgggcgctggctccgaatcttcgggctgggagagactccaccatctgggggcggcctgggggagcagccttagtgtcttcctgctgatgcaatccgctaggtcgcgagtctccgccgcgagagggccggtctgcaatccagcccgccacgtgtactcgccgccgcctcgggcactgccccaggtcttgctgcagccgggaccgcgctctgcagccgcagacccggtccacacggccaggggctacgacccttgggatctgccctccgctcagctcgagcttccctcgtggccgacggaacaatgaaggctaaagacctaatagtcacaccagctaccattttaaaggaaaaaccagaccccaataatctggtttttggaactgtgttcacggatcatatgctgacggtggagtggtcctcagagtttggatgggagaaacctcatatcaagcctcttcagaacctgtcattgcaccctggctcatcagctttgcactatgcagtggaagtatttgacaaagaagagctcttagagtgtattcaacagcttgtgaaattggatcaagaatgggtcccatattcaacatctgctagtctgtatattcgtcctacattcattggaactgagccttctcttggagtcaagaagcctaccaaagccctgctctttgtactcttgagcccagtgggaccttatttttcaagtggaacctttaatccagtgtccctgtgggccaatcccaagtatgtaagagcctggaaaggtggaactggggactgcaagatgggagggaattacggctcatctctttttgcccaatgtgaagcagtagataatgggtgtcagcaggtcctgtggctctatggagaggaccatcagatcactgaagtgggaactatgaatctttttctttactggataaatgaagatggagaagaagaactggcaactcctccactagatggcatcattcttccaggagtgacaaggcggtgcattctggacctggcacatcagtggggtgaatttaaggtgtcagagagatacctcaccatggatgacttgacaacagccctggaggggaacagagtgagagagatgtttggctctggtacagcctgtgttgtttgcccagtttctgatatactgtacaaaggcgagacaatacacattccaactatggagaatggtcctaagctggcaagccgcatcttgagcaaattaactgatatccagtatggaagagaagagagcgactggacaattgtgctatcctgaatggaaaatagaggatacaatggaaaatagaggataccaactgtatgctactgggacagactgttgcatttgaattgtgatagatttctttggctacctgtgcataatgtagtttgtagtatcaatgtgttacaagagtgattgtttcttcatgccagagaaaatgaattgcaatcatcaaatggtgtttcataacttggtagtagtaacttaccttaccttacctagaaaaacattaatgtaagccatataacatgggattttcctcaatgattttagtgcctccttttgtacttcactcagatactaaatagtagtttattctttaatataagttacattctgctcctcaaacaaatgcaattttttgtgtgtgtttgaaagctaatttgagaaaatttcataggttacatttcctgcagcctatctttatccacagaaagtgttttcttttttttaaatcaagacttttaaaactggatttcctcccatcactgttttttgaaggtcctccaagtccgtgttaaggtaaatatctgttttcttcctgatgtcacagcctgagcatactctgtgcattaggaagacctgagtgcatttcccaccattgtcctttccacattatgttgtagctggctggctgtcaggcgactacaagactgagggtcttgtgccttatagatctttgtatcccccatggctgacatatagtaggtactcagtaaatggttttataatgaatcagtgaacattttgcttctatagaagtgtaccttctttgtttctatattatgaaacctctttattagaatttgtgattgattctgacagtgtatagatttaccttatattgtctttattttccatgagctactaagtcattagagatactctgaagcatagttagtttaggaaatcacttcatattgattgtattagaattatcttggaattgaagatatatccctagagcaggggaccccaacccccaggccatgggccacacagcaggaagaggtgagtggtgggccattgaggagcttcatctgtatttatggctacttcccatcactcgaattaccacctgaactccacctcttgtcagctcagtggcagcattagattctcataggagcacaaatcctattgtgaactctgcatgcaagggatctaggctatgcgctccttatgagaatctaatgcttgatgacctgaggtgtaacagtttcatcctgaaaccacccttcaccctgcagtctgtggaaaaattgtcttccacaaaactggtccctggtgccaaaaatgttggggaccactgctctagagagaggtcatgatatcataccaaccaaatggaaatgacaaatgttttatgtcaagtgttaattgcagaaataaatcttttttttttttttttggtagaaaacaaagaggcatactctgatttttatactctgtttttgcaggtgctcttttctttgaatggagatttgatgagcaagtggttaggatgcagggagagctactatgggtgatattttccttgtttaggagctgtgagttaaaattgtatcctttgtggtttatctaaggaaagtcaaatcttgacagaaaacatttttccttggaaggtcaactctcagacattgtattttggtttccctcagtcctcataacttccttcttgctgaacatattttattctcttttcagagaaggaaaataaaaaggattctaaaagtttgatgcattggaaaaatttccttgaggcatttagcaacacatagaaaatgggctttgattcttttccaaaacttttagccatagggtcttttatagacagggatagtaaaatgaaaattgagaaatataagatgaaaaggaatgataaaaatatcttttagggggcttttaattggtgatctgaaatcttgggagaagctgttcttttcaggcctgaggtgctcttgactgtcgcctgcgcactgtgtaccccgagcaacattctaagggtgtgctttcgccttggctaactcctttgacctcattcttcatatagtagtctaggaaaaagttgcaggtaatttaaactgtctagtggtacatagtaactaaatttctattcctatgagaaatgagaattatttatttgccatcaacacattttatactttgcatctccaaatttattgtggcgagacttgtccattgtgaaagttagagaacattatgtttgtatcatttctttcataaaacctcaagagcatttttaagcccttttcatcagacccagtgaaaactaaggatagatgtttaaaaactggaggtctcctgataaggagaacacaatccaccattgtcatttaagtaataagacaggaaattgaccttgacgctttcttgttaaatagatttaacaggaacatctgcacatcttttttccttgtgcactatttgtttaattgcagtggattaatacagcaagagtgccacattataactaggcaattatccattcttcaagacttagttattgtcacactaattgatcgtttaaggcataagatggtctagcattaggaacatgtgaagctaatctgctcaaaaagatcaacaaattaatattgttgctgatatttgcataattggctgcaattatttaatgtttaattgggttgatcaaatgagattcagcaattcacaagtgcattaatataaacagaactggtggcacttaaaatgataatgattaacttatattgcatgttctcttcctttcacttttttcagtttctacatttcagaccgagcttgtcagcttttttgaaaacacatcagtagaaaccaagattttaaaatgaagtgtcaagacaaaggcaaaacctgagcagttcctaaaaagatttgctgttagaaattttctttgtggcagtcatttattaaggattcaactcgtgatacaccaaaagaagagttgacttcagagatgtgttccatgctctctagcacaggaatgaataaatttataacacctgctttagcctttgttttcaaaagcacaaaggaaaagtgaaagggaaagagaaacaagtgactgagaagtcttgttaaggaatcaggttttttctacctggtaaacattctctattcttttctcaaaagattgctgtaagaaaaaatgtaagacaaaaaaaaaaaaaaaaaacaaacagaggcagaggcaggcagtagcaagaaagcagagcgtaacatcagctagatggtaacatgcaatgtcagctctcttgaagacatgggaaacctaagttacaccttgggttaaaattcttcaccatattagttttgttgcttcataaaatttacctaagcaagtggtcttgcttgcctcaaatccaagcagtcttgaacacttggaggcaattaatgagtatatcttagtcaaaagaattgttggagctttttattaaagctacagtttcagttctgcttttggggaattgtgctatgaaagcagctgccaaaataagctcatttattttcttcaatcccactcagtgctcagtcactatattctgtttcctttttttttttcaagttgcatatttggtttccccttatgattgggaaagatgaattttcagcagaaaacattgtttgttcactttcaaagagtgatagtttctaaaacatttagagcaataaatattcatcagaggtaccaagtaagccggcagaagagttaagggttagagaaatcccttatttcatgtcttgactctaaaattatcaaagtacttttccttgtaatgtggatttcttcttatgcggatatgcaaaaacttcagttatacgtagtaatgctagcaggtaattttagtagacattttataacaactgtcactttgtttcgccacatgtagagtttgttcagctattttccagatatctccccacaaaaggaggcaaagggtaccagcttttcaatgagcattacctattacttggcaaagatgatgaagactctattaatagttcatttgataaatgttgacataaccaacaatagagattaggaagttagttttaagaaatcaatggcatatagacattaccctcatggagtttgtattctactacttgaactgattgtagctataaaagcatagttagatagctgaatagttagatcataagcaaagaaggccagaacacatctcttatcaagaaatcaatgaatagtttatctcatttttaaagcaactttatccttctttaattccttcctttcttctagtgcaaaactacttaataaggttggtgtttaggttagtgttcacaccattcctcatctggtgtgaattaccttctctttctttactatttactaccaacctagtacatgtgttgactgaattcttttcaaacaatgttgagttatcatggtgcacctaataaattaacaccacagattacagcatccttgctgattttctcagcaaagccagattagatggaaataaacaaagaaaatgatcctagagtgaatttttctagaaaatatctattatgaaccatgctgtttaaagtattagcttgaaggtgatggatccagctattcagaaaataactttcatataaccatgattttgcacagtatgaggtcttaaatgtgtggaaagagataaattttttatcattaccacaaaccccttttaaagattcaaaggtggaagaaagtgatttattttttctcttcagcatacatatataaaagacttgtcagatgtttaatttggggaggttgataatgaaacatatcaacagagtatagtagttatagtagtgtttgtgggtaaataatttcctggggtcagacatatataaacatatttgcttcaaaatgataaaggcatgaaatcagtcttaaaaattgaaatgggggtgatgggggagaaaaagaagaacaaatttgaagtgccctttcaaatctgctggatacaagtattgaagttttaagtcatcttattctgtctgaaagtgtatttttcattctacaatagacccaatcaacaagacgtataacttgagttgcatgatgttcagtttatgtaatctactgttgggatggtaagaattgatgtaggctgtggtgtaagaatgaattaaaatatagtttcactggcttttctctacatatccactatcacaatggctaggtttcctgttgctcactattggattctggagaaaaatttaatgaaagatgatatcagaggaagaataagtggaggtagagaagaaaggaatgatagaggaggggaaaaaaacaaaacatatttttgtgttatccaaaggagctttttccttattctgtcaagcattgagatcttcttcagctttcaatgtagttgctaaatacaaataatgctactaggtagtgactaaatatagcaaacacttcatcagatattagaattaggtcacactattgaggttataatctgaaggttgtgttacatagaaaccactttagattattatcaacttggactaggctttattttataatagcatagtaagtaatatctattgtgtcatttcttcaaccattttattctaagatccatgaagcttcttgaggccaaataaaataataagtttagacaagaagtagattgtgacttttttcccttagagatactatttactatctcctatcctgataggtggaaggtttactgaattggaaattggttgactattagtttttaactaaaatgtgcaataacacattgcagtttcctcaaactagtttcctatgatcattaaactcattctcagggttaagaaaggaatgtaaatttctgcctcaatttgtacttcatcaataagtttttgaagagtgcagatttttagtcaggtcttaaaaataaactcacaaatctggatgcatttctaaattctgcaaatgtttcctggggtgacttaacaaggaataatcccacaatatacctagctacctaatacatggagctggggctcaacccactgtttttaaggatttgcgcttacttgtggctgaggaaaaataagtagttcgaggaagtagtttttaaatgtgagcttatagatagaaacagaatatcaacttaattatgaaattgttagaacctgttctcttgtatctgaatctgattgcaattactattgtactgatagactccagccattgcaagtctcagatatcttagctgtgtagtgattcttgaaattctttttaagaaaaattgagtagaaagaaataaaccctttgtaaatgaggcttggcttttgtgaaagatcatccgcaggctatgttaaaaggattttagctcactaaaagtgtaataatggaaatgtggaaaatatcgtaggtaaaggaaactacctcatgctctgaaggttttgtagaagcacaattaaacatctaaaatggctttgttacaccagagccatctggtgtgaagaactctatatttgtatgttgagagggcatggaataattgtattttgctggcaatagacacattctttattatttgcagattcctcatcaaatctgtaattatgcacagtttctgttatcaataaaacaaaagaatcctgtttgtgtggtttcatga

SEQ ID NO: 7502 - protein, 325 aa, Homo sapiens
MKAKDLIVTPATILKEKPDPNNLVFGTVFTDHMLTVEWSSEFGWEKPHIKPLQNLSLHPGSSALHYAVEVFDKEELLECIQQLVKLDQEWVPYSTSASLYIRPTFIGTEPSLGVKKPTKALLFVLLSPVGPYFSSGTFNPVSLWANPKYVRAWKGGTGDCKMGGNYGSSLFAQCEAVDNGCQQVLWLYGEDHQITEVGTMNLFLYWINEDGEEELATPPLDGIILPGVTRRCILDLAHQWGEFKVSERYLTMDDLTTALEGNRVREMFGSGTACVVCPVSDILYKGETIHIPTMENGPKLASRILSKLTDIQYGREESDWTIVLS

SEQ ID NO: 7503 - DNA, 1643 bp, Homo sapiens
aaactgtggcaaaatatctttgagttctcatattagccagagggttaatatgtagaagacaatcattcatccttacagattctcagaatcttggaagagacaatacacattccaactatggagaatggtcctaagctggcaagccgcatcttgagcaaattaactgatatccagtatggaagagaagagagcgactggacaattgtgctatcctgaatggaaaatagaggatacaatggaaaatagaggataccaactgtatgctactgggacagactgttgcatttgaattgtgatagatttctttggctacctgtgcataatgtagtttgtagtatcaatgtgttacaagagtgattgtttcttcatgccagagaaaatgaattgcaatcatcaaatggtgtttcataacttggtagtagtaacttaccttaccttacctagaaaaacattaatgtaagccatataacatgggattttcctcaatgattttagtgcctccttttgtacttcactcagatactaaatagtagtttattctttaatataagttacattctgctcctcaaacaaatgcaattttttgtgtgtgtttgaaagctaatttgagaaaatttcataggttacatttcctgcagcctatctttatccacagaaagtgttttcttttttttaaatcaagacttttaaaactggatttcctcccatcactgttttttgaaggtcctccaagtccgtgttaaggtaaatatctgttttcttcctgatgtcacagcctgagcatactctgtgcattaggaagacctgagtgcatttcccaccattgtcctttccacattatgttgtagctggctggctgtcaggcgactacaagactgagggtcttgtgccttatagatctttgtatcccccatggctgacatatagtaggtactcagtaaatggttttataatgaatcagtgaacattttgcttctatagaagtgtaccttctttgtttctatattatgaaacctctttattagaatttgtgattgattctgacagtgtatagatttaccttatattgtctttattttccatgagctactaagtcattagagatactctgaagcatagttagtttaggaaatcacttcatattgattgtattagaattatcttggaattgaagatatatccctagagcaggggaccccaacccccaggccatgggccacacagcaggaagaggtgagtggtgggccattgaggagcttcatctgtatttatggctacttcccatcactcgaattaccacctgaactccacctcttgtcagctcagtggcagcattagattctcataggagcacaaatcctattgtgaactctgcatgcaagggatctaggctatgcgctccttatgagaatctaatgcttgatgacctgaggtgtaacagtttcatcctgaaaccacccttcaccctgcagtctgtggaaaaattgtcttccacaaaactggtccctggtgccaaaaatgttggggaccactgctctagagagaggtcatgatatcataccaaccaaatggaaatgacaaatgttttatgtcaagtgttaattgcagaaataaatcttttttttttttttttggtagaaaac

SEQ ID NO: 7504 - protein, 32 aa, Homo sapiens; identical to SEQ ID NO: 7496

SEQ ID NO: 7505 - DNA, 1807 bp, Homo sapiens
tgaatctttttctttactggataaatgaagatggagaagaagaactggcaactcctccactagatggcatcattcttccaggagtgacaaggcggtgcattctggacctggcacatcagtggggtgaatttaaggtgtcagagagatacctcaccatggatgacttgacaacagccctggaggggaacagagtgagagagatgtttggctctggtacagcctgtgttgtttgcccagtttctgatatactgtacaaaggcgagacaatacacattccaactatggagaatggtcctaagctggcaagccgcatcttgagcaaattaactgatatccagtatggaagagaagagagcgactggacaattgtgctatcctgaatggaaaatagaggatacaatggaaaatagaggataccaactgtatgctactgggacagactgttgcatttgaattgtgatagatttctttggctacctgtgcataatgtagtttgtagtatcaatgtgttacaagagtgattgtttcttcatgccagagaaaatgaattgcaatcatcaaatggtgtttcataacttggtagtagtaacttaccttaccttacctagaaaaacattaatgtaagccatataacatgggattttcctcaatgattttagtgcctccttttgtacttcactcagatactaaatagtagtttattctttaatataagttacattctgctcctcaaacaaatgcaattttttgtgtgtgtttgaaagctaatttgagaaaatttcataggttacatttcctgcagcctatctttatccacagaaagtgttttcttttttttaaatcaagacttttaaaactggatttcctcccatcactgttttttgaaggtcctccaagtccgtgttaaggtaaatatctgttttcttcctgatgtcacagcctgagcatactctgtgcattaggaagacctgagtgcatttcccaccattgtcctttccacattatgttgtagctggctggctgtcaggcgactacaagactgagggtcttgtgccttatagatctttgtatcccccatggctgacatatagtaggtactcagtaaatggttttataatgaatcagtgaacattttgcttctatagaagtgtaccttctttgtttctatattatgaaacctctttattagaatttgtgattgattctgacagtgtatagatttaccttatattgtctttattttccatgagctactaagtcattagagatactctgaagcatagttagtttaggaaatcacttcatattgattgtattagaattatcttggaattgaagatatatccctagagcaggggaccccaacccccaggccatgggccacacagcaggaagaggtgagtggtgggccattgaggagcttcatctgtatttatggctacttcccatcactcgaattaccacctgaactccacctcttgtcagctcagtggcagcattagattctcataggagcacaaatcctattgtgaactctgcatgcaagggatctaggctatgcgctccttatgagaatctaatgcttgatgacctgaggtgtaacagtttcatcctgaaaccacccttcaccctgcagtctgtggaaaaattgtcttccacaaaactggtccctggtgccaaaaatgttggggaccactgctctagagagaggtcatgatatcataccaaccaaatggaaatgacaaatgttttatgtcaagtgttaattgcagaaataaatcttttttttttttttttggtagaaaac

SEQ ID NO: 7506 - protein, 74 aa, Homo sapiens [sequence omitted]

SEQ ID NO: 7507 - DNA, 3115 bp, Homo sapiens
agtagggaggtgggcaggagccagtgatgacggaatggcaatcacatttgacctctgatctgtttatttcctcctccttgacgtctccatataaatgttacacgggcatccccacactcggatacgcacccacagtggctgattcgggggtaaccgtgtcatttgcttgcaacactggcacctctgccctgcaccccgggagtgagcagtgagtgaggctcgggtctgggcgctggctccgaatcttcgggctgggagagactccaccatctgggggcggcctgggggagcagccttagtgtcttcctgctgatgcaatccgctaggtcgcgagtctccgccgcgagagggccggtctgcaatccagcccgccacgtgtactcgccgccgcctcgggcactgccccaggtcttgctgcagccgggaccgcgctctgcagccgcagacccggtccacacggccaggggctacgacccttgggatctgccctccgctcagctcgagcttccctcgtggccgacggaacaatgaaggattgcagtaacggatgctccgcagagtgtaccggagaaggaggatcaaaagaggtggtggggacttttaaggctaaagacctaatagtcacaccagctaccattttaaaggaaaaaccagaccccaataatctggtttttggaactgtgttcacggatcatatgctgacggtggagtggtcctcagagtttggatgggagaaacctcatatcaagcctcttcagaacctgtcattgcaccctggctcatcagctttgcactatgcagtggaattatttgaaggattgaaggcatttcgaggagtagataataaaattcgactgtttcagccaaacctcaacatggatagaatgtatcgctctgctgtgagggcaactctgccggtatttgacaaagaagagctcttagagtgtattcaacagcttgtgaaattggatcaagaatgggtcccatattcaacatctgctagtctgtatattcgtcctacattcattggaactgagccttctcttggagtcaagaagcctaccaaagccctgctctttgtactcttgagcccagtgggaccttatttttcaagtggaacctttaatccagtgtccctgtgggccaatcccaagtatgtaagagcctggaaaggtggaactggggactgcaagatgggagggaattacggctcatctctttttgcccaatgtgaagcagtagataatgggtgtcagcaggtcctgtggctctatggagaggaccatcagatcactgaagtgggaactatgaatctttttctttactggataaatgaagatggagaagaagaactggcaactcctccactagatggcatcattcttccaggagtgacaaggcggtgcattctggacctggcacatcagtggggtgaatttaaggtgtcagagagatacctcaccatggatgacttgacaacagccctggaggggaacagagtgagagagatgtttggctctggtacagcctgtgttgtttgcccagtttctgatatactgtacaaaggcgagacaatacacattccaactatggagaatggtcctaagctggcaagccgcatcttgagcaaattaactgatatccagtatggaagagaagagagcgactggacaattgtgctatcctgaatggaaaatagaggatacaatggaaaatagaggataccaactgtatgctactgggacagactgttgcatttgaattgtgatagatttctttggctacctgtgcataatgtagtttgtagtatcaatgtgttacaagagtgattgtttcttcatgccagagaaaatgaattgcaatcatcaaatggtgtttcataacttggtagtagtaacttaccttaccttacctagaaaaacattaatgtaagccatataacatgggattttcctcaatgattttagtgcctccttttgtacttcactcagatactaaatagtagtttattctttaatataagttacattctgctcctcaaacaaatgcaattttttgtgtgtgtttgaaagctaatttgagaaaatttcataggttacatttcctgcagcctatctttatccacagaaagtgttttcttttttttaaatcaagacttttaaaactggatttcctcccatcactgttttttgaaggtcctccaagtccgtgttaaggtaaatatctgttttcttcctgatgtcacagcctgagcatactctgtgcattaggaagacctgagtgcatttcccaccattgtcctttccacattatgttgtagctggctggctgtcaggcgactacaagactgagggtcttgtgccttatagatctttgtatcccccatggctgacatatagtaggtactcagtaaatggttttataatgaatcagtgaacattttgcttctatagaagtgtaccttctttgtttctatattatgaaacctctttattagaatttgtgattgattctgacagtgtatagatttaccttatattgtctttattttccatgagctactaagtcattagagatactctgaagcatagttagtttaggaaatcacttcatattgattgtattagaattatcttggaattgaagatatatccctagagcaggggaccccaacccccaggccatgggccacacagcaggaagaggtgagtggtgggccattgaggagcttcatctgtatttatggctacttcccatcactcgaattaccacctgaactccacctcttgtcagctcagtggcagcattagattctcataggagcacaaatcctattgtgaactctgcatgcaagggatctaggctatgcgctccttatgagaatctaatgcttgatgacctgaggtgtaacagtttcatcctgaaaccacccttcaccctgcagtctgtggaaaaattgtcttccacaaaactggtccctggtgccaaaaatgttggggaccactgctctagagagaggtcatgatatcataccaaccaaatggaaatgacaaatgttttatgtcaagtgttaattgcagaaataaatcttttttttttttttttggtagaaaac

SEQ ID NO: 7508 - protein, 386 aa, Homo sapiens; identical to SEQ ID NO: 1069

SEQ ID NO: 7509 - DNA, 2339 bp, Homo sapiens
ctttatcttttaaattgcccactaataccatgaggtttaaggtgtggggtggatgctgcggcatcggaggaccctgctggtggaggaaatggttcacgcccgtccccgttccctttgcaggcttgctattgtgcgtctgtgattgacaagaccacgaggctgagcgcgccctggagatttttctataaatggcttaacaccccagtctagactatttgctcggatataagggagacaattgtttttttgttctttgccggcgaaccctggctctgtagggctgacctggaatttaaccagtcttccctgagccggcggaggaggacaaaaaccgccgcgaccccggcagggtgggaagtgcagggcagcgctcccaagacacgcttgttggaggttcgggcctgggtgcttggttgtctgagcctccttttttgtgtttgcctgggtcctggagaggagcgcacggtatcatggattgcagtaacggatgctccgcagagtgtaccggagaaggaggatcaaaagaggtggtggggacttttaaggctaaagacctaatagtcacaccagctaccattttaaaggaaaaaccagaccccaataatctggtttttggaactgtgttcacggatcatatgctgacggtggagtggtcctcagagtttggatgggagaaacctcatatcaagcctcttcagaacctgtcattgcaccctggctcatcagctttgcactatgcagtggaattatttgaaggattgaaggcatttcgaggagtagataataaaattcgactgtttcagccaaacctcaacatggatagaatgtatcgctctgctgtgagggcaactctgccggtatttgacaaagaagagctcttagagtgtattcaacagcttgtgaaattggatcaagaatgggtcccatattcaacatctgctagtctgtatattcgtcctacattcattggaactgagccttctcttggagtcaagaagcctaccaaagccctgctctttgtactcttgagcccagtgggaccttatttttcaagtggaacctttaatccagtgtccctgtgggccaatcccaagtatgtaagagcctggaaaggtggaactggggactgcaagatgggagggaattacggctcatctctttttgcccaatgtgaagcagtagataatgggtgtcagcaggtcctgtggctctatggagaggaccatcagatcactgaagtgggaactatgaatctttttctttactggataaatgaagatggagaagaagaactggcaactcctccactagatggcatcattcttccaggagtgacaaggcggtgcattctggacctggcacatcagtgggacacagaactcagcttgttttcaattaatttgcctgattttctgcagttcatttacttttgaacaacataattgcaattgtagactgagagaaattgaaactttcaaagagccatatttctattgcagatatattttcctgctcttccaaatctacttacagcatgagttcttcttttaaatattcaaatattttgaatattgccaagagctttgatttccatttttatctcttgtgggtttataaattaagaaaaaatactcatcttatttttttaaacctctctatttttattgccctttattcaaataacttgttgacaaactttgaacttgaaccactgaggtaaaagaacaagaattaaacagatagtttaaacacatagcttaaaaggatctttttcccatttcctatccttgagcaaagaatatattcaaacactttggcagaagtcaatgaggttataccactaattccatgatgaaaatcaactgaatgtgatactgaaagagaaggaagagaattgtcactgtaaagtcaactgttagtcatattaggaaaaaaaatacatacaatacaatttctcaaataaagtccaaatatacattcaacgtttaaaaataatgagtatttcagatatttgaactcagtctgttctttattccataaaagatataggtaagccgtgcacagtggctcacaactataatcccagcactttggcactttgggaggctgaggtgggaggatcacatgagcccagcctgggcaacatagggagacccctatctttacaaaataaaatataaaatataaaacctagttgggcatggcagcatacacctgtagtcccaggtgctcaggagactgagacaggaggatcacttgggcctgggaggtcgaggctgcaatgagccaagattatgccactgcattccagcctgggtgacagggcaagaccctgtctt

SEQ ID NO: 7510 - protein, 320 aa, Homo sapiens
MDCSNGCSAECTGEGGSKEVVGTFKAKDLIVTPATILKEKPDPNNLVFGTVFTDHMLTVEWSSEFGWEKPHIKPLQNLSLHPGSSALHYAVELFEGLKAFRGVDNKIRLFQPNLNMDRMYRSAVRATLPVFDKEELLECIQQLVKLDQEWVPYSTSASLYIRPTFIGTEPSLGVKKPTKALLFVLLSPVGPYFSSGTFNPVSLWANPKYVRAWKGGTGDCKMGGNYGSSLFAQCEAVDNGCQQVLWLYGEDHQITEVGTMNLFLYWINEDGEEELATPPLDGIILPGVTRRCILDLAHQWDTELSLFSINLPDFLQFIYF

SEQ ID NO: 7511 - DNA, 1627 bp, Homo sapiens
ggagcacaaagacagcgattgttacccaataagcagtagtcacacacttctaccaatcgccttaggagggctggttaccatggaatccaccatctgttcactccccaccggaatgtgattatccttgctgggctgggaagtggggaaagcaggggagcctgtgctgggtgagattatctgcaatggaccgggttaatgggaggcttgctttggctcgctggaagaacaaatgaagggagttttacttcaaccatttgtgacttctggccaagaggaataaattcagcttttataaggcagcagtacctgtccaaagatcgctttagttccaccttgctccacaagcagcacaaccacactggttggtgagaatgtatctgaagaagaggctcagggaataaatgggaacaggccagcaaaacactcagctgcaagtccaaagccacaagtgcctccaaagccattacacctgcagaattcaccttcgtccaatatacaccaaacccccaggcataaagctttacctagtgcaaaaccaaggatggaggaaattaaacctgcctctgcttcttgtgtctcaaaagaaaaacccagtaaggtatcagatctcatcagtcgctttgaaggaggcagctcattatcaaattatagtgatttgaagaaagagtctgctgtgaacctaaatgctcctagaaccccaggaaggcatggattgacaaccacacctcaacaaaaactcctctcccagcacttgccacagaggcagggaaatgatacagataagactcagggtgcacagacttgtgtggccaacggtgtaatggcagcacaaaaccagatggaatgtgaggaggagaaagctgccactcttagctcagatacttctattcaagcttctgaacccttgcttgatacgcacatagtgaatggagaaagagatgaaactgccacagctcctgcatcacccacaacagacagctgtgatggaaatgcttctgacagtagctacaggactccaggcataggcccagtgctccccctagaagaaagaggggcagaaacagaaaccaaggtacaagagagggaaaatggggaaagccctctggaactggagcagctggaccagcaccatgagatgaaggtagagcatgagactagctcatgagcagggaaaaccctgcctattcgattgttgtcttaaaactctttatttattgcacccctgaaatgtatgaatcagatcacccacactggcagttaaacgattttcaagctctggctgctgattagcatttcccctatgctctaagcagatatttcactttttcttttcatgtagtttctgttaatatctctgttgtaatttcaggagtcagaacagtgtggaaactttaatataggaaatccacaaatgtattgtttttacatagaaagaaaatgttccttgttgctctagatgttggtgctgtatccctaatacttacgggccaagcaagaagaaattgtataatctttgttgttcagaagtttctaatagaataaataggcctgtaagatgaacttgccactagtaaatgttacttttaaggacatgaatatggaagtattaaattattcaacagattat

SEQ ID NO: 7512 - protein, 207 aa, Homo sapiens
MEEIKPASASCVSKEKPSKVSDLISRFEGGSSLSNYSDLKKESAVNLNAPRTPGRHGLTTTPQQKLLSQHLPQRQGNDTDKTQGAQTCVANGVMAAQNQMECEEEKAATLSSDTSIQASEPLLDTHIVNGERDETATAPASPTTDSCDGNASDSSYRTPGIGPVLPLEERGAETETKVQERENGESPLELEQLDQHHEMKVEHETSS

SEQ ID NO: 7513 - DNA, 2781 bp, Homo sapiens
ggagcacaaagacagcgattgttacccaataagcagtagtcacacacttctaccaatcgccttaggagggctggttaccatggaatccaccatctgttcactccccaccggaatgtgattatccttgctgggctgggaagtggggaaagcaggggagcctgtgctgggtgagattatctgcaatggaccgggttaatgggaggcttgctttggctcgctggaagaacaaatgaagggagttttacttcaaccatttgtgacttctggccaagaggaataaattcagcttttataaggcagcagtacctgtccaaagatcgctttagttccaccttgctccacaagcagcacaaccacactggttggtgagaatgtatctgaagaagaggctcagggaataaatgggaacaggccagcaaaacactcagctgcaagtccaaagccacaagtgcctccaaagccattacacctgcagaattcaccttcgtccaatatacaccaaacccccaggcataaagctttacctagtgcaaaaccaaggatggaggaaattaaacctgcctctgcttcttgtgtctcaaaagaaaaacccagtaaggtatcagatctcatcagtcgctttgaaggaggcagctcattatcaaattatagtgatttgaagaaagagtctgctgtgaacctaaatgctcctagaaccccaggaaggcatggattgacaaccacacctcaacaaaaactcctctcccagcacttgccacagaggcagggaaatgatacagataagactcagggtgcacagacttgtgtggccaacggtgtaatggcagcacaaaaccagatggaatgtgaggaggagaaagctgccactcttagctcagatacttctattcaagcttctgaacccttgcttgatacgcacatagtgaatggagaaagagatgaaactgccacagctcctgcatcacccacaacagacagctgtgatggaaatgcttctgacagtagctacaggactccaggcataggcccagtgctccccctagaagaaagaggggcagaaacagaaaccaaggtacaagagagggaaaatggggaaagccctctggaactggagcagctggaccagcaccatgagatgaaggagactaatgagcaaaaacttcacaaaatagccaatgaacttttgcttactgaaagagcttatgtcaaccgacttgacctcttagatcagaaaatagagtggaggtgaatttagaaaattaacaaccatctggacattatgaaggaatagacctccttctgcctacatgtaacagaatggcaattaagaggtatgtttccagcagagatggtgaataaaatcttttctaatatttcatcaataaatgccttccatagtaaattcctcttgccagagctggagaaacgaatgcaagaatgggaaactactcctagaattggagacatccttcagaaattggcaccattccttaagatgtatggagaatatgtgaaaggatttgataatgcaatggaattggttaaaaacatgacagaacgtattccccagttcaaatcagtggttgaagaaattcagaaacagaaaatctgtgggagcttaactttgcagcatcacatgctagaacctgttcagcggattccccggtatgagatgctccttaaggactatctaaggaaattgcctcctgattccctggactggaatgatgctaaaaaatcacttgaaattatatctacagcagcaagccattctaatagtgcaataaggaaaatggagaacctaaagaaactcttagagatttatgaaatgttgggagaagaagaagacattgtaaacccttcaaatgaactaataaaagaaggacagatcctcaaactagctgctcggaacacttcagcacaagaacgctaccttttcttattcaacaacatgttgctgtactgtgtgcccaaattcagcttggtaggctctaaattcacagttcgaaccagggttggcattgatggaatgaaaattgtagagactcaaaatgaagaatatccacatactttccaggtgtctgggaaagagagaacactggaactgcaggccagttctgcgcaagacaaagaagaatggatcaaggcccttcaagaaaccatcgatgcttttcatcaaaggcatgaaaccttcagaaatgcaattgcaaaggataatgacattcactcagaggtttctactgctgagctagggaaaagagccccaagatggatccgagataatgaagtgacaatgtgtatgaaatgtaaagaacctttcaatgcactgacacgaaggaggcatcattgtcgagcatgtggatatgtggtttgttggaaatgctccgactacaaagctcaacttgaatatgatggtggtaaattgagcaaagtttgtaaagactgttatcaaatcataagtggattcacagacagtgaagaaaagaaaagaaaaggaattttagagattgaatcagcagaagtatctggaaacagtgtggtgtgcagctttcttcagtatatggagaagtcaaaaccttggcagaaagcttggtgtgtgatccccaagcaagaccctcttgtgctgtacatgtatggtgccccccaggtatctaaaccacatctgtctgaagggacagatgcccttgggggcaaggggaagcgagtggacagcggactcaaaatctgtagaacaagagttcaggcagtttcactgtttcattaaaattgaaaaataatgag

SEQ ID NO: 7514 - protein, 476 aa, Homo sapiens
MFPAEMVNKIFSNISSINAFHSKFLLPELEKRMQEWETTPRIGDILQKLAPFLKMYGEYVKGFDNAMELVKNMTERIPQFKSVVEEIQKQKICGSLTLQHHMLEPVQRIPRYEMLLKDYLRKLPPDSLDWNDAKKSLEIISTAASHSNSAIRKMENLKKLLEIYEMLGEEEDIVNPSNELIKEGQILKLAARNTSAQERYLFLFNNMLLYCVPKFSLVGSKFTVRTRVGIDGMKIVETQNEEYPHTFQVSGKERTLELQASSAQDKEEWIKALQETIDAFHQRHETFRNAIAKDNDIHSEVSTAELGKRAPRWIRDNEVTMCMKCKEPFNALTRRRHHCRACGYVVCWKCSDYKAQLEYDGGKLSKVCKDCYQIISGFTDSEEKKRKGILEIESAEVSGNSVVCSFLQYMEKSKPWQKAWCVIPKQDPLVLYMYGAPQVSKPHLSEGTDALGGKGKRVDSGLKICRTRVQAVSLFH

SEQ ID NO: 7515 - DNA, 3058 bp, Homo sapiens
ggagcacaaagacagcgattgttacccaataagcagtagtcacacacttctaccaatcgccttaggagggctggttaccatggaatccaccatctgttcactccccaccggaatgtgattatccttgctgggctgggaagtggggaaagcaggggagcctgtgctgggtgagattatctgcaatggaccgggttaatgggaggcttgctttggctcgctggaagaacaaatgaagggagttttacttcaaccatttgtgacttctggccaagaggaataaattcagcttttataaggcagcagtacctgtccaaagatcgctttagttccaccttgctccacaagcagcacaaccacactggttggtgagaatgtatctgaagaagaggctcagggaataaatgggaacaggccagcaaaacactcagctgcaagtccaaagccacaagtgcctccaaagccattacacctgcagaattcaccttcgtccaatatacaccaaacccccaggcataaagctttacctagtgcaaaaccaaggatggaggaaattaaacctgcctctgcttcttgtgtctcaaaagaaaaacccagtaaggtatcagatctcatcagtcgctttgaaggaggcagctcattatcaaattatagtgatttgaagaaagagtctgctgtgaacctaaatgctcctagaaccccaggaaggcatggattgacaaccacacctcaacaaaaactcctctcccagcacttgccacagaggcagggaaatgatacagataagactcagggtgcacagacttgtgtggccaacggtgtaatggcagcacaaaaccagatggaatgtgaggaggagaaagctgccactcttagctcagatacttctattcaagcttctgaacccttgcttgatacgcacatagtgaatggagaaagagatgaaactgccacagctcctgcatcacccacaacagacagctgtgatggaaatgcttctgacagtagctacaggactccaggcataggcccagtgctccccctagaagaaagaggggcagaaacagaaaccaaggtacaagagagggaaaatggggaaagccctctggaactggagcagctggaccagcaccatgagatgaaggagactaatgagcaaaaacttcacaaaatagccaatgaacttttgcttactgaaagagcttatgtcaaccgacttgacctcttagatcagaaaatagagtggaggtgaatttagaaaattaacaaccatctggacattatgaaggaatagacctccttctgcctacatgtaacagaatggcaattaagaggtattttattgcaaactgttggaagaagcaaaccgaggctcgtttccagcagagatggtgaataaaatcttttctaatatttcatcaataaatgccttccatagtaaattcctcttgccagagctggagaaacgaatgcaagaatgggaaactactcctagaattggagacatccttcagaaattggcaccattccttaagatgtatggagaatatgtgaaaggatttgataatgcaatggaattggttaaaaacatgacagaacgtattccccagttcaaatcagtggttgaagaaattcagaaacagaaaatctgtgggagcttaactttgcagcatcacatgctagaacctgttcagcggattccccggtatgagatgctccttaaggactatctaaggaaattgcctcctgattccctggactggaatgatgctaaaaaatcacttgaaattatatctacagcagcaagccattctaatagtgcaataaggaaaatggagaacctaaagaaactcttagagatttatgaaatgttgggagaagaagaagacattgtaaacccttcaaatgaactaataaaagaaggacagatcctcaaactagctgctcggaacacttcagcacaagaacgctaccttttcttattcaacaacatgttgctgtactgtgtgcccaaattcagcttggtaggctctaaattcacagttcgaaccagggttggcattgatggaatgaaaattgtagagactcaaaatgaagaatatccacatactttccaggtgtctgggaaagagagaacactggaactgcaggccagttctgcgcaagacaaagaagaatggatcaaggcccttcaagaaaccatcgatgcttttcatcaaaggcatgaaaccttcagaaatgcaattgcaaaggataatgacattcactcagaggtttctactgctgagctagggaaaagagccccaagatggatccgagataatgaagtgacaatgtgtatgaaatgtaaagaacctttcaatgcactgacacgaaggaggcatcattgtcgagcatgtggatatgtggtttgttggaaatgctccgactacaaagctcaacttgaatatgatggtggtaaattgagcaaagtttgtaaagactgttatcaaatcataagtggattcacagacagtgaagaaaagaaaagaaaaggaattttagagattgaatcagcagaagtatctggaaacagtgtggtgtgcagctttcttcagtatatggagaagtcaaaaccttggcagaaagcttggtgtgtgatccccaagcaagaccctcttgtgctgtacatgtatggtgccccccaggacgtcagagcccaggccaccattccacttctgggctatgtggtggatgaaatgccaaggagcgcagacctgccacacagtttcaaactgacccagtctaagtccgtgcacagctttgctgcagacagtgaggaactgaagcagaagtggctgaaagtcatccttttagctgtcacaggtgagacaccaggtggtccaaatgagcatccagccaccttggatgatcatcctgaacctaagaaaaaatcagaatgctgaactcctccaggaccagccatggtgtggaggtctcaggacttacagctcaagacattcccagctcttcttacacatctgctagcactttatgttgaaaaatataggcccataaatgc

SEQ ID NO: 7516 - protein, 518 aa, Homo sapiens
MVNKIFSNISSINAFHSKFLLPELEKRMQEWETTPRIGDILQKLAPFLKMYGEYVKGFDNAMELVKNMTERIPQFKSVVEEIQKQKICGSLTLQHHMLEPVQRIPRYEMLLKDYLRKLPPDSLDWNDAKKSLEIISTAASHSNSAIRKMENLKKLLEIYEMLGEEEDIVNPSNELIKEGQILKLAARNTSAQERYLFLFNNMLLYCVPKFSLVGSKFTVRTRVGIDGMKIVETQNEEYPHTFQVSGKERTLELQASSAQDKEEWIKALQETIDAFHQRHETFRNAIAKDNDIHSEVSTAELGKRAPRWIRDNEVTMCMKCKEPFNALTRRRHHCRACGYVVCWKCSDYKAQLEYDGGKLSKVCKDCYQIISGFTDSEEKKRKGILEIESAEVSGNSVVCSFLQYMEKSKPWQKAWCVIPKQDPLVLYMYGAPQDVRAQATIPLLGYVVDEMPRSADLPHSFKLTQSKSVHSFAADSEELKQKWLKVILLAVTGETPGGPNEHPATLDDHPEPKKKSEC

SEQ ID NO: 7517 - DNA, 8363 bp, Homo sapiens
ggagcacaaagacagcgattgttacccaataagcagtagtcacacacttctaccaatcgccttaggagggctggttaccatggaatccaccatctgttcactccccaccggaatgtgattatccttgctgggctgggaagtggggaaagcaggggagcctgtgctgggtgagattatctgcaatggaccgggttaatgggaggcttgctttggctcgctggaagaacaaatgaagggagttttacttcaaccatttgtgacttctggccaagaggaataaattcagcttttataaggcagcagtacctgtccaaagatcgctttagttccaccttgctccacaagcagcacaaccacactggttggtgagaatgtatctgaagaagaggctcagggaataaatgggaacaggccagcaaaacactcagctgcaagtccaaagccacaagtgcctccaaagccattacacctgcagaattcaccttcgtccaatatacaccaaacccccaggcataaagctttacctagtgcaaaaccaaggatggaggaaattaaacctgcctctgcttcttgtgtctcaaaagaaaaacccagtaaggtatcagatctcatcagtcgctttgaaggaggcagctcattatcaaattatagtgatttgaagaaagagtctgctgtgaacctaaatgctcctagaaccccaggaaggcatggattgacaaccacacctcaacaaaaactcctctcccagcacttgccacagaggcagggaaatgatacagataagactcagggtgcacagacttgtgtggccaacggtgtaatggcagcacaaaaccagatggaatgtgaggaggagaaagctgccactcttagctcagatacttctattcaagcttctgaacccttgcttgatacgcacatagtgaatggagaaagagatgaaactgccacagctcctgcatcacccacaacagacagctgtgatggaaatgcttctgacagtagctacaggactccaggcataggcccagtgctccccctagaagaaagaggggcagaaacagaaaccaaggtacaagagagggaaaatggggaaagccctctggaactggagcagctggaccagcaccatgagatgaaggagactaatgagcaaaaacttcacaaaatagccaatgaacttttgcttactgaaagagcttatgtcaaccgacttgacctcttagatcaggtattttattgcaaactgttggaagaagcaaaccgaggctcgtttccagcagagatggtgaataaaatcttttctaatatttcatcaataaatgccttccatagtaaattcctcttgccagagctggagaaacgaatgcaagaatgggaaactactcctagaattggagacatccttcagaaattggcaccattccttaagatgtatggagaatatgtgaaaggatttgataatgcaatggaattggttaaaaacatgacagaacgtattccccagttcaaatcagtggttgaagaaattcagaaacagaaaatctgtgggagcttaactttgcagcatcacatgctagaacctgttcagcggattccccggtatgagatgctccttaaggactatctaaggaaattgcctcctgattccctggactggaatgatgctaaaaaatcacttgaaattatatctacagcagcaagccattctaatagtgcaataaggaaaatggagaacctaaagaaactcttagagatttatgaaatgttgggagaagaagaagacattgtaaacccttcaaatgaactaataaaagaaggacagatcctcaaactagctgctcggaacacttcagcacaagaacgctaccttttcttattcaacaacatgttgctgtactgtgtgcccaaattcagcttggtaggctctaaattcacagttcgaaccagggttggcattgatggaatgaaaattgtagagactcaaaatgaagaatatccacatactttccaggtgtctgggaaagagagaacactggaactgcaggccagttctgcgcaagacaaagaagaatggatcaaggcccttcaagaaaccatcgatgcttttcatcaaaggcatgaaaccttcagaaatgcaattgcaaaggataatgacattcactcagaggtttctactgctgagctagggaaaagagccccaagatggatccgagataatgaagtgacaatgtgtatgaaatgtaaagaacctttcaatgcactgacacgaaggaggcatcattgtcgagcatgtggatatgtggtttgttggaaatgctccgactacaaagctcaacttgaatatgatggtggtaaattgagcaaagtttgtaaagactgttatcaaatcataagtggattcacagacagtgaagaaaagaaaagaaaaggaattttagagattgaatcagcagaagtatctggaaacagtgtggtgtgcagctttcttcagtatatggagaagtcaaaaccttggcagaaagcttggtgtgtgatccccaagcaagaccctcttgtgctgtacatgtatggtgccccccaggacgtcagagcccaggccaccattccacttctgggctatgtggtggatgaaatgccaaggagcgcagacctgccacacagtttcaaactgacccagtctaagtccgtgcacagctttgctgcagacagtgaggaactgaagcagaagtggctgaaagtcatccttttagctgtcacaggtgagacaccaggtggtccaaatgagcatccagccaccttggatgatcatcctgaacctaagaaaaaatcagaatgctgaactcctccaggaccagccatggtgtggaggtctcaggacttacagctcaagacattcccagctcttcttacacatctgctagcactttatgttgaaaaatataggcccataaatgcatcttttgaggactattttcctatgtttatgtactcttagtgaaattagtgtgcagagtcattctaccgataaagttttgaaataatgtgaaaactggagcattttttgagctattccttgaatatgtgcttttttgtcttgaagaaatggtgtatcaattgattctgtcaccgtcaggttagaatgagcacttccatttaagaaatcctttcatgtcttcttctctttcacatgtaggacctggaacagtttgaaagatatacctccatgttgccaaaatagatccatggtgaaaaatacagggacagttgaggctattgtattaacttatttaatttagtttataaatctctagctgcataaatgatgtctgttcttttaaaacaaaagaaaaaggacaaattgttggtgttcagatttccgatttataaagaaaagataacttgtttttgtagaaatactcctaagaatgtcttaagtatatagcaattatgtatatatagtattaaatatatatattatacatgcttttaggttcacattcatctctaatttattttttaaatataaagcatggtttatcgtggaattgagcaatgttctaaactgaagaaatgttttggtgatttatgttttgctgattggcatttgagggtattgatatttttataataagcggtaatttatgtggcatgggatatatttgtgaattccaacagtacttttaaagtaccattttttgtttctgtgcctatttaaaacagtgcctctcttagaaggtgctattaatataagatgagggttcagttaatgcttcagtcttgattattctaagattaaagtgcattttggtcactgggacagtcaaagtcatacaggttattttaccgtttacaatcctataattattgcagtagttaacatcagcatgtacaaacattttcaccaaaacccaaactttatgagacacctgaccttttacagaactaggatatgtggaaaccacatttatcgtaatgtttttcttttccgtaagataatcgagcatggttaaataaggtctctatataatgaacacttaagataactgtatgggccttttcctttgtcggaatgaaacaaaatccacatgtgataacctatgtttggggtgggggctggtcacatgattccttgtcatgaaggctgctcttcactcttttgtacttgtgattaaaatctcacactaagtttactatttaacttaatcctttttctcaaattaaacctttttttatactgtcataccccaaacattgtcactttttaatgtaccagtctgctagaaatctacaagaatgatcccactatctttagtatgtaaggattacaccttagatatagaatagaatttgagactgccacacatttattcaggccttgttactttaagaaatatcttattttttccaccccaaaggagcaagtgaaccaattattgctgacataataggttcccttcctccataaaaggattatcagccatgatcattaacattaaaccaaatagatggagccaaaaagagataaaagtagcttcttaggccctattaaatcagggaaagactagaagaaaatttacattgcttctcttttttaatggccagcggggtatgtgtgtgatgtatactcagagtggttttttggaaaattaaactgtagctatagatgatgctttggttttcttaatctcaagaaaagagaagcaatggaaatacagaatgattaactggggaagaggacttttgtaagtgtgactagaacaatggtaatgtatgggccaatgggaagatttataagtcagattatttttgaaaactatttttaaaagcaagaagactacactttccctaccaaaacagaagtaacatggacacacttaagttttggctcaataaatatcaatgttatttaacttagatcattgaaagaatactcatgtaaagataatgtttattatcatgctcttaacagtcattatctttaattttttaaatgagaagcattaatactagaagagaatttctggttatccggtcaccatattcactttccaccccacattcttcagctaaacgcaaagagaagcagtgaaacagccttacccgcttctctcttattaaagaatcactgatgtttttactcaatgaaaggtaaagtaatacccttagccatttattaaacaattcaaccaagagacctcaaagtgtgattgatgataagaataatcaatgccttttcccttccaacatacttgagcagtcatgacaacctaaaaatatcattggttgctttcccattaaaaccaacgttccctgtgggtcttaattctttattttcactcatttggtgctttccaagtcatcttttctttaaagtgcccttcctccaaactttaaaaagtacttccttgacaaaatttctattcattataaaacatttcaatattttaagcttaaattttgcttttgctgaaagcctaccatttggcgtgttaagtatgaaatatagtgcagacttttatcttggttttaagtggggctcaataaaaaacaccagccacttttgtaataatggcatcacagtgtcatcatgtatgcaagcaataaaactctttagggtatggttttatactgaaaatttaatatgaaggccccttcccacaagaatatagataattattaactttctagatgtgatacggtaattcgaattgcagagtataaggaagggaaatgggaaggggcatcattccttggattttaaataactatcaagaacatttttactttaacaaagaaaatggatagaaaaagcacattttgttttccctgaagtttaatttgacatcaggtttgtgtacttatcttcactaggtgacttaacttaccccaatttttttaaaaattattaaactttttacagaaactaaccttttaaatgtaccctttccccatatatatatacgcacacgtttggattttttttttttaagaacacttgttctagttataaatatataaagaaaacgataaagtttgtggtactgcagggttgttaaagattctttgatgccttctaaaaacttttgtcaaaaatacttttgagttcacaattctgttttacttttccttgtccttactttttggaaacagggtggttgcttttatttgttttctggttatattcaaagccttaagttcttaatctgagcatattgtctgtgataaatttctgatgatctttctggactagatacaacctgagtagcaagcaccaaccggagcaagtaaacttctagggaacaagcgtcttgggttttataggtatctttgctataatgcagaatagattaatgaagatttcctatatcatatgatatttgtgttagtgggtctaagattaagcacatgatatttataagctaaaattaactcaaaagtcaagaatgtcttaatgttttcattcttaaattttgtattctccaagaatgtattagtatatgaactgtggccaaccagttcctattcttcagactgtattgacatctgtagtggatcatgttgcttcttcattcttaccaattttattagaatcaaacttcttgttatttgcatactattatctactatagattctcagctttagaaaatgactatgatacataaagaccactaggtcaacttaaaaaaccctttctgtgaatttatacatgtatgtatatatgtaaaaacactgttgatttgcaattctgtctttccatagaaatgaactttttctatcgaaattgtttaacttaaatattttaacataaattatttacatggatctttatgtataattcatccttatatataccccttaatcacgtagtcatgagaagataactttgctttctttacagaaagggcagagaggaataagataagaaactgaaacaagcaagaatgaagagagatgtgggggagagactgctggtctccagaccacagcaatgtgttttaagataagatgaaatattttaactgcagaagggatataaaatctatgtaattacatgctgatgggatccattgcacccaggtttttgaccttggcctgtaaatgctagactatgatatcttgttattctttttctcctttgggcttttaaaaaataatttcattctcagatcattttctgtactgtttactgaggcaaaaaaaaaaaaaatctgaagtcaatcatggtcttctactttctggactgagcatttggcagaatgcagtatcttttcctgtattttgacatgaaatagcacatggcttctacaagatagttttaacttgttggggtcaccgggagttatatgatggtcaaccccttttcccaaaattcattgtggtagttttagtggaaaacgtaaatcaagaaatctcatatcatactttaataaataaataccaaatacatagtgacatataggtttgggaagaaactagtctgtggggaccattataagagaatcacattatatattacacagtatatggatattggaatgtatcacttgtggggggttctcttcattagcaaaacagtcatgtctgtctgtatataagacttttttttttttaaccaaactagcatttcattttgtgagtgacaattgacattttaaaataagcataggccgggcatagtggctcatgcctgtaatcccagcccttgggaggccgaggtgggcagatcacttcaggtcaggagtttgagaccagcctggccaacatggtgaaaccctgtctctactaaataaaaataaaacaaaataagtgtatctgggccaggcacggtagcccatgcctgtaatcccagcactttgggaggccgaggagttcgagaccagcctggccaacatggcaaaaccctgtctctacaaaaattagccaggtgtggtggcacatgcctgtaatcccagctactcgggaggttgaggcaggagaattgcttgaacccgggagacagaggttgcagtgagccgagattgcaccactgcactccggcctgggtgacagagcaagacttcgactcaaaaaataaaataagcgtatctggatttttcttttgaattcttgactgataagtttgagaatgtatgtttttggaattttacagttgactcaagtgtgaaagtatacacaagtaatttttcttttctagctatgtgaatgtaaaatacttgcagataatgtatatattgtgtaatatatgtatatttggtcataaaagcagataattggaaacattgtaaaattaagcactttaattcctattaaatattaaacatttgtatcttgtaaataaacacatccttaaattaattcc

SEQ ID NO: 7518 - protein, 766 aa, Homo sapiens
MEEIKPASASCVSKEKPSKVSDLISRFEGGSSLSNYSDLKKESAVNLNAPRTPGRHGLTTTPQQKLLSQHLPQRQGNDTDKTQGAQTCVANGVMAAQNQMECEEEKAATLSSDTSIQASEPLLDTHIVNGERDETATAPASPTTDSCDGNASDSSYRTPGIGPVLPLEERGAETETKVQERENGESPLELEQLDQHHEMKETNEQKLHKIANELLLTERAYVNRLDLLDQVFYCKLLEEANRGSFPAEMVNKIFSNISSINAFHSKFLLPELEKRMQEWETTPRIGDILQKLAPFLKMYGEYVKGFDNAMELVKNMTERIPQFKSVVEEIQKQKICGSLTLQHHMLEPVQRIPRYEMLLKDYLRKLPPDSLDWNDAKKSLEIISTAASHSNSAIRKMENLKKLLEIYEMLGEEEDIVNPSNELIKEGQILKLAARNTSAQERYLFLFNNMLLYCVPKFSLVGSKFTVRTRVGIDGMKIVETQNEEYPHTFQVSGKERTLELQASSAQDKEEWIKALQETIDAFHQRHETFRNAIAKDNDIHSEVSTAELGKRAPRWIRDNEVTMCMKCKEPFNALTRRRHHCRACGYVVCWKCSDYKAQLEYDGGKLSKVCKDCYQIISGFTDSEEKKRKGILEIESAEVSGNSVVCSFLQYMEKSKPWQKAWCVIPKQDPLVLYMYGAPQDVRAQATIPLLGYVVDEMPRSADLPHSFKLTQSKSVHSFAADSEELKQKWLKVILLAVTGETPGGPNEHPATLDDHPEPKKKSEC

SEQ ID NO: 7519 - DNA, 1437 bp, Homo sapiens
caaagacagcgattgttacccaataagcagtagtcacacacttctaccaatcgccttaggagggctggttaccatggaatccaccatctgttcactccccaccggaatgtgattatccttgctgggctgggaagtggggaaagcaggggagcctgtgctgggtgagattatctgcaatggaccgggttaatgggaggcttgctttggctcgctggaagaacaaatgaagggagttttacttcaaccatttgtgacttctggccaagaggaataaattcagcttttataaggcagcagtacctgtccaaagatcgctttagttccaccttgctccacaagcagcacaaccacactggttggtgagaatgtatctgaagaagaggctcagggaataaatgggaacaggccagcaaaacactcagctgcaagtccaaagccacaagctcattatcaaattatagtgatttgaagaaagagtctgctgtgaacctaaatgctcctagaaccccaggaaggcatggattgacaaccacacctcaacaaaaactcctctcccagcacttgccacagaggcagggaaatgatacagataagactcagggtgcacagacttgtgtggccaacggtgtaatggcagcacaaaaccagatggaatgtgaggaggagaaagctgccactcttagctcagatacttctattcaagcttctgaacccttgcttgatacgcacatagtgaatggagaaagagatgaaactgccacagctcctgcatcacccacaacagacagctgtgatggaaatgcttctgacagtagctacaggactccaggcataggcccagtgctccccctagaagaaagaggggcagaaacagaaaccaaggtacaagagagggaaaatggggaaagccctctggaactggagcagctggaccagcaccatgagatgaaggtagagcatgagactagctcatgagcagggaaaaccctgcctattcgattgttgtcttaaaactctttatttattgcacccctgaaatgtatgaatcagatcacccacactggcagttaaacgattttcaagctctggctgctgattagcatttcccctatgctctaagcagatatttcactttttcttttcatgtagtttctgttaatatctctgttgtaatttcaggagtcagaacagtgtggaaactttaatataggaaatccacaaatgtattgtttttacatagaaagaaaatgttccttgttgctctagatgttggtgctgtatccctaatacttacgggccaagcaagaagaaattgtataatctttgttgttcagaagtttctaatagaataaataggcctgtaagatgaacttgccactagtaaatgttacttttaaggacatgaatatggaagtattaaattattcaacagattat

SEQ ID NO: 7520 - protein, 57 aa, Homo sapiens
MGGLLWLAGRTNEGSFTSTICDFWPRGINSAFIRQQYLSKDRFSSTLLHKQHNHTGW

SEQ ID NO: 7521 - DNA, 599 bp, Homo sapiens
catggaatccaccatctgttcactccccaccggaatgtgattatccttgctgggctgggaagtggggaaagcaggggagcctgtgctgggtgagattatctgcaatggaccgggttaatgggaggcttgctttggctcgctggaagaacaaatgaagggagttttacttcaaccatttgtgacttctggccaagaggaataaattcagcttttataaggcagcagtacctgtccaaagatcgctttagttccaccttgctccacaagcagcacaaccacactggttggtgagaatgtatctgaagaagaggctcagggaataaatgggaacaggccagcaaaacactcagctgcaagtccaaagccacaagtgcctccaaagccattacacctgcagaattcaccttcgtccaatatacaccaaacccccaggcataaagctttacctagtgcaaaaccaaggatggaggaaattaaacctgcctctgcttcttgtgtctcaaaagaaaaacccagtaaggtatcagatctcatcagtcgctttgaaggaggcagaggatctgttgaggatctttccaccagggaatccagagactgat

SEQ ID NO: 7522 - protein, 91 aa, Homo sapiens
MGTGQQNTQLQVQSHKCLQSHYTCRIHLRPIYTKPPGIKLYLVQNQGWRKLNLPLLLVSQKKNPVRYQISSVALKEAEDLLRIFPPGNPET

SEQ ID NO: 7523 - DNA, 415 bp, Homo sapiens
ccaggctggagtgcagtggcgcagtcttggctcactgcaacctctgcctctcaggctgaaacgatcctcccacctcagcctccacagtagccaggacttacaggcacacaccaccatgcctggctactttttatatttttatagagatgggatttctccatgtcggtcaggctggtctcgaactcctgacttcaggtgattcgcccgcctctgcctcccaaagcgctgggattacaggcaagattgatgtcttaatgtgaagggtcctttatgcaagctagaggttttgaggttccccctccccatcgagccttgcagttccattaaaggattttaagcaagggagtaataaaattcgttatatcattgaatgaataaaatagtcagactttttatttgtaggagaaaaattgta

SEQ ID NO: 7524 - protein, 37 aa, Homo sapiens
MGFLHVGQAGLELLTSGDSPASASQSAGITGKIDVLM

SEQ ID NO: 7525 - DNA, 1834 bp, Homo sapiens
gtgatggagagtgctgttatgatagatgaatctaggaaagcctctttggagatgtgatacctgaacagaaccccgaatgataagaagaaataccagtgttttaggagagattgtcctaagcagagaacagcagctgcaaagaccccaagacacatacacttggttattaagaatgggagcagcaaggagtatggcaagaacacagtgattttcccttgagtgtgtgaggaagccctcagagtttgtgactgacttgtagaggttctagtggaggggatcagagtggaaacaaagagaccagttaaaaaggtatggcagcatgaataaaaaagttttgagagtattcattatgccttccaaataaaaaactctttggttcataatttgttcataaattaaggactggctacactgtactatttaaaaatgttaagaaacatcaataagtaaaaatgttaggaagagatgataaatacgtaagtattatatctaactaagtctttactaactagtcacattattaaacagtgcaaggatcaagaaaagttaagcgttgaaaaataaataaataagttataaataaaataaacagcccaaggaaatgttccagtccccataggtagactcggggtcatcttctttatttaaatctttatttaaatgtggatagcatcccaagagacttgggtctacactaagaatattcaaatccatgtttctgaaaccatcagagatagaaaaaaaaagtagcgaatatcccttttcaactggaataaacttgtcttaattctagaacttttccataccaatgttttcatgcttcctttgtattttatcttttagctcattatcaaattatagtgatttgaagaaagagtctgctgtgaacctaaatgctcctagaaccccaggaaggcatggattgacaaccacacctcaacaaaaactcctctcccagcacttgccacagaggcagggaaatgatacagataagactcagggtgcacagacttgtgtggccaacggtgtaatggcagcacaaaaccagatggaatgtgaggaggagaaagctgccactcttagctcagatacttctattcaagcttctgaacccttgcttgatacgcacatagtgaatggagaaagagatgaaactgccacagctcctgcatcacccacaacagacagctgtgatggaaatgcttctgacagtagctacaggactccaggcataggcccagtgctccccctagaagaaagaggggcagaaacagaaaccaaggtacaagagagggaaaatggggaaagccctctggaactggagcagctggaccagcaccatgagatgaaggtagagcatgagactagctcatgagcagggaaaaccctgcctattcgattgttgtcttaaaactctttatttattgcacccctgaaatgtatgaatcagatcacccacactggcagttaaacgattttcaagctctggctgctgattagcatttcccctatgctctaagcagatatttcactttttcttttcatgtagtttctgttaatatctctgttgtaatttcaggagtcagaacagtgtggaaactttaatataggaaatccacaaatgtattgtttttacatagaaagaaaatgttccttgttgctctagatgttggtgctgtatccctaatacttacgggccaagcaagaagaaattgtataatctttgttgttcagaagtttctaatagaataaataggcctgtaagatgaacttgccactagtaaatgttacttttaaggacatgaatatggaagtattaaattattcaacagat

SEQ ID NO: 7526 - protein, 188 aa, Homo sapiens
MFSCFLCILSFSSLSNYSDLKKESAVNLNAPRTPGRHGLTTTPQQKLLSQHLPQRQGNDTDKTQGAQTCVANGVMAAQNQMECEEEKAATLSSDTSIQASEPLLDTHIVNGERDETATAPASPTTDSCDGNASDSSYRTPGIGPVLPLEERGAETETKVQERENGESPLELEQLDQHHEMKVEHETSS

SEQ ID NO: 7527 - DNA, 569 bp, Homo sapiens
acaactcacaagcagaggtaggggtatgttcaacctgatcgtcctcaaagtaatgccaattaaaatgagacaaagaagacagacaaatagccagcagttccacagcgactcaggggactgccagggttcaaatcctgctcctgctagatgccacttctgctgctcttcattgctgccctagacaaggccaggccctgcggcgtgctgcgagccttccttccgttatctttaccagctctacatggtcattcacagatgagaaagctgaagatcagagagctcacacatttcccacaaggttacacagtcagtaagagacactatcaggattccaatgacctgctgttaaagttcatctcttattcactcattgcctccctcaaggctgaagagtggggtggaggggagaccagcagagctactgagctcaatctgcctccttggccctcccagcccagagctctgccagcggtggtaggaggagtgtgttctggtagatatcatggagcaggagtccctagcaccaagaagctgagatccggaagaggcgccccaaaaaatcagcctgg

SEQ ID NO: 7528 - protein, 139 aa, Homo sapiens
MPLLLLFIAALDKARPCGVLRAFLPLSLPALHGHSQMRKLKIRELTHFPQGYTVSKRHYQDSNDLLLKFISYSLIASLKAEEWGGGETSRATELNLPPWPSQPRALPAVVGGVCSGRYHGAGVPSTKKLRSGRGAPKNQ

SEQ ID NO: 7529 - DNA, 1503 bp, Homo sapiens
ttcctgcgggcttttccccggtcccttgagacctcagccatgaggagttgctgtttgtttgacaaagaaacccaagtgggggcagagggcagaggctggaggcagggccttgcccagagatgcctccaccgctgcctaagtggctgctgactgatgttgagggaacagacaggagaaatgcatccattcctcagggacagagacacctgcacctccccccactgcaggccccgcttgtccagcgcctagtggggtctccctctcctgcctactcacgataaataatcggcccacagctcccaccccacccccttcagtgcccaccaacatcccattgccctggttatattctcacgggcagtagctgtggtgaggtgggttttcttcccatcactggagcaccaggcacgaacccacctgctgagagacccaaggaggaaaaacagacaaaaacagcctcacagaagaatatgacagctgtccctgtcaccaagctcacagttcctcgccctgggtctaaggggttggttgaggtggaagccctccttccacggatccatgtagcaggactgaattgtccccagtttgcagaaaagcacctgccgacctcgtcctccccctgccagtgccttacctcctgcccaggagagccagccctccctgtcctcctcggatcaccgagagtagccgagagcctgctcccccaccccctccccaggggagagggtctggagaagcagtgagccgcatcttctccatctggcagggtgggatggaggagaagaattttcagaccccagcggctgagtcatgatctccctgccgcctcaatgtggttgcaaggccgctgttcacccacagggctaagagctagcgctgccgcaccccagagtgtgggaagggagagcggggcagtctcgggtggctagtcagagagagtgtttgggggttccgtgatgtagggtaaggtgccttcttattctcactccaccacctaggccactcctccaaaggaagtctaggagctgggaggaaaagaaaagaggggaaaatgagtttttatggggctgaacggggagaaaaggtcatcatcgattctactttagaatgagagtgtgaaatagacatttgtaaatgtaaaacttttaaggtatatcattataactgaaggagaaggtgccccaaaatgcaagattttccacaagattcccagagacaggaaaatcctctggctggctaactggaagcatgtaggagaatccaagcgaggtcaacagagaaggcaggaatgtgtggcagatttagtgaaagctagagatatggcagcgaaaggatgtaaacagtgcctgctgaatgatttccaaagagaaaaaaagtttgccagaagtttgtcaagtcaaccaatgtagaaagctttgcttatggtaataaaaatggctcatacttatatagcacttactttgttgcaagtactgctgtaaataaatgctttatgcaaaccaa

SEQ ID NO: 7530 - protein, 90 aa, Homo sapiens [sequence omitted]

SEQ ID NO: 7531 - DNA, 2250 bp, Homo sapiens
cagggatggaggcaatggcggccagcacttccctgccgcctcaatgtggttgcaaggccgctgttcacccacagggctaagagctagcgctgccgcaccccagagtgtgggaagggagagcggggcagtctcgggtggctagtcagagagagtgtttgggggttccgtgatgtagggtaaggtgccttcttattctcactccaccacccaaaagtcaaaaggtgcctgtgaggcaggggcggagtgatacaacttcaagtgcatgctctctgcagccagcccagcccagctggtgggaagcgtctgtccgtttactccaaggtggggtctttgtgagagtgagctgtaggtgtgcgggaccggtacagaaaggcgttcttcgaggtggatcacagaggcttcttcagatcagtgcttgagtttggggaatgcggccgcattccctgagtcaccaggaatgttaaagtcagtgggaacgtgactgccccaactcctggaagctgtgtccttgcacctgcatccgtagttccctgaaaacccagagaggaatcagacttcacactgcaagagccttggtgtccacctggccccatgtctctcagaattcttcaggtggaaaaacatctgaaagccacgttccttactgcagaatagcatatatatcgcttaatcttaaatttattagatatgagttgttttcagactcagactccatttgtattatagtctaatatacagggtagcaggtaccactgatttggagatatttatggggggagaacttacattgtgaaacttctgtacattaattattattgctgttgttattttacaagggtctagggagagacccttgtttgattttagctgcagaacgtattggtccagcttgctcttcagtgggagaaaacacttgtaagttgctaaacgagtcaatcccctcattcaggaaaactgacagaggagggcgtgactcacccaagcatatataactagctagaagtgggccaggacaggcccggcgcggtggctcacgcctgtaatcccagcagtttgggaggtcgaggtaggtggatcacctgaggtcgggagttcgagaccaacctgaccaacatggagaaaccctgtctctattaaaaatacaaaaaaaaaaaaaaaaaaaatagccgggcatggtggcgcaagcctgtaatcccagctactcaggaggctgaggcagaagaattgaacccaggaggtggaggttgcagtgagctgagatcgtgccgttactctccaacctggacaacaagagcgaaactccgtcttagaagtggaccaggacaggaccagattttggagtcatggtccggtgtccttttcactacaccatgtttgagctcagacccccactctcattccccaggtggctgacccagtccctgggggaagccctggatttcagaaagagcaagtctggatctgggaccctttccttccttccctggcttgtaactccaccaacccatcagaaggagaaggaaggagactcacctctgcctcaatgtgaatcagaccctaccccaccacgatgtggccctggcctgctgggctctccacctcagccttggataatgctgttgcctcatctataacatgcatttgtctttgtaatgtcaccaccttcccagctctccctctggccctgccttcttcggggaactcctggaaatatcagttactcagccctgggccccaccacctaggccactcctccaaaggaagtctaggagctgggaggaaaagaaaagaggggaaaatgagtttttatggggctgaacggggagaaaaggtcatcatcgattctactttagaatgagagtgtgaaatagacatttgtaaatgtaaaacttttaaggtatatcattataactgaaggagaaggtgccccaaaatgcaagattttccacaagattcccagagacaggaaaatcctctggctggctaactggaagcatgtaggagaatccaagcgaggtcaacagagaaggcaggaatgtgtggcagatttagtgaaagctagagatatggcagcgaaaggatgtaaacagtgcctgctgaatgatttccaaagagaaaaaaagtttgccagaagtttgtcaagtcaaccaatgtagaaagctttgcttatggtaataaaaatggctcatacttatatagcacttactttgttgcaagtactgctgtaaataaatgctttatgcaaaccaa

SEQ ID NO: 7532 - protein, 96 aa, Homo sapiens
MVRCPFHYTMFELRPPLSFPRWLTQSLGEALDFRKSKSGSGTLSFLPWLVTPPTHQKEKEGDSPLPQCESDPTPPRCGPGLLGSPPQPWIMLLPHL

SEQ ID NO: 7533 - DNA, 2189 bp, Homo sapiens
ctgttcttacagggatggaggcaatggcggccagcacttccctgcctgaccctggagactttgaccggaacgtgccccggatctgtggggttgtttgggggttccgtgatgtagggtaaggtgccttcttattctcactccaccacccaaaagtcaaaaggtgcctgtgaggcaggggcggagtgatacaacttcaagtgcatgctctctgcagccagcccagcccagctggtgggaagcgtctgtccgtttactccaaggtggggtctttgtgagagtgagctgtaggtgtgcgggaccggtacagaaaggcgttcttcgaggtggatcacagaggcttcttcagatcagtgcttgagtttggggaatgcggccgcattccctgagtcaccaggaatgttaaagtcagtgggaacgtgactgccccaactcctggaagctgtgtccttgcacctgcatccgtagttccctgaaaacccagagaggaatcagacttcacactgcaagagccttggtgtccacctggccccatgtctctcagaattcttcaggtggaaaaacatctgaaagccacgttccttactgcagaatagcatatatatcgcttaatcttaaatttattagatatgagttgttttcagactcagactccatttgtattatagtctaatatacagggtagcaggtaccactgatttggagatatttatggggggagaacttacattgtgaaacttctgtacattaattattattgctgttgttattttacaagggtctagggagagacccttgtttgattttagctgcagaacgtattggtccagcttgctcttcagtgggagaaaacacttgtaagttgctaaacgagtcaatcccctcattcaggaaaactgacagaggagggcgtgactcacccaagcatatataactagctagaagtgggccaggacaggcccggcgcggtggctcacgcctgtaatcccagcagtttgggaggtcgaggtaggtggatcacctgaggtcgggagttcgagaccaacctgaccaacatggagaaaccctgtctctattaaaaatacaaaaaaaaaaaaaaaaaaaatagccgggcatggtggcgcaagcctgtaatcccagctactcaggaggctgaggcagaagaattgaacccaggaggtggaggttgcagtgagctgagatcgtgccgttactctccaacctggacaacaagagcgaaactccgtcttagaagtggaccaggacaggaccagattttggagtcatggtccggtgtccttttcactacaccatgtttgagctcagacccccactctcattccccaggtggctgacccagtccctgggggaagccctggatttcagaaagagcaagtctggatctgggaccctttccttccttccctggcttgtaactccaccaacccatcagaaggagaaggaaggagactcacctctgcctcaatgtgaatcagaccctaccccaccacgatgtggccctggcctgctgggctctccacctcagccttggataatgctgttgcctcatctataacatgcatttgtctttgtaatgtcaccaccttcccagctctccctctggccctgccttcttcggggaactcctggaaatatcagttactcagccctgggccccaccacctaggccactcctccaaaggaagtctaggagctgggaggaaaagaaaagaggggaaaatgagtttttatggggctgaacggggagaaaaggtcatcatcgattctactttagaatgagagtgtgaaatagacatttgtaaatgtaaaacttttaaggtatatcattataactgaaggagaaggtgccccaaaatgcaagattttccacaagattcccagagacaggaaaatcctctggctggctaactggaagcatgtaggagaatccaagcgaggtcaacagagaaggcaggaatgtgtggcagatttagtgaaagctagagatatggcagcgaaaggatgtaaacagtgcctgctgaatgatttccaaagagaaaaaaagtttgccagaagtttgtcaagtcaaccaatgtagaaagctttgcttatggtaataaaaatggctcatacttatatagcacttactttgttgcaagtactgctgtaaataaatgctttatgcaaaccaa

SEQ ID NO: 7534 - protein, 34 aa, Homo sapiens
MEAMAASTSLPDPGDFDRNVPRICGVVWGFRDVG

SEQ ID NO: 7535 - DNA, 5016 bp, Homo sapiens
gtgtgcgccgggagcgcggaacagcttgtccacccgccggccggaccaggtgcgaacccgggagcagcgggaaagggggtctcaggatagggactcggggtcggggcgtctgggataccggggcctgagcgcccggctgcgagcattagagtctaagtctcagcggtaaacttggctactgaggtccgggctgtcgtgccatgaggctgggacactaaggggcactgaggtttgagaaagctgaagttcgtgccaggctggcgaggggagcagcgacatcctcggcgcttaggagaaatgctccgctaacacagtgcttagcacttgggcaacaagaagtatttgtttccttcttctgtcggggcgccttggcatggagtggaggaataagaaaaggagcgattggctgtcgatggtgctcagaactgctggagtggaggaagcctttgggtctgaagtgtctgtgagacctcacagaagagcacccctgggctccacttacctgccccctgctccttcagggatggaggcaatggcggccagcacttccctgcctgaccctggagactttgaccggaacgtgccccggatctgtggggtgtgtggagaccgagccactggctttcacttcaatgctatgacctgtgaaggctgcaaaggcttcttcaggcgaagcatgaagcggaaggcactattcacctgccccttcaacggggactgccgcatcaccaaggacaaccgacgccactgccaggcctgccggctcaaacgctgtgtggacatcggcatgatgaaggagttcattctgacagatgaggaagtgcagaggaagcgggagatgatcctgaagcggaaggaggaggaggccttgaaggacagtctgcggcccaagctgtctgaggagcagcagcgcatcattgccatactgctggacgcccaccataagacctacgaccccacctactccgacttctgccagttccggcctccagttcgtgtgaatgatggtggagggagccatccttccaggcccaactccagacacactcccagcttctctggggactcctcctcctcctgctcagatcactgtatcacctcttcagacatgatggactcgtccagcttctccaatctggatctgagtgaagaagattcagatgacccttctgtgaccctagagctgtcccagctctccatgctgccccacctggctgacctggtcagttacagcatccaaaaggtcattggctttgctaagatgataccaggattcagagacctcacctctgaggaccagatcgtactgctgaagtcaagtgccattgaggtcatcatgttgcgctccaatgagtccttcaccatggacgacatgtcctggacctgtggcaaccaagactacaagtaccgcgtcagtgacgtgaccaaagccggacacagcctggagctgattgagcccctcatcaagttccaggtgggactgaagaagctgaacttgcatgaggaggagcatgtcctgctcatggccatctgcatcgtctccccagatcgtcctggggtgcaggacgccgcgctgattgaggccatccaggaccgcctgtccaacacactgcagacgtacatccgctgccgccacccgcccccgggcagccacctgctctatgccaagatgatccagaagctagccgacctgcgcagcctcaatgaggagcactccaagcagtaccgctgcctctccttccagcctgagtgcagcatgaagctaacgccccttgtgctcgaagtgtttggcaatgagatctcctgactaggacagcctgtggcggtgcctgggtggggctgctcctccagggccacgtgccaggcccggggctggcggctactcagcagccctcctcaccccgtctggggttcagcccctcctctgccacctcccctatccacccagcccattctctctcctgtccaacctaacccctttcctgcgggcttttccccggtcccttgagacctcagccatgaggagttgctgtttgtttgacaaagaaacccaagtgggggcagagggcagaggctggaggcagggccttgcccagagatgcctccaccgctgcctaagtggctgctgactgatgttgagggaacagacaggagaaatgcatccattcctcagggacagagacacctgcacctccccccactgcaggccccgcttgtccagcgcctagtggggtctccctctcctgcctactcacgataaataatcggcccacagctcccaccccacccccttcagtgcccaccaacatcccattgccctggttatattctcacgggcagtagctgtggtgaggtgggttttcttcccatcactggagcaccaggcacgaacccacctgctgagagacccaaggaggaaaaacagacaaaaacagcctcacagaagaatatgacagctgtccctgtcaccaagctcacagttcctcgccctgggtctaaggggttggttgaggtggaagccctccttccacggatccatgtagcaggactgaattgtccccagtttgcagaaaagcacctgccgacctcgtcctccccctgccagtgccttacctcctgcccaggagagccagccctccctgtcctcctcggatcaccgagagtagccgagagcctgctcccccaccccctccccaggggagagggtctggagaagcagtgagccgcatcttctccatctggcagggtgggatggaggagaagaattttcagaccccagcggctgagtcatgatctccctgccgcctcaatgtggttgcaaggccgctgttcacccacagggctaagagctagcgctgccgcaccccagagtgtgggaagggagagcggggcagtctcgggtggctagtcagagagagtgtttgggggttccgtgatgtagggtaaggtgccttcttattctcactccaccacccaaaagtcaaaaggtgcctgtgaggcaggggcggagtgatacaacttcaagtgcatgctctctgcagccagcccagcccagctggtgggaagcgtctgtccgtttactccaaggtggggtctttgtgagagtgagctgtaggtgtgcgggaccggtacagaaaggcgttcttcgaggtggatcacagaggcttcttcagatcagtgcttgagtttggggaatgcggccgcattccctgagtcaccaggaatgttaaagtcagtgggaacgtgactgccccaactcctggaagctgtgtccttgcacctgcatccgtagttccctgaaaacccagagaggaatcagacttcacactgcaagagccttggtgtccacctggccccatgtctctcagaattcttcaggtggaaaaacatctgaaagccacgttccttactgcagaatagcatatatatcgcttaatcttaaatttattagatatgagttgttttcagactcagactccatttgtattatagtctaatatacagggtagcaggtaccactgatttggagatatttatggggggagaacttacattgtgaaacttctgtacattaattattattgctgttgttattttacaagggtctagggagagacccttgtttgattttagctgcagaacgtattggtccagcttgctcttcagtgggagaaaacacttgtaagttgctaaacgagtcaatcccctcattcaggaaaactgacagaggagggcgtgactcacccaagcatatataactagctagaagtgggccaggacaggcccggcgcggtggctcacgcctgtaatcccagcagtttgggaggtcgaggtaggtggatcacctgaggtcgggagttcgagaccaacctgaccaacatggagaaaccctgtctctattaaaaatacaaaaaaaaaaaaaaaaaaaatagccgggcatggtggcgcaagcctgtaatcccagctactcaggaggctgaggcagaagaattgaacccaggaggtggaggttgcagtgagctgagatcgtgccgttactctccaacctggacaacaagagcgaaactccgtcttagaagtggaccaggacaggaccagattttggagtcatggtccggtgtccttttcactacaccatgtttgagctcagacccccactctcattccccaggtggctgacccagtccctgggggaagccctggatttcagaaagagcaagtctggatctgggaccctttccttccttccctggcttgtaactccaccaacccatcagaaggagaaggaaggagactcacctctgcctcaatgtgaatcagaccctaccccaccacgatgtggccctggcctgctgggctctccacctcagccttggataatgctgttgcctcatctataacatgcatttgtctttgtaatgtcaccaccttcccagctctccctctggccctgccttcttcggggaactcctggaaatatcagttactcagccctgggccccaccacctaggccactcctccaaaggaagtctaggagctgggaggaaaagaaaagaggggaaaatgagtttttatggggctgaacggggagaaaaggtcatcatcgattctactttagaatgagagtgtgaaatagacatttgtaaatgtaaaacttttaaggtatatcattataactgaaggagaaggtgccccaaaatgcaagattttccacaagattcccagagacaggaaaatcctctggctggctaactggaagcatgtaggagaatccaagcgaggtcaacagagaaggcaggaatgtgtggcagatttagtgaaagctagagatatggcagcgaaaggatgtaaacagtgcctgctgaatgatttccaaagagaaaaaaagtttgccagaagtttgtcaagtcaaccaatgtagaaagctttgcttatggtaataaaaatggctcatacttatatagcacttactttgttgcaagtactgctgtaaataaatgctttatgcaaaccaa

SEQ ID NO: 7536 - protein, 477 aa, Homo sapiens
MEWRNKKRSDWLSMVLRTAGVEEAFGSEVSVRPHRRAPLGSTYLPPAPSGMEAMAASTSLPDPGDFDRNVPRICGVCGDRATGFHFNAMTCEGCKGFFRRSMKRKALFTCPFNGDCRITKDNRRHCQACRLKRCVDIGMMKEFILTDEEVQRKREMILKRKEEEALKDSLRPKLSEEQQRIIAILLDAHHKTYDPTYSDFCQFRPPVRVNDGGGSHPSRPNSRHTPSFSGDSSSSCSDHCITSSDMMDSSSFSNLDLSEEDSDDPSVTLELSQLSMLPHLADLVSYSIQKVIGFAKMIPGFRDLTSEDQIVLLKSSAIEVIMLRSNESFTMDDMSWTCGNQDYKYRVSDVTKAGHSLELIEPLIKFQVGLKKLNLHEEEHVLLMAICIVSPDRPGVQDAALIEAIQDRLSNTLQTYIRCRHPPPGSHLLYAKMIQKLADLRSLNEEHSKQYRCLSFQPECSMKLTPLVLEVFGNEIS

SEQ ID NO: 7537 - DNA, 4653 bp, Homo sapiens
ctgcttgtcaaaaggcggcagcggagccgtgtgcgccgggagcgcggaacagcttgtccacccgccggccggaccagaagcctttgggtctgaagtgtctgtgagacctcacagaagagcacccctgggctccacttacctgccccctgctccttcagggatggaggcaatggcggccagcacttccctgcctgaccctggagactttgaccggaacgtgccccggatctgtggggtgtgtggagaccgagccactggctttcacttcaatgctatgacctgtgaaggctgcaaaggcttcttcaggcgaagcatgaagcggaaggcactattcacctgccccttcaacggggactgccgcatcaccaaggacaaccgacgccactgccaggcctgccggctcaaacgctgtgtggacatcggcatgatgaaggagttcattctgacagatgaggaagtgcagaggaagcgggagatgatcctgaagcggaaggaggaggaggccttgaaggacagtctgcggcccaagctgtctgaggagcagcagcgcatcattgccatactgctggacgcccaccataagacctacgaccccacctactccgacttctgccagttccggcctccagttcgtgtgaatgatggtggagggagccatccttccaggcccaactccagacacactcccagcttctctggggactcctcctcctcctgctcagatcactgtatcacctcttcagacatgatggactcgtccagcttctccaatctggatctgagtgaagaagattcagatgacccttctgtgaccctagagctgtcccagctctccatgctgccccacctggctgacctggtcagttacagcatccaaaaggtcattggctttgctaagatgataccaggattcagagacctcacctctgaggaccagatcgtactgctgaagtcaagtgccattgaggtcatcatgttgcgctccaatgagtccttcaccatggacgacatgtcctggacctgtggcaaccaagactacaagtaccgcgtcagtgacgtgaccaaagccggacacagcctggagctgattgagcccctcatcaagttccaggtgggactgaagaagctgaacttgcatgaggaggagcatgtcctgctcatggccatctgcatcgtctccccagatcgtcctggggtgcaggacgccgcgctgattgaggccatccaggaccgcctgtccaacacactgcagacgtacatccgctgccgccacccgcccccgggcagccacctgctctatgccaagatgatccagaagctagccgacctgcgcagcctcaatgaggagcactccaagcagtaccgctgcctctccttccagcctgagtgcagcatgaagctaacgccccttgtgctcgaagtgtttggcaatgagatctcctgactaggacagcctgtggcggtgcctgggtggggctgctcctccagggccacgtgccaggcccggggctggcggctactcagcagccctcctcaccccgtctggggttcagcccctcctctgccacctcccctatccacccagcccattctctctcctgtccaacctaacccctttcctgcgggcttttccccggtcccttgagacctcagccatgaggagttgctgtttgtttgacaaagaaacccaagtgggggcagagggcagaggctggaggcagggccttgcccagagatgcctccaccgctgcctaagtggctgctgactgatgttgagggaacagacaggagaaatgcatccattcctcagggacagagacacctgcacctccccccactgcaggccccgcttgtccagcgcctagtggggtctccctctcctgcctactcacgataaataatcggcccacagctcccaccccacccccttcagtgcccaccaacatcccattgccctggttatattctcacgggcagtagctgtggtgaggtgggttttcttcccatcactggagcaccaggcacgaacccacctgctgagagacccaaggaggaaaaacagacaaaaacagcctcacagaagaatatgacagctgtccctgtcaccaagctcacagttcctcgccctgggtctaaggggttggttgaggtggaagccctccttccacggatccatgtagcaggactgaattgtccccagtttgcagaaaagcacctgccgacctcgtcctccccctgccagtgccttacctcctgcccaggagagccagccctccctgtcctcctcggatcaccgagagtagccgagagcctgctcccccaccccctccccaggggagagggtctggagaagcagtgagccgcatcttctccatctggcagggtgggatggaggagaagaattttcagaccccagcggctgagtcatgatctccctgccgcctcaatgtggttgcaaggccgctgttcacccacagggctaagagctagcgctgccgcaccccagagtgtgggaagggagagcggggcagtctcgggtggctagtcagagagagtgtttgggggttccgtgatgtagggtaaggtgccttcttattctcactccaccacccaaaagtcaaaaggtgcctgtgaggcaggggcggagtgatacaacttcaagtgcatgctctctgcagccagcccagcccagctggtgggaagcgtctgtccgtttactccaaggtggggtctttgtgagagtgagctgtaggtgtgcgggaccggtacagaaaggcgttcttcgaggtggatcacagaggcttcttcagatcagtgcttgagtttggggaatgcggccgcattccctgagtcaccaggaatgttaaagtcagtgggaacgtgactgccccaactcctggaagctgtgtccttgcacctgcatccgtagttccctgaaaacccagagaggaatcagacttcacactgcaagagccttggtgtccacctggccccatgtctctcagaattcttcaggtggaaaaacatctgaaagccacgttccttactgcagaatagcatatatatcgcttaatcttaaatttattagatatgagttgttttcagactcagactccatttgtattatagtctaatatacagggtagcaggtaccactgatttggagatatttatggggggagaacttacattgtgaaacttctgtacattaattattattgctgttgttattttacaagggtctagggagagacccttgtttgattttagctgcagaacgtattggtccagcttgctcttcagtgggagaaaacacttgtaagttgctaaacgagtcaatcccctcattcaggaaaactgacagaggagggcgtgactcacccaagcatatataactagctagaagtgggccaggacaggcccggcgcggtggctcacgcctgtaatcccagcagtttgggaggtcgaggtaggtggatcacctgaggtcgggagttcgagaccaacctgaccaacatggagaaaccctgtctctattaaaaatacaaaaaaaaaaaaaaaaaaaatagccgggcatggtggcgcaagcctgtaatcccagctactcaggaggctgaggcagaagaattgaacccaggaggtggaggttgcagtgagctgagatcgtgccgttactctccaacctggacaacaagagcgaaactccgtcttagaagtggaccaggacaggaccagattttggagtcatggtccggtgtccttttcactacaccatgtttgagctcagacccccactctcattccccaggtggctgacccagtccctgggggaagccctggatttcagaaagagcaagtctggatctgggaccctttccttccttccctggcttgtaactccaccaacccatcagaaggagaaggaaggagactcacctctgcctcaatgtgaatcagaccctaccccaccacgatgtggccctggcctgctgggctctccacctcagccttggataatgctgttgcctcatctataacatgcatttgtctttgtaatgtcaccaccttcccagctctccctctggccctgccttcttcggggaactcctggaaatatcagttactcagccctgggccccaccacctaggccactcctccaaaggaagtctaggagctgggaggaaaagaaaagaggggaaaatgagtttttatggggctgaacggggagaaaaggtcatcatcgattctactttagaatgagagtgtgaaatagacatttgtaaatgtaaaacttttaaggtatatcattataactgaaggagaaggtgccccaaaatgcaagattttccacaagattcccagagacaggaaaatcctctggctggctaactggaagcatgtaggagaatccaagcgaggtcaacagagaaggcaggaatgtgtggcagatttagtgaaagctagagatatggcagcgaaaggatgtaaacagtgcctgctgaatgatttccaaagagaaaaaaagtttgccagaagtttgtcaagtcaaccaatgtagaaagctttgcttatggtaataaaaatggctcatacttatatagcacttactttgttgcaagtactgctgtaaataaatgctttatgcaaaccaa

SEQ ID NO: 7538 - protein, 427 aa, Homo sapiens; identical to SEQ ID NO: 1073

SEQ ID NO: 7539 - DNA, 4784 bp, Homo sapiens
gggctgtctctgcttgtcaaaaggcggcagcggagccgtgtgcgccgggagcgcggaacagcttgtccacccgccggccggaccagggctcctgaacctagcccagctggacggagaaatggactctagcctcctctgatagcctcatgccaggccccgtgcacattgctttgcttgcctccctcaatcctcatagcttctctttgggaagcctttgggtctgaagtgtctgtgagacctcacagaagagcacccctgggctccacttacctgccccctgctccttcagggatggaggcaatggcggccagcacttccctgcctgaccctggagactttgaccggaacgtgccccggatctgtggggtgtgtggagaccgagccactggctttcacttcaatgctatgacctgtgaaggctgcaaaggcttcttcaggcgaagcatgaagcggaaggcactattcacctgccccttcaacggggactgccgcatcaccaaggacaaccgacgccactgccaggcctgccggctcaaacgctgtgtggacatcggcatgatgaaggagttcattctgacagatgaggaagtgcagaggaagcgggagatgatcctgaagcggaaggaggaggaggccttgaaggacagtctgcggcccaagctgtctgaggagcagcagcgcatcattgccatactgctggacgcccaccataagacctacgaccccacctactccgacttctgccagttccggcctccagttcgtgtgaatgatggtggagggagccatccttccaggcccaactccagacacactcccagcttctctggggactcctcctcctcctgctcagatcactgtatcacctcttcagacatgatggactcgtccagcttctccaatctggatctgagtgaagaagattcagatgacccttctgtgaccctagagctgtcccagctctccatgctgccccacctggctgacctggtcagttacagcatccaaaaggtcattggctttgctaagatgataccaggattcagagacctcacctctgaggaccagatcgtactgctgaagtcaagtgccattgaggtcatcatgttgcgctccaatgagtccttcaccatggacgacatgtcctggacctgtggcaaccaagactacaagtaccgcgtcagtgacgtgaccaaagccggacacagcctggagctgattgagcccctcatcaagttccaggtgggactgaagaagctgaacttgcatgaggaggagcatgtcctgctcatggccatctgcatcgtctccccagatcgtcctggggtgcaggacgccgcgctgattgaggccatccaggaccgcctgtccaacacactgcagacgtacatccgctgccgccacccgcccccgggcagccacctgctctatgccaagatgatccagaagctagccgacctgcgcagcctcaatgaggagcactccaagcagtaccgctgcctctccttccagcctgagtgcagcatgaagctaacgccccttgtgctcgaagtgtttggcaatgagatctcctgactaggacagcctgtggcggtgcctgggtggggctgctcctccagggccacgtgccaggcccggggctggcggctactcagcagccctcctcaccccgtctggggttcagcccctcctctgccacctcccctatccacccagcccattctctctcctgtccaacctaacccctttcctgcgggcttttccccggtcccttgagacctcagccatgaggagttgctgtttgtttgacaaagaaacccaagtgggggcagagggcagaggctggaggcagggccttgcccagagatgcctccaccgctgcctaagtggctgctgactgatgttgagggaacagacaggagaaatgcatccattcctcagggacagagacacctgcacctccccccactgcaggccccgcttgtccagcgcctagtggggtctccctctcctgcctactcacgataaataatcggcccacagctcccaccccacccccttcagtgcccaccaacatcccattgccctggttatattctcacgggcagtagctgtggtgaggtgggttttcttcccatcactggagcaccaggcacgaacccacctgctgagagacccaaggaggaaaaacagacaaaaacagcctcacagaagaatatgacagctgtccctgtcaccaagctcacagttcctcgccctgggtctaaggggttggttgaggtggaagccctccttccacggatccatgtagcaggactgaattgtccccagtttgcagaaaagcacctgccgacctcgtcctccccctgccagtgccttacctcctgcccaggagagccagccctccctgtcctcctcggatcaccgagagtagccgagagcctgctcccccaccccctccccaggggagagggtctggagaagcagtgagccgcatcttctccatctggcagggtgggatggaggagaagaattttcagaccccagcggctgagtcatgatctccctgccgcctcaatgtggttgcaaggccgctgttcacccacagggctaagagctagcgctgccgcaccccagagtgtgggaagggagagcggggcagtctcgggtggctagtcagagagagtgtttgggggttccgtgatgtagggtaaggtgccttcttattctcactccaccacccaaaagtcaaaaggtgcctgtgaggcaggggcggagtgatacaacttcaagtgcatgctctctgcagccagcccagcccagctggtgggaagcgtctgtccgtttactccaaggtggggtctttgtgagagtgagctgtaggtgtgcgggaccggtacagaaaggcgttcttcgaggtggatcacagaggcttcttcagatcagtgcttgagtttggggaatgcggccgcattccctgagtcaccaggaatgttaaagtcagtgggaacgtgactgccccaactcctggaagctgtgtccttgcacctgcatccgtagttccctgaaaacccagagaggaatcagacttcacactgcaagagccttggtgtccacctggccccatgtctctcagaattcttcaggtggaaaaacatctgaaagccacgttccttactgcagaatagcatatatatcgcttaatcttaaatttattagatatgagttgttttcagactcagactccatttgtattatagtctaatatacagggtagcaggtaccactgatttggagatatttatggggggagaacttacattgtgaaacttctgtacattaattattattgctgttgttattttacaagggtctagggagagacccttgtttgattttagctgcagaacgtattggtccagcttgctcttcagtgggagaaaacacttgtaagttgctaaacgagtcaatcccctcattcaggaaaactgacagaggagggcgtgactcacccaagcatatataactagctagaagtgggccaggacaggcccggcgcggtggctcacgcctgtaatcccagcagtttgggaggtcgaggtaggtggatcacctgaggtcgggagttcgagaccaacctgaccaacatggagaaaccctgtctctattaaaaatacaaaaaaaaaaaaaaaaaaaatagccgggcatggtggcgcaagcctgtaatcccagctactcaggaggctgaggcagaagaattgaacccaggaggtggaggttgcagtgagctgagatcgtgccgttactctccaacctggacaacaagagcgaaactccgtcttagaagtggaccaggacaggaccagattttggagtcatggtccggtgtccttttcactacaccatgtttgagctcagacccccactctcattccccaggtggctgacccagtccctgggggaagccctggatttcagaaagagcaagtctggatctgggaccctttccttccttccctggcttgtaactccaccaacccatcagaaggagaaggaaggagactcacctctgcctcaatgtgaatcagaccctaccccaccacgatgtggccctggcctgctgggctctccacctcagccttggataatgctgttgcctcatctataacatgcatttgtctttgtaatgtcaccaccttcccagctctccctctggccctgccttcttcggggaactcctggaaatatcagttactcagccctgggccccaccacctaggccactcctccaaaggaagtctaggagctgggaggaaaagaaaagaggggaaaatgagtttttatggggctgaacggggagaaaaggtcatcatcgattctactttagaatgagagtgtgaaatagacatttgtaaatgtaaaacttttaaggtatatcattataactgaaggagaaggtgccccaaaatgcaagattttccacaagattcccagagacaggaaaatcctctggctggctaactggaagcatgtaggagaatccaagcgaggtcaacagagaaggcaggaatgtgtggcagatttagtgaaagctagagatatggcagcgaaaggatgtaaacagtgcctgctgaatgatttccaaagagaaaaaaagtttgccagaagtttgtcaagtcaaccaatgtagaaagctttgcttatggtaataaaaatggctcatacttatatagcacttactttgttgcaagtactgctgtaaataaatgctttatgcaaaccaa

SEQ ID NO: 7540 - protein, 427 aa, Homo sapiens; identical to SEQ ID NO: 1073

SEQ ID NO: 7541 - DNA, 762 bp, Homo sapiens
tcaggaggctgaggcagaagaattgaacccaggaggtggaggttgcagtgagctgagatcgtgccgttactctccaacctggacaacaagagcgaaactccgtcttagaagtggaccaggacaggaccagattttggagtcatggtccggtgtccttttcactacaccatgtttgagctcagacccccactctcattccccaggtggctgacccagtccctgggggaagccctggatttcagaaagagcaagtctggatctgggaccctttccttccttccctggcttgtaactccaccaacccatcagaaggagaaggaaggagactcacctctgcctcaatgtgaatcagaccctaccccaccacgatgtggccctggcctgctgggctctccacctcagccttggataatgctgttgcctcatctataacatgcatttgtctttgtaatgtcaccaccttcccagctctccctctggccctgccttcttcggggaactctggaagcatgtaggagaatccaagcgaggtcaacagagaaggcaggaatgtgtggcagatttagtgaaagctagagatatggcagcgaaaggatgtaaacagtgcctgctgaatgatttccaaagagaaaaaaagtttgccagaagtttgtcaagtcaaccaatgtagaaagctttgcttatggtaataaaaatggctcatacttatatagcacttactttgttgcaagtactgctgtaaataaatgctttatgcaaacc

SEQ ID NO: 7542 - protein, 48 aa, Homo sapiens
MWPWPAGLSTSALDNAVASSITCICLCNVTTFPALPLALPSSGNSGSM

SEQ ID NO: 7543 - DNA, 926 bp, Homo sapiens
gaggagcactccaagcagtaccgctgcctctccttccagcctgagtgcagcatgaagctaacgccccttgtgctcgaagtgtttggcaatgagatctcctgactaggacagcctgtggcggtgcctgggtggggctgctcctccagggccacgtgccaggcccggggctggcggctactcagcagccctcctcaccccgtctggggttcagcccctcctctgccacctcccctatccacccagcccattctctctcctgtccaacctaacccctttcctgcgggcttttccccggtcccttgagacctcagccatgaggagttgctgtttgtttgacaaagaaacccaagtgggggcagagggcagaggctggaggcagggccttgcccagagatgcctccaccgctgcctaagtggctgctgactgatgttgagggaacagacaggagaaatgcatccattcctcagggacagagacacctgcacctccccccactgcaggccccgcttgtccagcgcctagtggggtctccctctcctgcctactcacgataaataatcggcccacagctcccaccccacccccttcagtgcccaccaacatcccattgccctggttatattctcacgggcagtagctgtggtgaggtgggttttcttcccatcactggagcaccaggcacgaacccacctgctgagagacccaaggaggaaaaacagacaaaaacagcctcacagaagaatatgacagctgtccctgtcaccaagctcacagttcctcgccctgggtctaaggggggcggagtgatacaacttcaagtgcatgctctctgcagccagcccagcccagctggtgggaagcgtctgtccgtttactccaaggtggggtctttgtgagagtgagctgtaggtgtgcgggaccggta

SEQ ID NO: 7544 - protein, 50 aa, Homo sapiens
MTAVPVTKLTVPRPGSKGGGVIQLQVHALCSQPSPAGGKRLSVYSKVGSL

SEQ ID NO: 7545 - DNA, 318 bp, Homo sapiens; identical to SEQ ID NO: 1076

SEQ ID NO: 7546 - protein, 105 aa, Homo sapiens; identical to SEQ ID NO: 1077

SEQ ID NO: 7547 - DNA, 2406 bp, Homo sapiens
atcacccattttctgcatcagtcacactgggagctgcagaccggagctgttcctatttgcccatcctctccctgctttctttacctctgaggttggattctccctgtgggatcctgcaatccttctgccccaaaaaactattatagcaggagggaacctgttcctgctcactctttgccttctccttctcatcctagacagcctgaccgtgccctagttttcagaggagtgattgattctggggtgcggagcaggatgaggaaactcaggctcagagagggatttccacctaatgtgcctggaaaccatgggtagctacccaataaggcctttctatgttcagaaggtcatggaccaggagtgttggtatcggagctttgtagagacagttttgacccctgtacttagagcagaggggtgtgtttgccatggagagtgtgtgtgggcagctgtgtgtaagcctgtgtgagttctgtgtatgttcctgtgtgaatatatgtgtgtgctccttcatggacacagcatgcatgtagtgggcatagcaaggcagagagaaatcaggagactaggggcacattgcccagtaggaagatagtatcttcctactgggcaggacttgaggtgtgcaaaggtgtgcatgagtactgcaaaagcagttcaaagagcagagaggtggggccagaataaatatgttgcagaaaggcagtcatcagggaggaaagtgaggattccctgccaaaatgcctgagggcttccctgcctaccacagccctctgtgttcttaaatcctcctgtctgaacagaggccagactctggtttcccccacagcctgtctgtgtctgtcctctgcaaagccatgtggctctacctggcggttttcgtgggcctgtactaccttctgcactggtaccgggagaggcaggtgctgagccacctgagagataagtatgtgttcatcacgggctgtgactctggcttcgggaaactgctggccagacagctggatgcacgaggcttgcgggtgctggctgcatgtctgacggagaaaggagccgagcagctgaggggccagacttcagacaggctggagacggtgaccctggatgttaccaagacagagagcgttgctgcagccgcccagtgggtgaaggagtgcgtgagagacaaaggactctggggcctggtgaataatgctggcatctccttgcccacggctcccaatgagttgctcaccaagcaggacttcgtgaccatactggacgtgaacttgttgggggtgattgatgtgactctgagcctgctgcccttagtgaggagggccaggggccgtgtggtcaacgtctccagtgtcatgggccgggtgtcactttttggtggaggctactgcatctccaagtatggcgtggaagccttctctgactccctcaggagggaactctcctactttggggtgaaggtggctatgattgaacctggctatttcaagactgctgtgaccagtaaggagagattcttaaagagcttcctggagatttgggaccggtccagtccagaggtcaaggaggcctatggcgagaagtttgttgcagactataagaaatcagctgaacaaatggagcagaagtgcacacaggatctgtcgttggtgaccaactgcatggagcatgcgctgattgcctgccacccccgtactcgctactcagctggctgggatgccaagcttctctacctccccatgagctacatgcccaccttcctggtggatgccattatgtactgggtctctccaagcccggccaaggctctatgaagctaaggttggatgcatggttgcatggatttggggtgtgctatgaggggtggtgtatccttgggagagatataaagtggagggagggagccgtccggtcagtagggcaccaatcccacctccttcattacctcctggccatgattctcctgggagataattctgctctctggagatgttggtaggaaagtttcaagttacgcagctgagaaacagggaccaaatagtgctcctgggtgcattgtcaccgtgggtggccactcaagggtccaagcctctagggccatccttgggctaacaactggggtgggtgtgagcaggtggaaggagcctcagcccatgccattacctcctgcttccttatcaggctgtgtgttaattctgggccagtctacaccctcccacggggtggaaatggcctggaggatgtgagggcacccctcctctgaagatccctgtacacgtggtgttgggactggaaccattatgcggccccataggcctcaggagtcatcccagaagcagtggctgggaggtggtgtcctaagtaaggatctgtgcagaggacaaataaatcagtttttgatttgtcttg

SEQ ID NO: 7548 - protein, 317 aa, Homo sapiens; identical to SEQ ID NO: 1079

SEQ ID NO: 7549 - DNA, 3202 bp, Homo sapiens
agcttttttctgttgctggcaaggagctgtgatcctttggaggagaagaggcactctggttttttgaattttcagattttctgctctggtatctccccatctttgtggttttatctacctttggtgtttgatgttggcgacctacagatggggttttggtgtggatgtcctttttgttgattttgagctatttctttctgtttgttagttttccttcaaacagtttcctcagctgcaggtctgttggagtttgctggaggtccactccagtccctgtttgcctgggtatcaccagcagaggctgcagaacagcaaatattgcagaacagcaaatattgttgcctgatccttcctctggaaacttcgtcccagaggggcacccacctgtatgagatgtcagtcggcccctactgggaggtgtctcccagttagtctacacagggttcagggacccatttgagaaggcagtctgtctgttctaagagctcaaacaccatgctgggagaaccactgctctcttcagtgctgtcagacagggatgtttaagtctgcagaggtttctgctgccttttgttcagttatgcactgctcccagaggtggagtctatagaggcagaaagccttgccttgctgcagtgggcttcgcccagtttgagctgcccagctgctttgctttcctactcaagcctcagcaatggtgagcaaccctcctcctgccaggctgctgccttgcaggttgatctcagactactgcactagcagtgagcaaagctctgtgggaatgggacccaccaaaccaggcacaggatataatctcctggtgtgccatttgctaagaccattggaaaagtgcagtatttgagcaggagtgtcttgtttttccaggtacagtctgtcacggcttcccttgtctaggaaagggaaatcccctgacctcttacacttcctgggtaaggcaatgccctgccttgcttcggctcaccctctgtgggctgcacgcactgtccaaccagtcccagtgagatgaaccaggtacctcagctggaaatgcagaaatcacccattttctgcatcagtcacactgggagctgcagaccggagctgttcctatttgcccatcctctccctgctttctttacctctgaggttggattctccctgtgggatcctgcaatccttctgccccaaaaaactattatagcaggagggaacctgttcctgctcactctttgccttctccttctcatcctagacagcctgaccgtgccctagttttcagaggagtgattgattctggggtgcggagcaggatgaggaaactcaggctcagagagggatttccacctaatgtgcctggaaaccatgggtagctacccaataaggcctttctatgttcagaaggtcatggaccaggagtgttggtatcggagctttgtagagacagttttgacccctgtacttagagcagaggggtgtgtttgccatggagagtgtgtgtgggcagctgtgtgtaagcctgtgtgagttctgtgtatgttcctgtgtgaatatatgtgtgtgctccttcatggacacagcatgcatgtagtgggcatagcaaggcagagagaaatcaggagactaggggcacattgcccagtaggaagatagtatcttcctactgggcaggacttgaggtgtgcaaaggtgtgcatgagtactgcaaaagcagttcaaagagcagagaggtggggccagaataaatatgttgcagaaaggcagtcatcagggaggaaagtgaggattccctgccaaaatgcctgagggcttccctgcctaccacagccctctgtgttcttaaatcctcctgtctgaacagaggccagactctggtttcccccacagcctgtctgtgtctgtcctctgcaaagccatgtggctctacctggcggttttcgtgggcctgtactaccttctgcactggtaccgggagaggcaggtgctgagccacctgagagataagtatgtgttcatcacgggctgtgactctggcttcgggaaactgctggccagacagctggatgcacgaggcttgcgggtgctggctgcatgtctgacggagaaaggagccgagcagctgaggggccagacttcagacaggctggagacggtgaccctggatgttaccaagacagagagcgttgctgcagccgcccagtgggtgaaggagtgcgtgagagacaaaggagggaactctcctactttggggtgaaggtggctatgattgaacctggctatttcaagactgctgtgaccagtaaggagagattcttaaagagcttcctggagatttgggaccggtccagtccagaggtcaaggaggcctatggcgagaagtttgttgcagactataagaaatcagctgaacaaatggagcagaagtgcacacaggatctgtcgttggtgaccaactgcatggagcatgcgctgattgcctgccacccccgtactcgctactcagctggctgggatgccaagcttctctacctccccatgagctacatgcccaccttcctggtggatgccattatgtactgggtctctccaagcccggccaaggctctatgaagctaaggttggatgcatggttgcatggatttggggtgtgctatgaggggtggtgtatccttgggagagatataaagtggagggagggagccgtccggtcagtagggcaccaatcccacctccttcattacctcctggccatgattctcctgggagataattctgctctctggagatgttggtaggaaagtttcaagttacgcagctgagaaacagggaccaaatagtgctcctgggtgcattgtcaccgtgggtggccactcaagggtccaagcctctagggccatccttgggctaacaactggggtgggtgtgagcaggtggaaggagcctcagcccatgccattacctcctgcttccttatcaggctgtgtgttaattctgggccagtctacaccctcccacggggtggaaatggcctggaggatgtgagggcacccctcctctgaagatccctgtacacgtggtgttgggactggaaccattatgcggccccataggcctcaggagtcatcccagaagcagtggctgggaggtggtgtcctaagtaaggatctgtgcagaggacaaataaatcagtttttgatttgtcttg

SEQ ID NO: 7550 - protein, 172 aa, Homo sapiens
MSDGERSRAAEGPDFRQAGDGDPGCYQDRERCCSRPVGEGVRERQRRELSYFGVKVAMIEPGYFKTAVTSKERFLKSFLEIWDRSSPEVKEAYGEKFVADYKKSAEQMEQKCTQDLSLVTNCMEHALIACHPRTRYSAGWDAKLLYLPMSYMPTFLVDAIMYWVSPSPAKAL

SEQ ID NO: 7551 - DNA, 565 bp, Homo sapiens
gtcgggccgggcacggcgggccggggcctttgtgtgaagcggcggcggcgatggtgctcggggcgccgcagagccgggcctcagaaaagcacctaggagcctttggtcaaaatgcaatacaaatctatcattggtgactgactgcatggagcatgtgctgaccgcctgccacccctgcacttgctacacagctggctgggacaccaagcttctctacctccccatgacctacatgtctaccttcctggcggatgccatgctccactaggttctccaaggctggccaagggcctgtgaagccaagactcaggacaacaagttaacaactatctacacagaaaagaacaccttcatagaacgaacaatcagcctgtctgtgtctgtcctctgcaaagccatgtggctctacctggcggttttcgtgggcctgtactaccttctgcactggtaccgggagaggcaggtgctgagccacctgagagataagtatgtgttcatcacgggctgtgactctggcttcgggaaactgctggccagacagctggatgcacgaggcttgcgggtg

SEQ ID NO: 7552 - protein, 55 aa, Homo sapiens
MWLYLAVFVGLYYLLHWYRERQVLSHLRDKYVFITGCDSGFGKLLARQLDARGLR

SEQ ID NO: 7553 - DNA, 1694 bp, Homo sapiens
gattgggggaatgcaggaaaaaccccatccctccctacagagcctcagcagtgacagctacttcccggatgagaagggcggccgtgaagccagcagggaagccagccccacagccaagggccccccagcctcctcacagctccccatagcctggacctgccggccctccctccaggaccgaggggctcccaagggaaactcaggcgtgtgctggtcccaatgtcagtgaaacccagctgggggcctggcccctcggagggggtcaccgcagtgcctaccagtgaccttggagagatccacaactggaccgagctgcttgacctcttcaaccacactttgtctgagtgccacgtggagctcagccagagcaccaagcgcgtggtcctctttgccctctacctggccatgtttgtggttgggctggtggagaacctcctggtgatatgcgtcaactggcgcggctcaggccgggcagggctgatgaacctctacatcctcaacatggccatcgcggacctgggcattgtcctgtctctgcccgtgtggatgctggaggtcacgctggactacacctggctctggggcagcttctcctgccgcttcactcactacttctactttgtcaacatgtatagcagcatcttcttcctggtgtgcctcagtgtcgaccgctatgtcaccctcaccagcgcctccccctcctggcagcgttaccagcaccgagtgcggcgggccatgtgtgcaggcatctgggtcctctcggccatcatcccgctgcctgaggtggtccacatccagctggtggagggccctgagcccatgtgcctcttcatggcaccttttgaaacgtacagcacctgggccctggcggtggccctgtccaccaccatcctgggcttcctgctgcccttccctctcatcacagtcttcaatgtgctgacagcctgccggctgcggcagccaggacaacccaagagccggcgccactgcctgctgctgtgcgcctacgtggccgtctttgtcatgtgctggctgccctatcatgtgaccctgctgctgctcacactgcatgggacccacatctccctccactgccacctggtccacctgctctacttcttctatgatgtcattgactgcttctccatgctgcactgtgtcatcaaccccatcctttacaactttctcagcccacacttccggggccggctcctgaatgctgtagtccattaccttcctaaggaccagaccaaggcgggcacatgcgcctcctcttcctcctgttccacccagcattccatcatcatcaccaagggtgatagccagcctgctgcagcagccccccaccctgagccaagcctgagctttcaggcacaccatttgcttccaaatacttcccccatctctcccactcagcctcttacacccagctgaggtagaggccagactcctccaacagtgaaggaaaaggcacaggtgagagtataggtgggagatttggggggatgtagaggggagggtcaaagcactcgtggtcaattttgaatctatcttaaaatactgaggtgtggagagagagacaggatcaggagcgatagagagcaggccctcagtgttgtactatttgtctcggtccttgtgtctaaggagcaatgcagaaaaaaaggtgaaataaatggaagagatagccatgg

SEQ ID NO: 7554 - protein, 72 aa, Homo sapiens
MQEKPHPSLQSLSSDSYFPDEKGGREASREASPTAKGPPASSQLPIAWTCRPSLQDRGAPKGNSGVCWSQCQ

SEQ ID NO: 7555 - DNA, 1767 bp, Homo sapiens
gattgggggaatgcaggaaaaaccccatccctccctacagagcctcagcagtgacagctacttcccggatgagaagggcggccgtgaagccagcagggaagccagccccacagccaagggccccccagcctcctcacagctccccatagcctggacctgccggccctccctccaggaccgaggggctcccaagggaaactcaggcgtgtgctggtcccaatgtcagtgaaacccagctgggggcctggcccctcggagggggtcaccgcagtgcctaccagtgaccttggagagatccacaactggaccgagctgcttgacctcttcaaccacactttgtctgagtgccacgtggagctcagccagagcaccaagcgcgtggtcctctttgccctctacctggccatgtttgtggttgggctggtggagaacctcctggtgatatgcgtcaactggcgcggctcaggccgggcagggctgatgaacctctacatcctcaacatggccatcgcggacctgggcattgtcctgtctctgcccgtgtggatgctggaggtcacgctggactacacctggctctggggcagcttctcctgccgcttcactcactacttctactttgtcaacatgtatagcagcatcttcttcctggtgtgcctcagtgtcgaccgctatgtcaccctcaccagcgcctccccctcctggcagcgttaccagcaccgagtgcggcgggccatgtgtgcaggcatctgggtcctctcggccatcatcccgctgcctgaggtggtccacatccagctggtggagggccctgagcccatgtgcctcttcatggcaccttttgaaacgtacagcacctgggccctggcggtggccctgtccaccaccatcctgggcttcctgctgcccttccctctcatcacagtcttcaatgtgctgacagcctgccggctgcggcagccaggacaacccaagagccggcgccactgcctgctgctgtgcgcctacgtggccgtctttgtcatgtgctggctgccctatcatgtgaccctgctgctgctcacactgcatgggacccacatctccctccactgccacctggtccacctgctctacttcttctatgatgtcattgactgcttctccatgctgcactgtgtcatcaaccccatcctttacaactttctcagcccacacttccggggccggctcctgaatgctgtagtccattaccttcctaaggaccagaccaaggcgggcacatgcgcctcctcttcctcctgttccacccagcattccatcatcatcaccaagggtgatagccagcctgctgcagcagccccccaccctgagccaagcctgagctttcaggcacaccatttgcttccaaatacttcccccatctctcccactcagcctcttacacccagctgaggtagaggccagactcctccaacagtgaaggaaaaggcacaggtgagagtataggtgggagatttggggggatgtagaggggagggtcaaagcactcgtggtcaattttgaatctatcttaaaatactgaggtgtggagagagagacaggatcaggagcgatagagagcaggccctcagtgttgtactatttgtctcggtccttgtgtctaaggagcaatgcagaaaaaaaggtgaaataaatggaagagatagccatggactctggatcttttaaaaatctgcacttccagctgggattgggaagggagctgaggctaaagaggtgctcggc

SEQ ID NO: 7556 - protein, 72 aa, Homo sapiens; identical to SEQ ID NO: 7554

SEQ ID NO: 7557 - DNA, 453 bp, Homo sapiens
ttcctcctgttccacccagcattccatcatcatcaccaagggtgatagccagcctgctgcagcagccccccaccctgagccaagcctgagctttcaggcacaccatttgcttccaaatacttcccccatctctcccactcagcctcttacacccagctgaggtagaggccagactcctccaacagtgaaggaaaaggcacagatcaccttagaggccacgctcccaagattagttatcaccctggcagtatgaatacttccctaaggcctcccatccatggaggggaagagtgggaaccagctgttacactcagcatctactgagcactgatgggagccctgcctgggccatgtgctgtggggccaaatggacatcactccctaacttcttgaggtctgtctcctctgtggattcacgcatgtatcaacctcattaaactatgccaaactttt

SEQ ID NO: 7558 - protein, 30 aa, Homo sapiens
GRGQTPPTVKEKAQITLEATLPRLVITLAV

SEQ ID NO: 7559 - DNA, 6240 bp, Homo sapiens
agtctggccgcggccggcggcgccgcctcctcgtcgggccgggcacggcgggccggggcctttgtgtgaagcggcggcggcgatggtgctcggggcgccgcagagccggattaactgtgctgataaggaggtaatttcataggagctgctaagatgggcatgaggatcaaactgcaaagcaccaaccaccccaacaacctgctgaaggaactcaacaagtgccggctctcagagaccatgtgcgacgtcaccattgtggtggggagccgctccttcccggcccacaaggctgtgctggcctgtgcagctggctacttccagaacctcttcctgaatactgggcttgatgctgccaggacctatgtggtggacttcatcacccctgccaactttgagaaggttctgagctttgtctacacttcagaactcttcacagacctgatcaatgttggggtcatctacgaggtagctgagcgtctgggtatggaggacctcctccaggcctgtcactctacctttcctgatctggagagcactgccagggccaagcccctgaccagcaccagtgagagccactctggtaccctgagttgtccttcggcagaacctgcccatccccttggagaactccgaggtggtggggactaccttggtgctgatagaaactatgtgttgcccagtgatgctggagggagctataaagaggaagagaagaatgttgccagtgacgctaaccatagcctgcatctgccgcaaccgcccccaccaccgccaaagacagaagaccatgacacccctgctcccttcacgtccattcctagcatgatgacccagccactcctaggcactgtcagcacgggcatccagaccagcacgagctcctgccagccatacaaagttcaaagcaatggagacttcagtaaaaacagcttcctcacccctgacaatgcagtagacattaccactgggaccaactcctgtctgagcaatagtgagcactccaaagatcctggctttgggcagatggatgagctccagctcgaggacctgggggatgatgacttgcagtttgaagaccctgctgaggatataggcacaactgaggaggtgattgagctgagtgatgacagtgaggatgagttggcttttggagagaatgacaatcgggagaataaggccatgccctgccaggtgtgcaagaaagttctagagcccaacattcaactgatccggcagcatgctcgggaccatgtggacctgctgacgggcaactgcaaggtctgcgagacccacttccaggaccgaaactcccgggtaactcatgtcctgtcccacattggtattttccttttctcctgcgacatgtgtgaaactaagttctttacccagtggcagctgacccttcaccgacgggatggaatatttgagaacaacatcattgtccaccccaacgatcccctgccagggaagctgggtctcttttcaggggcagcctccccagagctgaaatgcgctgcctgtgggaaagtattggccaaagatttccatgtggtccggggccacatccttgaccatctaaacttgaagggccaggcctgcagtgtctgcgaccagcgtcaccttaacctctgcagcctcatgtggcacacgctgtcccatctcggcatctcagtcttctcctgttctgtctgtgcgaacagctttgtggactggcatcttctagagaagcacatggctgtgcaccaaagtctggaagacgccctcttccactgccgcttgtgcagccagagcttcaagtcagaggctgcctatcgctaccacgtcagccagcacaaatgcaacagtggccttgatgcacggcctggttttgggctgcagcacccagctctccagaagcggaagctgccagcagaggagtttctgggtgaagagctggcgctgcagggccaacctgggaacagcaagtatagctgcaaggtctgtggcaaaagatttgcccacacaagcgaattcaactaccaccggcggatccacacgggggagaagccataccaatgtaaggtgtgccacaagttctttcgaggccgctcgaccatcaagtgccacctaaagacacactcgggggccctcatgtaccgctgcacagtctgtgggcactacagttccacccttaacctcatgagcaaacatgttggtgtgcacaaaggcagcctcccccctgacttcaccatcgagcagaccttcatgtacatcatccattccaaagaggcggataagaacccggacagttgactgggtcccggcagagccacggggagctcccaagcagcagccaggatgctgatatctaagaggtgttggtccctccccagctgaagttataattttgccttggtaggaattctgttctgtgttgtgtttaaagaagaaaagaagaagaaatagcacataagctgttactgttgttgagaagcaacagccctatcacatttacctccatacctgttcttgcccatgcagggctatgtttttcattcttttgaggctggttttgggatctagtcaagcagttggtgtccactagacccccttccccagcctctctagttttagtttactgataggttttatgctgctaagaatccaaccaacagcctcacttaacagaggaggtaaagggaggttttcactgtgggtgttactgcaggcctccaactgggatgaccagcaatgagaaagattttgggaatgtgatcattcagaaaagacaggtcagcagggcagtcccctcaggttccagccctcagcagggacaagacatcagggatgttggtgtctgcttatctacagccctaatctgctgattgaacagtgaaaatcttttggcagctagatccatactaggcacagagctttctatttaggtcagaaagctttgggatgaacccctgccagccagaaggggtgtcctgcagtgccaccagaagtggcagcctggatggacaggagaggtttctcttttctcctcatttccaaagaaacaggattttatggagtgatggcccgggacgtccggccttctgtggggcagagaggatagggaaccactttgatatagtcatctgttttggccacttctgttggccatgagtgtcttggtggagaggtggggatgtatctgacagcagcagccttgccttaatttatatctggtctcccgtccagaagtgtttggcccgtggtgtagatgagctgactccatgaagtggtggagtggcagaccgcgagcccttcaggattaaagggacctgagtaactggtggtgtgtagcagggtgtgcgttctgactgtctgtcctagtcgggtaacctgtttactttgtgctaacagtgccggagctttgtcagctcacctttgacctgctggaatttatcctgatctgtcgttgccatcacctccagggggcgctattggatggcagctggttcaggccctccgtgggtggctgcagagtgtgccggcacagcccacgcagctggttagctccactcttacttggttttctaaggggctttgcccaaagaagtcttgagggatagggccctcgatcttgcatacttgtgaggtgccacctcagtagctcatactacctcaccctgctcaggtgagctctgggagtccctggcctcagccctggcactgcccctggtgggattcagcaacaccccgggctgtttcacaagcaagtggttttcattaactcacaaagcctttttggacattaatatttatttatttttgtttttgtatacacattacccagcatctcttttgtataagagactttaggaaaatgagtttctccccagcaagtagccatattccagagaacagccttgaccagagatgtggagaaccaggggtataactaagggaagacatgtcaagcccttaagcaaattcttcttctccagattgtctctagcataataaacccagggaacactttaggccatgggtgtatgttctataaagttcgggacagttaaattccaggcctttcatcccccttccttcctgtgatggagtagattggggacagggttgaggggaacaagtgacatgaatgacctatttgcacagtttggaagcctcctgtctttatttatattgagatgtcagacaaaccaaagctccatccttgttggacctgctgcttctccccagccctgaactgataaagcctcagagttggagtgcctggctctctggtggggtgaccattagatgaagggacttgtacagtggccagtttaaaggtccacctttgaccatctaaacccaccttgttcagtgtcctctgaggacatcctcatcaggaaagcagtgttgagactcttcattgctgactggcttctccctttcttactcacactgaccattagaatttaagaaggaaatgtgtaacagactacagtcaagtgtctgctacattttcaagcatgagcaatccctcccagactgttggtgaggactgatttttgaaatgctggtgtgagagaggtggtaattacaggaaccagccgagtggctgagagcagataaatgtgctggagaaacctttttccttaacagagggcatcatggatgctgggtggtctgtgtacttaacctgaaactgtgaagttttccctttttgccagtaaaccaaaaagcagatccttgaaacttggcccttgaaacacgaaacagaaaactgcatcccctgatcccccgggggctgatcagattgatcagggtggctcagttggtcccagtcagatacgtcataggatcagtagctcatgagatttgttgaccaaaccctctccctgttggtgacccctgtattcacacctgaacttcccgtttccccccaccccaccaaagtcatgtctgcttcctctgcctccagctcaccctcttctgaatggttttgcttgaaacactatattgtggcagagggcaccctgggatacctggtagaaggtattcattttattttgcatttttaattgttttgactttctgttcatttgattttgttgctccctctctcctggaacctagtttactactctcttctgtgttactctgaagttctgtttaagccttgaacatcctcttctcccattttcttggtatgtactcaggaccagctacatcatttgtggagccctcttattcataaattattaaaaatttcaaggtggtggtcatagagcattaaaccaaatatgaggccattcccaacttgttttccgaggggaaaatggtaatacttgtgtggcacccggggttaaacagcagaggctccatgtggccagaggcagagattagtatcctggcactccagtgacccactgggtgactcactgatgccacagcacccgctaggaagctctgctgaaccttagtatttggtcctaaattttatgactccatggagttcccgtagtccatggctagttaggaagaaaggaggtgggataagggtcaggcccaggtgacccctaagaaccaggagatgggtaaaagtttttttttatattctgcttttctgatctgtgagtacctgtttgtctccaggccaaacctttgggcttaaatatctttttcctagacaggtttttgctagtgttgaattttcttcttcctctggcctccttctgtgcccctttccccaagcccaagactgcttaacttccaaagcaaattctagatagacactgtatttattggtatgggagtgggctctatggggtggtctgcacccatctgggactcttttccctaaatcctgcaccaaatgagtcaggaggcagggtgcacagcattagtttcaatgtggttatgcatcataagcttaacatcagaatgaaaatgaaactcgattttgatgtttctttaaaacccttcccctgtccaatccactcgccgcccccaccttgaatagctaaagtctcttatgaaacagagaagagttgttgacgtctaactccttccattaaattaataagtactgacctcctaatatttaagtgtttactatctattgctgtaaagttttgtatattttgtaaacttttttccccaaatagtagatgtctaaaatcattgtacatctgattcttttatattccattgttcagcacaaagtgtggtttttatttagaataaaaaaagaaatttgaaatgaga

SEQ ID NO: 7560 - protein, 712 aa, Homo sapiens; identical to SEQ ID NO: 1084

SEQ ID NO: 7561 - DNA, 544 bp, Homo sapiens
aagggccaggcctgcagtgtctgcgaccagcgtcaccttaacctctgcagcctcatgtggcacacgctgtcccatctcggcatctcagtcttctcctgttctgtctgtgcgaacagctttgtggactggcatcttctagagaagcacatggctgtgcaccaaagtctggaagacgccctcttccactgccgcttgtgcagccagagcttcaagtcagaggctgcctatcgctaccacgtcagccagcacaaatgcaacagtggccttgatgcacggcctggttttgggctgcagcacccagctctccagaagcggaagctgccagcagaggagtttctgggtgaagagctggcgctgcagggccaacctgggaacagcaagtatagctgcaaggtctgtggcaaaagatttgcccacacaagcgaattcaactaccaccggcggatccacacgggggagaagccataccaatgtaagtctgtgggcactacagttccacccttaacctcatgagcaaacatgttggtgtgcacaaaggcagcct

SEQ ID NO: 7562 - protein, 152 aa, Homo sapiens
MWHTLSHLGISVFSCSVCANSFVDWHLLEKHMAVHQSLEDALFHCRLCSQSFKSEAAYRYHVSQHKCNSGLDARPGFGLQHPALQKRKLPAEEFLGEELALQGQPGNSKYSCKVCGKRFAHTSEFNYHRRIHTGEKPYQCKSVGTTVPPLTS

SEQ ID NO: 7563 - DNA, 1079 bp, Homo sapiens
agatcccctccactcggtttctctctttgcaggagcaccggcagcaccagtgtgtgaggggagcaggcagcggtcctagccagttccttgatcctgccagaccacccagcccccggcacagagctgctccacaggcaccatgaggatcatgctgctattcacagccatcctggccttcagcctagctcagagctttggggctgtctgtaaggagccacaggaggaggtggttcctggcgggggccgcagcaagagggatccagatctctaccagctgctccagagactcttcaaaagccactcatctctggagggattgctcaaagccctgagccaggctagcacagatcctaaggaatcaacatctcccgagaaacactctcctacggatgtgaatcaagagaacgtccccagctttggcatcctcaagtatcccccgagagcagaatagggtattaaagctcatagatttgccctgaaatacactgccaatgcccagcacactgtcggccaaacacaaagacacttagaggcacgtgtgtttgtacacatcccccgtctttcatctctttcctctggatcatggacggcagctgactattgagcaggagctctttcagagggacccataattgcagctttcataatcttaccattgagggagcattcccaacctgttaggtgtcaggcagaataggacataaggtttctgggagctggcatttaaagattagatgagatggatcaacacagatcattgtgtcatctgatttcattcatgtgaaacttactccacttccggactcctggactgcattaggaagacctctttccctgtcccaatccccaggtgcgcacgctcctgttaccctttctcttccctgttcttgtaacattcttgtgctttgactccttctccatcttttctacctgaccctggtgtggaaactgcatagtgaatatccccaaccccaatgggcattgactgtagaataccctagagttcctgtagtgtcctacattaaaaatataatgtctctctctattcctcaacaataaaggatttttgcatatgaatg

SEQ ID NO: 7564 - protein, 103 aa, Homo sapiens
MRIMLLFTAILAFSLAQSFGAVCKEPQEEVVPGGGRSKRDPDLYQLLQRLFKSHSSLEGLLKALSQASTDPKESTSPEKHSPTDVNQENVPSFGILKYPPRAE

SEQ ID NO: 7565 - DNA, 1133 bp, Homo sapiens
agatcccctccactcggtttctctctttgcaggagcaccggcagcaccagtgtgtgaggggagcaggcagcggtcctagccagttccttgatcctgccagaccacccagcccccggcacagagctgctccacaggcaccatgaggatcatgctgctattcacagccatcctggccttcagcctagctcagagctttggggctgtctgtaaggagccacaggaggaggtggttcctggcgggggccgcagcaagagggatccagatctctaccagctgctccagagactcttcaaaagccactcatctctggagggattgctcaaagccctgagccaggctagcacagatcctaaggaatcaacatctcccgagaaacgtgacatgcatgacttctttgtgggacttatgggcaagaggagcgtccagccagactctcctacggatgtgaatcaagagaacgtccccagctttggcatcctcaagtatcccccgagagcagaatagggtattaaagctcatagatttgccctgaaatacactgccaatgcccagcacactgtcggccaaacacaaagacacttagaggcacgtgtgtttgtacacatcccccgtctttcatctctttcctctggatcatggacggcagctgactattgagcaggagctctttcagagggacccataattgcagctttcataatcttaccattgagggagcattcccaacctgttaggtgtcaggcagaataggacataaggtttctgggagctggcatttaaagattagatgagatggatcaacacagatcattgtgtcatctgatttcattcatgtgaaacttactccacttccggactcctggactgcattaggaagacctctttccctgtcccaatccccaggtgcgcacgctcctgttaccctttctcttccctgttcttgtaacattcttgtgctttgactccttctccatcttttctacctgaccctggtgtggaaactgcatagtgaatatccccaaccccaatgggcattgactgtagaataccctagagttcctgtagtgtcctacattaaaaatataatgtctctctctattcctcaacaataaaggatttttgcatatgaatg

SEQ ID NO: 7566 - protein, 121 aa, Homo sapiens; identical to SEQ ID NO: 1088

SEQ ID NO: 7567 - DNA, 955 bp, Homo sapiens
agatcccctccactcggtttctctctttgcaggagcaccggcagcaccagtgtgtgaggggagcaggcagcggtcctagccagttccttgatcctgccagaccacccagcccccggcacagagctgctccacaggcaccatgaggatcatgctgctattcacagccatcctggccttcagcctagctcagagctttggggctgtctgtaaggagccacaggaggaggtggttcctggcgggggccgcagcaagagggatccagatctctaccagctgctccagagactcttcaaaagccactcatctctggagggattgctcaaagccctgagccaggctagcacagatcctaaggaatcaacatctcccgagaaacgtgacatgcatgacttctttgtgggacttatgggcaagaggagcgtccagccagactctcctacggatgtgaatcaagagaacgtccccagctttggcatcctcaagtatcccccgagagcagaatagggtattaaagctcatagatttgccctgaaatacactgccaatgcccagcacactgtcggccaaacacaaagacacttagaggcacgtgtgtttgtacacatcccccgtctttcatctctttcctctggatcatggacggcagctgactattgagcaggatactccacttccggactcctggactgcattaggaagacctctttccctgtcccaatccccaggtgcgcacgctcctgttaccctttctcttccctgttcttgtaacattcttgtgctttgactccttctccatcttttctacctgaccctggtgtggaaactgcatagtgaatatccccaaccccaatgggcattgactgtagaataccctagagttcctgtagtgtcctacattaaaaatataatgtctctctctattcctcaacaataaaggatttttgcatatgaatg

SEQ ID NO: 7568 - protein, 121 aa, Homo sapiens; identical to SEQ ID NO: 1088

SEQ ID NO: 7569 - DNA, 901 bp, Homo sapiens
agatcccctccactcggtttctctctttgcaggagcaccggcagcaccagtgtgtgaggggagcaggcagcggtcctagccagttccttgatcctgccagaccacccagcccccggcacagagctgctccacaggcaccatgaggatcatgctgctattcacagccatcctggccttcagcctagctcagagctttggggctgtctgtaaggagccacaggaggaggtggttcctggcgggggccgcagcaagagggatccagatctctaccagctgctccagagactcttcaaaagccactcatctctggagggattgctcaaagccctgagccaggctagcacagatcctaaggaatcaacatctcccgagaaacactctcctacggatgtgaatcaagagaacgtccccagctttggcatcctcaagtatcccccgagagcagaatagggtattaaagctcatagatttgccctgaaatacactgccaatgcccagcacactgtcggccaaacacaaagacacttagaggcacgtgtgtttgtacacatcccccgtctttcatctctttcctctggatcatggacggcagctgactattgagcaggatactccacttccggactcctggactgcattaggaagacctctttccctgtcccaatccccaggtgcgcacgctcctgttaccctttctcttccctgttcttgtaacattcttgtgctttgactccttctccatcttttctacctgaccctggtgtggaaactgcatagtgaatatccccaaccccaatgggcattgactgtagaataccctagagttcctgtagtgtcctacattaaaaatataatgtctctctctattcctcaacaataaaggatttttgcatatgaatg

SEQ ID NO: 7570 - protein, 103 aa, Homo sapiens; identical to SEQ ID NO: 7564

SEQ ID NO: 7571 - DNA, 1072 bp, Homo sapiens
agatcccctccactcggtttctctctttgcaggagcaccggcagcaccagtgtgtgaggggagcaggcagcggtcctagccagttccttgatcctgccagaccacccagcccccggcacagagctgctccacaggcaccatgaggatcatgctgctattcacagccatcctggccttcagcctagctcagagctttggggctgtctgtaaggagccacaggaggaggtggttcctggcgggggccgcagcaagagggatccagatctctaccagctgctccagagactcttcaaaagccactcatctctggagggattgctcaaagccctgagccaggctagcacagatcctaaggaatcaacatctcccgagaaacgtgacatgcatgacttctttgtgggacttatgggcaagaggagcgtccagccagagggaaagacaggacctttcttaccttcagtgagggttcctcggccccttcatcccaatcagcttggatccacaggaaagtcttccctgggaacagaggagcagagacctttataagactctcctacggatgtgaatcaagagaacgtccccagctttggcatcctcaagtatcccccgagagcagaatagggtattaaagctcatagatttgccctgaaatacactgccaatgcccagcacactgtcggccaaacacaaagacacttagaggcacgtgtgtttgtacacatcccccgtctttcatctctttcctctggatcatggacggcagctgactattgagcaggatactccacttccggactcctggactgcattaggaagacctctttccctgtcccaatccccaggtgcgcacgctcctgttaccctttctcttccctgttcttgtaacattcttgtgctttgactccttctccatcttttctacctgaccctggtgtggaaactgcatagtgaatatccccaaccccaatgggcattgactgtagaataccctagagttcctgtagtgtcctacattaaaaatataatgtctctctctattcctcaacaataaaggatttttgcatatgaatg

SEQ ID NO: 7572 - protein, 135 aa, Homo sapiens; identical to SEQ ID NO: 1086

SEQ ID NO: 7573 - DNA, 1250 bp, Homo sapiens
agatcccctccactcggtttctctctttgcaggagcaccggcagcaccagtgtgtgaggggagcaggcagcggtcctagccagttccttgatcctgccagaccacccagcccccggcacagagctgctccacaggcaccatgaggatcatgctgctattcacagccatcctggccttcagcctagctcagagctttggggctgtctgtaaggagccacaggaggaggtggttcctggcgggggccgcagcaagagggatccagatctctaccagctgctccagagactcttcaaaagccactcatctctggagggattgctcaaagccctgagccaggctagcacagatcctaaggaatcaacatctcccgagaaacgtgacatgcatgacttctttgtgggacttatgggcaagaggagcgtccagccagagggaaagacaggacctttcttaccttcagtgagggttcctcggccccttcatcccaatcagcttggatccacaggaaagtcttccctgggaacagaggagcagagacctttataagactctcctacggatgtgaatcaagagaacgtccccagctttggcatcctcaagtatcccccgagagcagaatagggtattaaagctcatagatttgccctgaaatacactgccaatgcccagcacactgtcggccaaacacaaagacacttagaggcacgtgtgtttgtacacatcccccgtctttcatctctttcctctggatcatggacggcagctgactattgagcaggagctctttcagagggacccataattgcagctttcataatcttaccattgagggagcattcccaacctgttaggtgtcaggcagaataggacataaggtttctgggagctggcatttaaagattagatgagatggatcaacacagatcattgtgtcatctgatttcattcatgtgaaacttactccacttccggactcctggactgcattaggaagacctctttccctgtcccaatccccaggtgcgcacgctcctgttaccctttctcttccctgttcttgtaacattcttgtgctttgactccttctccatcttttctacctgaccctggtgtggaaactgcatagtgaatatccccaaccccaatgggcattgactgtagaataccctagagttcctgtagtgtcctacattaaaaatataatgtctctctctattcctcaacaataaaggatttttgcatatgaatg

SEQ ID NO: 7574 - protein, 135 aa, Homo sapiens; identical to SEQ ID NO: 1086

SEQ ID NO: 7575 - DNA, 743 bp, Homo sapiens
agatcccctccactcggtttctctctttgcaggagcaccggcagcaccagtgtgtgaggggagcaggcagcggtcctagccagttccttgatcctgccagaccacccagcccccggcacagagctgctccacaggcaccatgaggatcatgctgctattcacagccatcctggccttcagcctagctcagagctttggggctgtctgtaaggagccacaggaggaggtggttcctggcgggggccgcagcaagagggatccagatctctaccagctgctccagagactcttcaaaagccactcatctctggagggattgctcaaagccctgagccaggctagcacagatcctaaggaatcaacatctcccgagaaacactctcctacggatgtgaatcaagagaacgtccccagctttggcatcctcaagtatcccccgagagcagaataggtactccacttccggactcctggactgcattaggaagacctctttccctgtcccaatccccaggtgcgcacgctcctgttaccctttctcttccctgttcttgtaacattcttgtgctttgactccttctccatcttttctacctgaccctggtgtggaaactgcatagtgaatatccccaaccccaatgggcattgactgtagaataccctagagttcctgtagtgtcctacattaaaaatataatgtctctctctattcctcaacaataaaggatttttgcatatgaatg

SEQ ID NO: 7576 - protein, 103 aa, Homo sapiens; identical to SEQ ID NO: 7564

SEQ ID NO: 7577 - DNA, 935 bp, Homo sapiens
ctgagtgactgcagccttcctagatcccctccactcggtttctctctttgcaggagcaccggcagcaccagtgtgtgaggggagcaggcagcggtcctagccagttccttgatcctgccagaccacccagcccccggcacagagctgctccacaggcaccatgaggatcatgctgctattcacagccatcctggccttcagcctagctcagagctttggggctgtctgtaaggagccacaggaggaggtggttcctggcgggggccgcagcaagagggatccagatctctaccagctgctccagagactcttcaaaagccactcatctctggagggattgctcaaagccctgagccaggctagcacagatcctaaggaatcaacatctcccgagaaacgtgacatgcatgacttctttgtgggacttatgggcaagaggagcgtccagccagagggaaagacaggacctttcttaccttcagtgagggttcctcggccccttcatcccaatcagcttggatccacaggaaagtcttccctgggaacagaggagcagagacctttataagactctcctacggatgtgaatcaagagaacgtccccagctttggcatcctcaagtatcccccgagagcagaataggtactccacttccggactcctggactgcattaggaagacctctttccctgtcccaatccccaggtgcgcacgctcctgttaccctttctcttccctgttcttgtaacattcttgtgctttgactccttctccatcttttctacctgaccctggtgtggaaactgcatagtgaatatccccaaccccaatgggcattgactgtagaataccctagagttcctgtagtgtcctacattaaaaatataatgtctctctctattcctcaacaataaaggatttttgcatatgaatg

SEQ ID NO: 7578 - protein, 135 aa, Homo sapiens; identical to SEQ ID NO: 1086

SEQ ID NO: 7579 - DNA, 837 bp, Homo sapiens
ctttatcagggagctgggactgagtgactgcagccttcctagatcccctccactcggtttctctctttgcaggagcaccggcagcaccagtgtgtgaggggagcaggcagcggtcctagccagttccttgatcctgccagaccacccagcccccggcacagagctgctccacaggcaccatgaggatcatgctgctattcacagccatcctggccttcagcctagctcagagctttggggctgtctgtaaggagccacaggaggaggtggttcctggcgggggccgcagcaagagggatccagatctctaccagctgctccagagactcttcaaaagccactcatctctggagggattgctcaaagccctgagccaggctagcacagatcctaaggaatcaacatctcccgagaaacgtgacatgcatgacttctttgtgggacttatgggcaagaggagcgtccagccagactctcctacggatgtgaatcaagagaacgtccccagctttggcatcctcaagtatcccccgagagcagaataggtactccacttccggactcctggactgcattaggaagacctctttccctgtcccaatccccaggtgcgcacgctcctgttaccctttctcttccctgttcttgtaacattcttgtgctttgactccttctccatcttttctacctgaccctggtgtggaaactgcatagtgaatatccccaaccccaatgggcattgactgtagaataccctagagttcctgtagtgtcctacattaaaaatataatgtctctctctattcctcaacaataaaggatttttgcatatgaatg

SEQ ID NO: 7580 - protein, 121 aa, Homo sapiens; identical to SEQ ID NO: 1088

SEQ ID NO: 7581 - DNA, 874 bp, Homo sapiens
aggttctcagtgaggttcaaggagaacagtgtggctgtcaaggtcgtccagggccctgcaggtggtgacaacagcaagctacgctacaaaaaaaaggggagtcattcaggagcaccggcagcaccagtgtgtgaggggagcaggcagcggtcctagccagttccttgatcctgccagaccacccagcccccggcacagagctgctccacaggcaccatgaggatcatgctgctattcacagccatcctggccttcagcctagctcagagctttggggctgtctgtaaggagccacaggaggaggtggttcctggcgggggccgcagcaagagggatccagatctctaccagctgctccagagactcttcaaaagccactcatctctggagggattgctcaaagccctgagccaggctagcacagatcctaaggaatcaacatctcccgagaaacgtgacatgcatgacttctttgtgggacttatgggcaagaggagcgtccagccagactctcctacggatgtgaatcaagagaacgtccccagctttggcatcctcaagtatcccccgagagcagaataggtactccacttccggactcctggactgcattaggaagacctctttccctgtcccaatccccaggtgcgcacgctcctgttaccctttctcttccctgttcttgtaacattcttgtgctttgactccttctccatcttttctacctgaccctggtgtggaaactgcatagtgaatatccccaaccccaatgggcattgactgtagaataccctagagttcctgtagtgtcctacattaaaaatataatgtctctctctattcctcaacaataaaggatttttgcatatgaatg

SEQ ID NO: 7582 - protein, 121 aa, Homo sapiens; identical to SEQ ID NO: 1088

SEQ ID NO: 7583 - DNA, 578 bp, Homo sapiens
agccttcctagatcccctccactcggtttctctctttgcaggagcaccggcagcaccagtgtgtgaggggagcaggcagcggtcctagccagttccttgatcctgccagaccacccagcccccggcacagagctgctccacaggcaccatgaggatcatgctgctattcacagccatcctggccttcagcctagctcagagctttggggctgtctgtaaggagccacaggaggaggtggttcctggcgggggccgcagcaagagggatccagatctctaccagctgctccagagactcttcaaaagccactcatctctggagggattgctcaaagccctgagccaggctagcacagatcctaaggaatcaacatctcccgagaaacgtaagtaccctcttctccctccctatctcttgccacttgcccagagctctgtggggcattgggcccaggggccattttgtccagccccttctcacctggtacaaacaatatgccagctcccactgctcagccaacctttcctgaaagggagaggccatccagaactaggaggaagctggtgtgaggggcatg

SEQ ID NO: 7584 - protein, 142 aa, Homo sapiens
MRIMLLFTAILAFSLAQSFGAVCKEPQEEVVPGGGRSKRDPDLYQLLQRLFKSHSSLEGLLKALSQASTDPKESTSPEKRKYPLLPPYLLPLAQSSVGHWAQGPFCPAPSHLVQTICQLPLLSQPFLKGRGHPELGGSWCEG

SEQ ID NO: 7585 - DNA, 3650 bp, Homo sapiens
aatgcaagggggagttcaatgaaactgggacatctatacacatggagcctgggctggaagaggcagcaaaagggaaaatcagaagagtggacactggcaagaggagggcagcctttttcccagcttccttgcaccatggacagctcccattaagccacctctccatcctggggccaggactcttatgccccattcctgtcaaattgagatttcatccaccattctccaaggacagtgaagttataccctagttccagtgttgggatcagtggcccctctggacatgcctctcctggaaggttctgtgggggtggaggatcttgtcctcctggaacccttggtggaggagtcactgctcaagaatcttcagcttcgctatgaaaacaaggagatttatacctacattgggaatgtggtgatctcagtgaatccctatcaacagcttcccatctatgggccagagttcattgccaaatatcaagactatactttctatgagctgaagccccatatctacgcattggcaaatgtggcgtaccagtcactgagggacagggaccgagaccagtgtatcctcatcacaggcgagagtggatcagggaagactgaggccagcaagctggtgatgtcttatgtggctgccgtctgtgggaaaggagagcaggtgaactctgtgaaggagcagctgctacagtctaacccagtgctggaggcttttggcaatgccaagaccattcgcaacaacaattcctcccgatttggaaaatacatggatattgaatttgacttcaagggatcccccctcggtggtgtcatcacaaactatctgcttgagaaatcccgattagtgaagcagctcaaaggagaaaggaacttccacatcttctatcagctgctggctggagcagatgaacagctgctgaaggccctgaagcttgagcgggatacaactggctatgcctatctgaatcatgaagtatccagagtggatggcatggacgacgcctccagcttcagggctgtacagagtgcaatggcagtgattgggttctcggaggaggagattcgacaagtgctagaggtgacatccatggtgctaaagctggggaacgtgttggtggctgatgagttccaggccagtgggataccagcaagtggcatccgtgatgggagaggtgttcgggagattggggagatggtgggcttgaattcagaagaagtagagagagctttgtgctcgaggaccatggaaacagccaaggaaaaggtggtcactgcactgaatgttatgcaggctcagtatgctcgggacgccctggctaagaacatctacagccgcctctttgactggatagtgaatcgaatcaatgagagcatcaaggtgggcatcggggaaaagaagaaggtaatgggagtccttgatatctacggttttgagatattagaggataatagctttgagcaatttgtgatcaactactgcaatgagaagctgcagcaggtgttcatagagatgaccctgaaagaagagcaagaggaatataagagagaaggcataccgtggacaaaggtggactactttgataatggcatcatttgtaagctcattgagcataatcagcgaggtatcctggccatgttggatgaggagtgcctgcggcctggggtggtcagtgactccactttcctagcaaagctgaaccagctcttctccaagcatggccactacgagagcaaagtcacccagaatgcccagcgtcagtatgaccacaccatgggcctcagctgcttccgcatctgccactatgcgggcaaggtgacatacaacgtgaccagctttattgacaagaataatgacctactcttccgagacctgttgcaggccatgtggaaggcccagcaccccctccttcggtccttgtttcctgagggcaatcctaagcaggcatctctcaaacgccccccgactgctggggcccagttcaagagttctgtggccatcctcatgaagaatctgtattccaagagccccaactacatcaggtgcataaagcccaatgagcatcagcagcgaggtcagttctcttcagacctggtggcaacccaggctcggtacctgggactgctggagaacgtacgggtgcgacgggcaggctatgcccaccgccagggttatgggcccttcctggaaaggtaccgattgctgagccggagcacctggcctcactggaatgggggagaccgggaaggtgttgagaaggtcctgggggagctgagcatgtcctcgggggagctggcctttggcaagacaaagatcttcattagaagccccaagactcttttctacctcgaagaacagaggcgcctgagactccagcagctggccacactcatacagaagatttaccgaggctggcgctgccgcacccactaccaactgatgcgaaagagtcagatcctcatctcctcttggtttcggggaaacatgcaaaagaaatgctatgggaagataaaggcatccgtgttattgatccaggcttttgtgagagggtggaaggcccgaaagaattatcgcaaatatttccggtcagaggctgccctcaccttggcagatttcatctacaagagcatggtacagaaattcctactggggctgaagaacaatttgccatccacaaacgtcttagacaagacatggccagccgccccctacaagtgcctcagcacagcaaatcaggagctgcagcagctcttctaccagtggaaggcaaaggttccgggatcagctgtccccgaagcaggtagagatcctgagggaaaagctctgtgccagtgaactgttcaagggcaagaaggcttcatatccccagagtgtccccattccattctgtggtgactacattgggctgcaagggaaccccaagctgcagaagctgaaaggcggggaggaggggcctgttctgatggcagaggccgtgaagaaggtcaatcgtggcaatggcaagacttcttctcggattctcctcctgaccaagggccatgtgattctcacagacaccaagaagtcccaggccaaaattgtcattgggctagacaatgtggctggggtgtcagtcaccagcctcaaggatgggctctttagcttgcatctgagtgagatgtcatcggtgggctccaagggggacttcctgctggtcagcgagcatgtgattgaactgctgaccaaaatgtaccgggctgtgctggatgccacgcagaggcagcttacagtcaccgtgactgagaagttctcagtgaggttcaaggagaacagtgtggctgtcaaggtcgtccagggccctgcaggtggtgacaacagcaagctacgctacaaaaaaaaggggagtcattgcttggaggtgactgtgcagtgaggagggggcaccatgcagagatggcagttgcttcctcctgaaccagcactaatccccctctgccctcctgtgtgggaggatctctaacccctctgatcgtggcgcatggcttggggattaaactacccttgaagaggacccttgtcccaaacccttcttgttctctcctccaaaagtagcttcctccaacccgcagcctctctgcacactaataaaacatgtggcttggaaaggttc

SEQ ID NO: 7586 - protein, 850 aa, Homo sapiens
MPLLEGSVGVEDLVLLEPLVEESLLKNLQLRYENKEIYTYIGNVVISVNPYQQLPIYGPEFIAKYQDYTFYELKPHIYALANVAYQSLRDRDRDQCILITGESGSGKTEASKLVMSYVAAVCGKGEQVNSVKEQLLQSNPVLEAFGNAKTIRNNNSSRFGKYMDIEFDFKGSPLGGVITNYLLEKSRLVKQLKGERNFHIFYQLLAGADEQLLKALKLERDTTGYAYLNHEVSRVDGMDDASSFRAVQSAMAVIGFSEEEIRQVLEVTSMVLKLGNVLVADEFQASGIPASGIRDGRGVREIGEMVGLNSEEVERALCSRTMETAKEKVVTALNVMQAQYARDALAKNIYSRLFDWIVNRINESIKVGIGEKKKVMGVLDIYGFEILEDNSFEQFVINYCNEKLQQVFIEMTLKEEQEEYKREGIPWTKVDYFDNGIICKLIEHNQRGILAMLDEECLRPGVVSDSTFLAKLNQLFSKHGHYESKVTQNAQRQYDHTMGLSCFRICHYAGKVTYNVTSFIDKNNDLLFRDLLQAMWKAQHPLLRSLFPEGNPKQASLKRPPTAGAQFKSSVAILMKNLYSKSPNYIRCIKPNEHQQRGQFSSDLVATQARYLGLLENVRVRRAGYAHRQGYGPFLERYRLLSRSTWPHWNGGDREGVEKVLGELSMSSGELAFGKTKIFIRSPKTLFYLEEQRRLRLQQLATLIQKIYRGWRCRTHYQLMRKSQILISSWFRGNMQKKCYGKIKASVLLIQAFVRGWKARKNYRKYFRSEAALTLADFIYKSMVQKFLLGLKNNLPSTNVLDKTWPAAPYKCLSTANQELQQLFYQWKAKVPGSAVPEAGRDPEGKALCQ

SEQ ID NO: 7587 - DNA, 3638 bp, Homo sapiens
gctgagagttggagaatcaagtctctcttcaggagcctgggctggaagaggcagcaaaagggaaaatcagaagagtggacactggcaagaggagggcagcctttttcccagcttccttgcaccatggacagctcccattaagccacctctccatcctggggccaggactcttatgccccattcctgtcaaattgagatttcatccaccattctccaaggacagtgaagttataccctagttccagtgttgggatcagtggcccctctggacatgcctctcctggaaggttctgtgggggtggaggatcttgtcctcctggaacccttggtggaggagtcactgctcaagaatcttcagcttcgctatgaaaacaaggagatttatacctacattgggaatgtggtgatctcagtgaatccctatcaacagcttcccatctatgggccagagttcattgccaaatatcaagactatactttctatgagctgaagccccatatctacgcattggcaaatgtggcgtaccagtcactgagggacagggaccgagaccagtgtatcctcatcacaggcgagagtggatcagggaagactgaggccagcaagctggtgatgtcttatgtggctgccgtctgtgggaaaggagagcaggtgaactctgtgaaggagcagctgctacagtctaacccagtgctggaggcttttggcaatgccaagaccattcgcaacaacaattcctcccgatttggaaaatacatggatattgaatttgacttcaagggatcccccctcggtggtgtcatcacaaactatctgcttgagaaatcccgattagtgaagcagctcaaaggagaaaggaacttccacatcttctatcagctgctggctggagcagatgaacagctgctgaaggccctgaagcttgagcgggatacaactggctatgcctatctgaatcatgaagtatccagagtggatggcatggacgacgcctccagcttcagggctgtacagagtgcaatggcagtgattgggttctcggaggaggagattcgacaagtgctagaggtgacatccatggtgctaaagctggggaacgtgttggtggctgatgagttccaggccagtgggataccagcaagtggcatccgtgatgggagaggtgttcgggagattggggagatggtgggcttgaattcagaagaagtagagagagctttgtgctcgaggaccatggaaacagccaaggaaaaggtggtcactgcactgaatgttatgcaggctcagtatgctcgggacgccctggctaagaacatctacagccgcctctttgactggatagtgaatcgaatcaatgagagcatcaaggtgggcatcggggaaaagaagaaggtaatgggagtccttgatatctacggttttgagatattagaggataatagctttgagcaatttgtgatcaactactgcaatgagaagctgcagcaggtgttcatagagatgaccctgaaagaagagcaagaggaatataagagagaaggcataccgtggacaaaggtggactactttgataatggcatcatttgtaagctcattgagcataatcagcgaggtatcctggccatgttggatgaggagtgcctgcggcctggggtggtcagtgactccactttcctagcaaagctgaaccagctcttctccaagcatggccactacgagagcaaagtcacccagaatgcccagcgtcagtatgaccacaccatgggcctcagctgcttccgcatctgccactatgcgggcaaggtgacatacaacgtgaccagctttattgacaagaataatgacctactcttccgagacctgttgcaggccatgtggaaggcccagcaccccctccttcggtccttgtttcctgagggcaatcctaagcaggcatctctcaaacgccccccgactgctggggcccagttcaagagttctgtggccatcctcatgaagaatctgtattccaagagccccaactacatcaggtgcataaagcccaatgagcatcagcagcgaggtcagttctcttcagacctggtggcaacccaggctcggtacctgggactgctggagaacgtacgggtgcgacgggcaggctatgcccaccgccagggttatgggcccttcctggaaaggtaccgattgctgagccggagcacctggcctcactggaatgggggagaccgggaaggtgttgagaaggtcctgggggagctgagcatgtcctcgggggagctggcctttggcaagacaaagatcttcattagaagccccaagactcttttctacctcgaagaacagaggcgcctgagactccagcagctggccacactcatacagaagatttaccgaggctggcgctgccgcacccactaccaactgatgcgaaagagtcagatcctcatctcctcttggtttcggggaaacatgcaaaagaaatgctatgggaagataaaggcatccgtgttattgatccaggcttttgtgagagggtggaaggcccgaaagaattatcgcaaatatttccggtcagaggctgccctcaccttggcagatttcatctacaagagcatggtacagaaattcctactggggctgaagaacaatttgccatccacaaacgtcttagacaagacatggccagccgccccctacaagtgcctcagcacagcaaatcaggagctgcagcagctcttctaccagtggaaggcaaaggttccgggatcagctgtccccgaagcaggtagagatcctgagggaaaagctctgtgccagtgaactgttcaagggcaagaaggcttcatatccccagagtgtccccattccattctgtggtgactacattgggctgcaagggaaccccaagctgcagaagctgaaaggcggggaggaggggcctgttctgatggcagaggccgtgaagaaggtcaatcgtggcaatggcaagacttcttctcggattctcctcctgaccaagggccatgtgattctcacagacaccaagaagtcccaggccaaaattgtcattgggctagacaatgtggctggggtgtcagtcaccagcctcaaggatgggctctttagcttgcatctgagtgagatgtcatcggtgggctccaagggggacttcctgctggtcagcgagcatgtgattgaactgctgaccaaaatgtaccgggctgtgctggatgccacgcagaggcagcttacagtcaccgtgactgagaagttctcagtgaggttcaaggagaacagtgtggctgtcaaggtcgtccagggccctgcaggtggtgacaacagcaagctacgctacaaaaaaaaggggagtcattgcttggaggtgactgtgcagtgaggagggggcaccatgcagagatggcagttgcttcctcctgaaccagcactaatccccctctgccctcctgtgtgggaggatctctaacccctctgatcgtggcgcatggcttggggattaaactacccttgaagaggacccttgtcccaaacccttcttgttctctcctccaaaagtagcttcctccaacccgcagcctctctgcacactaataaaacatgtggcttggaaaggttc

SEQ ID NO: 7588 - protein, 850 aa, Homo sapiens; identical to SEQ ID NO: 7586

SEQ ID NO: 7589 - DNA, 582 bp, Homo sapiens
ggaccttgcaccaagcagccatagctgagagttggagaatcaagtctctcttcaggagcctgggctggaagaggcagcaaaagggaaaatcagaagagtggacactggcaagaggagggcagcctttttcccagcttccttgcaccatggacagctcccattaagccacctctccatcctggggccaggactcttatgccccattcctgtcaaattgagatttcatccaccattctccaaggacagtgaagttataccctagttccagtgttgggatcagtggcccctctggacatgcctctcctggaaggttctgtgggggtggaggatcttgtcctcctggaacccttggtggaggagtcactgctcaagaatcttcagcttcgctatgaaaacaaggagatttatacctacattgggaatgtggtgatctcagtgaatccctatcaacagcttcccatctatgggccagagttcattgccaaatatcaagactatactttctatgagctgaagccccatatgtgagtagggggaccaagggaaggctgacagggccccagcttcttgacactgagtcat

SEQ ID NO: 7590 - protein, 77 aa, Homo sapiens [sequence omitted]

SEQ ID NO: 7591 - DNA, 5622 bp, Homo sapiens
gttagttgctggggtaaggcacgtgaggaggaggtggcttgaggcaaccatggcgggaggaatgaaagtggcggtctcgccggcagttggtcccgggccctggggctcgggagtcgggggcggtgggacagtgcggctactcttgatcctctccggctgcttggtctacggcacagctgaaactgatgtaaatgtggtcatgcttcaggaatcccaagtttgtgaaaagcgtgccagccaacaattctgttacacaaatgtgcttatcccaaaatggcatgatatatggacacggatacagatccgagtaaatagttccagattggttcgagtcacccaggtggagaatgaggagaaactgaaggagctagagcagtttagtatctggaactttttttcctcctttttaaaagagaaattgaatgacacctatgttaacgtgggtctatacagcacaaaaacctgcctcaaagttgagattatagagaaggacaccaagtacagtgtcattgtgatccggagatttgatcccaaactctttcttgttttccttcttggacttatgctatttttttgtggagacttgctgagcagaagtcaaattttctactactctactgggatgactgtgggaattgtggcctctctgctaatcatcatttttatactatctaagtttatgcctaagaaaagtcccatttacgtcatcctggtgggaggctggtctttttctctgtacctcattcaactagtttttaaaaatttacaagagatctggaggtgttactggcagtatcttttaagttatgtcctcacagttggattcatgagttttgcagtatgttacaagtatgggcccttggagaatgaacgaagtatcaacctgctgacctggaccttgcagctgatgggcctgtgtttcatgtattctggcatccagataccacatattgcccttgccattatcatcattgctctttgtactaagaacctggaacaccctattcagtggctgtacatcacctgcagaaaggtgtgtaagggagcagaaaagcctgttccccctcgtctcctgacagaagaagaatatcggatacaaggagaggtagaaacccgaaaggctttagaggagctccgagaattttgtaacagtccagactgctctgcttggaagactgtttctcgaatccagtctccaaaaagatttgctgactttgtggaaggctcttcccacctcacgccaaatgaagtttctgtccatgagcaggagtatggattagggagcattattgcccaggatgaaatctatgaggaagcatcctctgaggaggaggactcatattctcggtgtcctgctatcacacagaacaactttctaacctaggtagtggtcagttatctttacgtggactggcttggtgccttggtccatgttgcatgtgttgtgcaattgctttcaaccctttgaaacagagtgagatagatagggtagaaattctcctactgaaataagaggcctaaaaaggcctccctttggaaatgggaggtctctatgggatccctgaggaaggagagtggataaagtagtgaatgctgggtagttcacttcccattggttaagctaacagcccacttttatgtttccagagaaattggatggccacagctagcatggcattctagctccttcttgaaagttgattcaatcatggcatttctgtcactggctggctctccaaagtaagaactgttgttaagtgcaggaatgcttttagactataggctgcaacttccagagagaaatccacaaatctgagcctccttcactccagcttttatttcagtgactttagaataattattgatttaactgttttgggaggaaaatagatttttattgttttgttttttaaatgaatgtcttttaaaaaacataacaaactcatgttccagaaccagcaagtgctccagagtgacacaccccctaggcccctacatatttattaatatggattatccattaaagccccaggagctgttgttttaagctttgatttagttctcatacatatgatagaaagtcctatttgcctttaggaacatgcctgtaggctcttctgcaggtgagatgtactgggctttttattatattcaactttcaattccatcttaaaaaacatttgtattcttctcttcccattcttccttaccctgcctttgccctttcaggaagggtcagttcccttacctgtgaactatgtatgttcagagtagcattattcctgctagctaggagaagtcatcttgtttaggggatttggatgctttttatacgttctccattttcctgtcattgggtcatgttatctttgagttgctatgaaatcaggaaactgtctccttttcctttcccttcctttgtctacatgctctgtccattcctttcagccttttctcaccacccatactcccccaaatctgggtaatttttaagccttgaaactatgtagtttcttgatacacaatttgtagttatgcagcagccacaatttgcattgccaggaaataggctccaggttatcttcatgcctctgggtgctcattcagctgtcaagtttccatgaacttacacttatttatgattgcgtttctgacctgagatgtatgctgcctgttattgcagtagcattagtttcagattcttttgccattgcaaagtaccccttataaaccagcaatgtcatctgtgaggaagcaaattctcaagtgtctgtcatttacttggttctttttctttgtggtcttcacccttataccctggaaaagtctgtaattaccttagccaggaagatagatggtcatggcaagcgcacagcaccagacttactggctcaccaagatgatggaaaaaggcagatgattttttaaaaagccgtaatgactcctttagaccagccatttagcgtggtaattttgaaaggcctagctccattgcagacttccaaagggtcagctctgagactgccctccaggtgggcagttgattatttccaccagtgttttccagagccttaaactgtcctaagtgacaactacctcagttggcaggaaagagacatatagtagaaagtgaaaaatgagcagtatttgggcagatgctatgggttacagttgaagggtaaaaggaactttacattgggaaacctttatacccttgtgaattatgtacatggtaaaatgttctctctctacaaagaactattaaaacttctgaaatatactattttttaccttatttatagaaattgagacctagcatatttaagcataagtttattttaaaaaataattcaactcgtgcaagtggtctcaggattctctggagattttggtgcctcccctacttagggaggtgatagcttgcctataagggtgacttttcctgatcatgtctttatttcaatgagaaagcactgtgaaattgtgaaagattctcctctttctctgtttaataaacccccatgaaatatagtttccatctctagaccagttttttttccaccgtgtttagacttgaggtgaataaaatcaaactgttttttactccctatctggtagttggagacctgagctgtaggcagtggagatggcaattggttctgcagcctgagagttgctctcacacagtgaaggacggtgctgctctggtgtgctgtgtgtccttgccctgcctgcctgtggctctgcccagatgcttcagatcctctgtgttccggagattgcttgacttcaaccttctttaggagctgctcttgtctccctcttggccacttagtttgctggctcagtcactacttgaagaccccatttaatttttctctggcagttatagctcttgtgatttcagtacagtctcatctctcagaccaatctcatcaagaaggattgaagggataactatgaggtaagctggacattggagccgtgtttgctgccacgtcagcgtcttgctgggtgaatgtcaagccataaatgggctccagggctctggatctcatcagcattggaaatctattgcctctcatcagtctgaccaaattatgtagagcattaatgtagagactcccattaatgggaatacaagaggcagctggcataaaacatttctttcactttcctttcccactcagattgcttcaagagaccaacagaacacagggatcaaaaacaaggaaaatttagcaacttcattaccttctaataagtaattcctgttagccactgcatcccaccaaaactagtttatttttcccctcaaattcatgatttttacgtctgttacaaagggaattttgctgatagctctttgggtcccactgttccattttatgctaatagattccattctagggcccagccgtctcttgactgatggtgttccctttaacccttggcatgtataatagaattttggtgaatgaaagaacccaaataggccagatagtccccccaggccctgatatccataaaaggcttgggaatgcattatgtaattgtccttagtctttttgttgttttagaaaaaaaaaacaagatgggctcagatggatgcctacgtaaaaatggttcctagctgtgtactcataacttttctttgaattgagtagtgaaaggaaggaggaggaaaggaaattaaatgtccttctagtattctctggactcaagtctgacatatgagataataacctatattgaaatgccaagaattgtatctgaaacaagagaacagtttgacacatttatcatgccttcatattacatattaactgaaaccaattaataaacatatgaaatatccattgcacaaggcaaaggcacctaaaccttttgtttctttttctacatagcagaaattgattttttttttatttttttaggggaacctatataattatgacccagtgatgtcttttggtgacttaagcttatgaattcaggttacaattgagttgattctagatggttactaccttgaaaaggatgttggtgccttatgtgacacgagccagagcctgctgggaataaacaaagcagattcatgccaacaccaactcgtagctttagtggcagatgggagtggtcacagactcccaaaatgtggggctttggatttccacaccatcccacgtgtgtgtcatcttcctctttcacactcttgatgataatttgaaaatggtgaaatcacctctgaatttgcctatagcatgagcacattcttatgacaacataacaaatagttcataatgtgaatattagaaactgttacagcctgcagttaccataattttccatgtttgtggaattgatattgaaatagcagggctaaggaattactggcaagttttagcctgtgggtaataccttagggttatttaaatatttgtaattttatttaaatgttcatgaatgtttgaaaggaacaaaattatcagggatggctctttgccatgggtcttattttcaccctcttttctgtaagaaaaaagaacaatgtcttaatgtatttttaaagtttttggtatagtttctaattccaattttaataaaagttttatagatata

SEQ ID NO: 7592 - protein, 444 aa, Homo sapiens
MAGGMKVAVSPAVGPGPWGSGVGGGGTVRLLLILSGCLVYGTAETDVNVVMLQESQVCEKRASQQFCYTNVLIPKWHDIWTRIQIRVNSSRLVRVTQVENEEKLKELEQFSIWNFFSSFLKEKLNDTYVNVGLYSTKTCLKVEIIEKDTKYSVIVIRRFDPKLFLVFLLGLMLFFCGDLLSRSQIFYYSTGMTVGIVASLLIIIFILSKFMPKKSPIYVILVGGWSFSLYLIQLVFKNLQEIWRCYWQYLLSYVLTVGFMSFAVCYKYGPLENERSINLLTWTLQLMGLCFMYSGIQIPHIALAIIIIALCTKNLEHPIQWLYITCRKVCKGAEKPVPPRLLTEEEYRIQGEVETRKALEELREFCNSPDCSAWKTVSRIQSPKRFADFVEGSSHLTPNEVSVHEQEYGLGSIIAQDEIYEEASSEEEDSYSRCPAITQNNFLT

SEQ ID NO: 7593 - DNA, 5405 bp, Homo sapiens
gagttagttgctggggtaaggcacgtgaggaggaggtggcttgaggcaaccatggcgggaggaatgaaagtggcggtctcgccggcagttggtcccgggccctggggctcgggagtcgggggcggtgggacagtgcggctactcttgatcctctccggctgcttggtctacggcacagctgaaactgatgtaaatgtggtcatgcttcaggaatcccaagtttgtgaaaagcgtgccagccaacaattctgttacacaaatgtgcttatcccaaaatggcatgatatatggacacggatacagatccgagtaaatagttccagattggttcgagtcacccaggtggagaatgaggagaaactgaaggagctagagcaaagtcaaattttctactactctactgggatgactgtgggaattgtggcctctctgctaatcatcatttttatactatctaagtttatgcctaagaaaagtcccatttacgtcatcctggtgggaggctggtctttttctctgtacctcattcaactagtttttaaaaatttacaagagatctggaggtgttactggcagtatcttttaagttatgtcctcacagttggattcatgagttttgcagtatgttacaagtatgggcccttggagaatgaacgaagtatcaacctgctgacctggaccttgcagctgatgggcctgtgtttcatgtattctggcatccagataccacatattgcccttgccattatcatcattgctctttgtactaagaacctggaacaccctattcagtggctgtacatcacctgcagaaaggtgtgtaagggagcagaaaagcctgttccccctcgtctcctgacagaagaagaatatcggatacaaggagaggtagaaacccgaaaggctttagaggagctccgagaattttgtaacagtccagactgctctgcttggaagactgtttctcgaatccagtctccaaaaagatttgctgactttgtggaaggctcttcccacctcacgccaaatgaagtttctgtccatgagcaggagtatggattagggagcattattgcccaggatgaaatctatgaggaagcatcctctgaggaggaggactcatattctcggtgtcctgctatcacacagaacaactttctaacctaggtagtggtcagttatctttacgtggactggcttggtgccttggtccatgttgcatgtgttgtgcaattgctttcaaccctttgaaacagagtgagatagatagggtagaaattctcctactgaaataagaggcctaaaaaggcctccctttggaaatgggaggtctctatgggatccctgaggaaggagagtggataaagtagtgaatgctgggtagttcacttcccattggttaagctaacagcccacttttatgtttccagagaaattggatggccacagctagcatggcattctagctccttcttgaaagttgattcaatcatggcatttctgtcactggctggctctccaaagtaagaactgttgttaagtgcaggaatgcttttagactataggctgcaacttccagagagaaatccacaaatctgagcctccttcactccagcttttatttcagtgactttagaataattattgatttaactgttttgggaggaaaatagatttttattgttttgttttttaaatgaatgtcttttaaaaaacataacaaactcatgttccagaaccagcaagtgctccagagtgacacaccccctaggcccctacatatttattaatatggattatccattaaagccccaggagctgttgttttaagctttgatttagttctcatacatatgatagaaagtcctatttgcctttaggaacatgcctgtaggctcttctgcaggtgagatgtactgggctttttattatattcaactttcaattccatcttaaaaaacatttgtattcttctcttcccattcttccttaccctgcctttgccctttcaggaagggtcagttcccttacctgtgaactatgtatgttcagagtagcattattcctgctagctaggagaagtcatcttgtttaggggatttggatgctttttatacgttctccattttcctgtcattgggtcatgttatctttgagttgctatgaaatcaggaaactgtctccttttcctttcccttcctttgtctacatgctctgtccattcctttcagccttttctcaccacccatactcccccaaatctgggtaatttttaagccttgaaactatgtagtttcttgatacacaatttgtagttatgcagcagccacaatttgcattgccaggaaataggctccaggttatcttcatgcctctgggtgctcattcagctgtcaagtttccatgaacttacacttatttatgattgcgtttctgacctgagatgtatgctgcctgttattgcagtagcattagtttcagattcttttgccattgcaaagtaccccttataaaccagcaatgtcatctgtgaggaagcaaattctcaagtgtctgtcatttacttggttctttttctttgtggtcttcacccttataccctggaaaagtctgtaattaccttagccaggaagatagatggtcatggcaagcgcacagcaccagacttactggctcaccaagatgatggaaaaaggcagatgattttttaaaaagccgtaatgactcctttagaccagccatttagcgtggtaattttgaaaggcctagctccattgcagacttccaaagggtcagctctgagactgccctccaggtgggcagttgattatttccaccagtgttttccagagccttaaactgtcctaagtgacaactacctcagttggcaggaaagagacatatagtagaaagtgaaaaatgagcagtatttgggcagatgctatgggttacagttgaagggtaaaaggaactttacattgggaaacctttatacccttgtgaattatgtacatggtaaaatgttctctctctacaaagaactattaaaacttctgaaatatactattttttaccttatttatagaaattgagacctagcatatttaagcataagtttattttaaaaaataattcaactcgtgcaagtggtctcaggattctctggagattttggtgcctcccctacttagggaggtgatagcttgcctataagggtgacttttcctgatcatgtctttatttcaatgagaaagcactgtgaaattgtgaaagattctcctctttctctgtttaataaacccccatgaaatatagtttccatctctagaccagttttttttccaccgtgtttagacttgaggtgaataaaatcaaactgttttttactccctatctggtagttggagacctgagctgtaggcagtggagatggcaattggttctgcagcctgagagttgctctcacacagtgaaggacggtgctgctctggtgtgctgtgtgtccttgccctgcctgcctgtggctctgcccagatgcttcagatcctctgtgttccggagattgcttgacttcaaccttctttaggagctgctcttgtctccctcttggccacttagtttgctggctcagtcactacttgaagaccccatttaatttttctctggcagttatagctcttgtgatttcagtacagtctcatctctcagaccaatctcatcaagaaggattgaagggataactatgaggtaagctggacattggagccgtgtttgctgccacgtcagcgtcttgctgggtgaatgtcaagccataaatgggctccagggctctggatctcatcagcattggaaatctattgcctctcatcagtctgaccaaattatgtagagcattaatgtagagactcccattaatgggaatacaagaggcagctggcataaaacatttctttcactttcctttcccactcagattgcttcaagagaccaacagaacacagggatcaaaaacaaggaaaatttagcaacttcattaccttctaataagtaattcctgttagccactgcatcccaccaaaactagtttatttttcccctcaaattcatgatttttacgtctgttacaaagggaattttgctgatagctctttgggtcccactgttccattttatgctaatagattccattctagggcccagccgtctcttgactgatggtgttccctttaacccttggcatgtataatagaattttggtgaatgaaagaacccaaataggccagatagtccccccaggccctgatatccataaaaggcttgggaatgcattatgtaattgtccttagtctttttgttgttttagaaaaaaaaaacaagatgggctcagatggatgcctacgtaaaaatggttcctagctgtgtactcataacttttctttgaattgagtagtgaaaggaaggaggaggaaaggaaattaaatgtccttctagtattctctggactcaagtctgacatatgagataataacctatattgaaatgccaagaattgtatctgaaacaagagaacagtttgacacatttatcatgccttcatattacatattaactgaaaccaattaataaacatatgaaatatccattgcacaaggcaaaggcacctaaaccttttgtttctttttctacatagcagaaattgattttttttttatttttttaggggaacctatataattatgacccagtgatgtcttttggtgacttaagcttatgaattcaggttacaattgagttgattctagatggttactaccttgaaaaggatgttggtgccttatgtgacacgagccagagcctgctgggaataaacaaagcagattcatgccaacaccaactcgtagctttagtggcagatgggagtggtcacagactcccaaaatgtggggctttggatttccacaccatcccacgtgtgtgtcatcttcctctttcacactcttgatgataatttgaaaatggtgaaatcacctctgaatttgcctatagcatgagcacattcttatgacaacataacaaatagttcataatgtgaatattagaaactgttacagcctgcagttaccataattttccatgtttgtggaattgatattgaaatagcagggctaaggaattactggcaagttttagcctgtgggtaataccttagggttatttaaatatttgtaattttatttaaatgttcatgaatgtttgaaaggaacaaaattatcagggatggctctttgccatgggtcttattttcaccctcttttctgtaagaaaaaagaacaatgtcttaatgtatttttaaagtttttggtatagtttctaattccaattttaataaaagttttatagatata

SEQ ID NO: 7594 - protein, 371 aa, Homo sapiens
MAGGMKVAVSPAVGPGPWGSGVGGGGTVRLLLILSGCLVYGTAETDVNVVMLQESQVCEKRASQQFCYTNVLIPKWHDIWTRIQIRVNSSRLVRVTQVENEEKLKELEQSQIFYYSTGMTVGIVASLLIIIFILSKFMPKKSPIYVILVGGWSFSLYLIQLVFKNLQEIWRCYWQYLLSYVLTVGFMSFAVCYKYGPLENERSINLLTWTLQLMGLCFMYSGIQIPHIALAIIIIALCTKNLEHPIQWLYITCRKVCKGAEKPVPPRLLTEEEYRIQGEVETRKALEELREFCNSPDCSAWKTVSRIQSPKRFADFVEGSSHLTPNEVSVHEQEYGLGSIIAQDEIYEEASSEEEDSYSRCPAITQNNFLT

SEQ ID NO: 7595 - DNA, 574 bp, Homo sapiens
gttagttgctggggtaaggcacgtgaggaggaggtggcttgaggcaaccatggcgggaggaatgaaagtggcggtctcgccggcagttggtcccgggccctggggctcgggagtcgggggcggtgggacagtgcggctactcttgatcctctccggctgcttggtctacggcacagctgaaactgatgtaaatgtggtcatgcttcaggaatcccaagtttgtgaaaagcgtgccagccaacaattctgttacacaaatgtgcttatcccaaaatggcatgatatatggacacggatacagatccgagtaaatagttccagattggttcgagtcacccaggtggagaatgaggagaaactgaaggagctagagcagtttagtatctggaactttttttcctcctttttaaaagagaaattgaatgacacctatgttaacgtgggtctatacagcacaaaaacctgcctcaaagttgagattatagagaaggacaccaagtacagtgtcattgtgatccggagtaagtctcacctctgtttttctgatggattctgtagtgataaggactgagtt

SEQ ID NO: 7596 - protein, 173 aa, Homo sapiens
MAGGMKVAVSPAVGPGPWGSGVGGGGTVRLLLILSGCLVYGTAETDVNVVMLQESQVCEKRASQQFCYTNVLIPKWHDIWTRIQIRVNSSRLVRVTQVENEEKLKELEQFSIWNFFSSFLKEKLNDTYVNVGLYSTKTCLKVEIIEKDTKYSVIVIRSKSHLCFSDGFCSDKD

SEQ ID NO: 7597 - DNA, 2136 bp, Homo sapiens
ctctcccagtctctaagccgcggcgtctccgcggccgagaggccccagcgcccgcctccccggcccccgcccccacccccgcccccggctctgcccacgccctccgcccgccagcccggcagccagcgcagctccgggcctcgctccctgtgcgtcctgcgggggcggaggcgcggagaggcggcaagcgcagccggggagggtgggggggcagaggcacagacagaggcgcggaggctcggagagagaagacgtggagggagggacagagcctggacagcggtggacacggcatcgtgcgcggggaagagggcagcacgcagcaggcgccgagcgccgggcaccgagaagggcagcccgggtgatctccggccgtccatgcacagagcgccttcccccacagccgagcagccgccgggcggaggggacagcgcccgccggaccctgcagcccagactcaagcccagtgcccgagccatggcactgcctcggacgctgggggagctgcagctgtaccgggtcctgcagcgcgccaacctcctttcctactatgagaccttcatccagcagggaggggacgacgtgcagcagctgtgtgaggcgggtgaggaggagtttctggagatcatggcacttgtgggcatggccaccaagcccctccatgtccggcgcctgcagaaggcactgagagagtgggccaccaatccagggctcttcagtcaaccagtgcctgctgttcccgtctccagcatcccgctcttcaagatctctgagactgcgggtacccggaaagggagcatgagcaatgggcatggcagcccaggggaaaaggcaggcagtgcccgcagttttagccccaagagcccccttgaacttggagagaagctatcaccactgcctgggggacctggggcaggggacccccggatctggccaggccggagcactccagagtcggacgttggggcaggaggagaagaggaggctggcagcaggtgggactgggggtggtccagaccgactggagccagagatggtacgcatgcctgtctggggagagtctggatggacatttgcaggctgtggggtcatgtccaaggctgacgccgccccctgctgacctgcctctggcattgccagcccatgggctatggagccgacacatcctgcagcagacactgatggacgaggggctgcggctcgcccgcctcgtctcccacgaccgcgtgggccgcctcagcccctgtgtgcctgcgaagccacctctcgcagagttcgaggaagggctgctggacagatgtcctgccccaggaccccatcccgcgctggtggagggtcgcaggagcagcgtgaaagtggaggctgaggccagccggcagtgagggttggactggtgtcttcagacccaggacctcagacttctggctcacacagacccccacgctctccatccccggaatctagtcacaaccctggatccttcctctgcccttctcctgcctccccacctgctccatgggcataagactgtggggcttcaagcaataacaagcagaggcctggagagaggacacaaggagggtgcgtggtgccctcacccctgcccagagcgagggggcaaggactctgcctccagggcatctggggttttcccctccctcacacaacacactcccattctctttaggtttgcaccagtggtgtgagcagttggactcagtttggacaagggggaaagggggacttccctgggaaggtccagctaaaagtggcaacatttgcccccagaattgggggcctgggaacactggacctgctccttctcccctctccttccccgtttttgtgcttctggtttgtttctttaattaatttaacaagtgctgcagtttgccctcccattcccatctatcccccaagtcctttgcaatttcttccctgccctacataggggcggtgggtgtgggatcccttcactggccccctcgggaggcctgggttggactcagggtctcctccagctgggggctggaccgcagcacctatctgagcagttagagcgtctttcttttcagattgtgtacagtagattatttattttgttattttggaataaaatttattttatggcttagg

SEQ ID NO: 7598 - protein, 241 aa, Homo sapiens
MHRAPSPTAEQPPGGGDSARRTLQPRLKPSARAMALPRTLGELQLYRVLQRANLLSYYETFIQQGGDDVQQLCEAGEEEFLEIMALVGMATKPLHVRRLQKALREWATNPGLFSQPVPAVPVSSIPLFKISETAGTRKGSMSNGHGSPGEKAGSARSFSPKSPLELGEKLSPLPGGPGAGDPRIWPGRSTPESDVGAGGEEEAGSRWDWGWSRPTGARDGTHACLGRVWMDICRLWGHVQG

SEQ ID NO: 7599 - DNA, 2584 bp, Homo sapiens
cgcagctccgggcctcgctccctgtgcgtcctgcgggggcggaggcgcggagaggcggcaagcgcagccggggagggtgggggggcagaggcacagacagaggcgcggaggctcggagagagaagacgtggagggagggacagagcctggacagcggtggacacggcatcgtgcgcggggaagagggcagcacgcagcaggcgccgagcgccgggcaccgagaagggcagcccgggtgatctccggccgtccatgcacagagcgccttcccccacagccgagcagccgccgggcggaggggacagcgcccgccggaccctgcagcccagactcaagcccagtgcccgagccatggcactgcctcggacgctgggggagctgcagctgtaccgggtcctgcagcgcgccaacctcctttcctactatgagaccttcatccagcagggaggggacgacgtgcagcagctgtgtgaggcgggtgaggaggagtttctggagatcatggcacttgtgggcatggccaccaagcccctccatgtccggcgcctgcagaaggcactgagagagtgggccaccaatccagggctcttcagtcaaccagtgcctgctgttcccgtctccagcatcccgctcttcaagatctctgagactgcgggtacccggaaagggagcatgagcaatgggcatggcagcccaggggaaaaggcaggcagtgcccgcagttttagccccaagagcccccttgaacttggagagaagctatcaccactgcctgggggacctggggcaggggacccccggatctggccaggccggagcactccagagtcggacgttggggcaggaggagaagaggaggctggctcgccccccttctccccccctgcagggggaggagtccctgaggggactggggctggggggctggcagcaggtgggactgggggtggtccagaccgactggagccagagatggtacgcatggtggtggaaagtgtggagaggatcttccggagcttcccaaggggggatgctggggaggtcacatccctgctaaagctgaataagaagctggcacggagcgttgggcacatctttgagatggatgataatgacagccagaaggaagaggagatccgcaaatacagcatcatctatggccgtttcgactctaagcggcgggagggcaagcagctcagcctgcacgagctcaccatcaacgaggctgctgcccagttctgcatgagggacaacacgctcttattacggagagtggagctcttctctttgtcccgccaagtagcccgagagagcacctacttgtcctccttgaagggctccaggcttcaccctgaagaactgggaggccctccactgaagaagctgaaacaagaggttggagaacagagtcaccctgaaatccagcagcctcccccaggccctgagtcctatgtacccccataccgccccagcctggaggaggacagcgccagcctgtctggggagagtctggatggacatttgcaggctgtggggtcatgtccaaggctgacgccgccccctgctgacctgcctctggcattgccagcccatgggctatggagccgacacatcctgcagcagacactgatggacgaggggctgcggctcgcccgcctcgtctcccacgaccgcgtgggccgcctcagcccctgtgtgcctgcgaagccacctctcgcagagttcgaggaagggctgctggacagatgtcctgccccaggaccccatcccgcgctggtggagggtcgcaggagcagcgtgaaagtggaggctgaggccagccggcagtgagggttggactggtgtcttcagacccaggacctcagacttctggctcacacagacccccacgctctccatccccggaatctagtcacaaccctggatccttcctctgcccttctcctgcctccccacctgctccatgggcataagactgtggggcttcaagcaataacaagcagaggcctggagagaggacacaaggagggtgcgtggtgccctcacccctgcccagagcgagggggcaaggactctgcctccagggcatctggggttttcccctccctcacacaacacactcccattctctttaggtttgcaccagtggtgtgagcagttggactcagtttggacaagggggaaagggggacttccctgggaaggtccagctaaaagtggcaacatttgcccccagaattgggggcctgggaacactggacctgctccttctcccctctccttccccgtttttgtgcttctggtttgtttctttaattaatttaacaagtgctgcagtttgccctcccattcccatctatcccccaagtcctttgcaatttcttccctgccctacataggggcggtgggtgtgggatcccttcactggccccctcgggaggcctgggttggactcagggtctcctccagctgggggctggaccgcagcacctatctgagcagttagagcgtctttcttttcagattgtgtacagtagattatttattttgttattttggaataaaatttattttatggcttagg

SEQ ID NO: 7600 - protein, 525 aa, Homo sapiens; identical to SEQ ID NO: 1094

SEQ ID NO: 7601 - DNA, 3758 bp, Homo sapiens
cgcagctccgggcctcgctccctgtgcgtcctgcgggggcggaggcgcggagaggcggcaagcgcagccggggagggtgggggggcagaggcacagacagaggcgcggaggctcggagagagaagacgtggagggagggacagagcctggacagcggtggacacggcatcgtgcgcggggaagagggcagcacgcagcaggcgccgagcgccgggcaccgagaagggcagcccgggtgatctccggccgtccatgcacagagcgccttcccccacagccgagcagccgccgggcggaggggacagcgcccgccggaccctgcagcccagactcaagcccagtgcccgagccatggcactgcctcggacgctgggggagctgcagctgtaccgggtcctgcagcgcgccaacctcctttcctactatgagaccttcatccagcagggaggggacgacgtgcagcagctgtgtgaggcgggtgaggaggagtttctggagatcatggcacttgtgggcatggccaccaagcccctccatgtccggcgcctgcagaaggcactgagagagtgggccaccaatccagggctcttcagtcaaccagtgcctgctgttcccgtctccagcatcccgctcttcaagatctctgagactgcgggtacccggaaagggagcatgagcaatgggcatggcagcccaggggaaaaggcaggcagtgcccgcagttttagccccaagagcccccttgaacttggagagaagctatcaccactgcctgggggacctggggcaggggacccccggatctggccaggccggagcactccagagtcggacgttggggcaggaggagaagaggaggctggctcgccccccttctccccccctgcagggggaggagtccctgaggggactggggctggggggctggcagcaggtgggactgggggtggtccagaccgactggagccagagatggtacgcatggtggtggaaagtgtggagaggatcttccggagcttcccaaggggggatgctggggaggtcacatccctgctaaagctgaataagaagctggcacggagcgttgggcacatctttgagatggatgataatgacagccagaaggaagaggagatccgcaaatacagcatcatctatggccgtttcgactctaagcggcgggagggcaagcagctcagcctgcacgagctcaccatcaacgaggctgctgcccagttctgcatgagggacaacacgctcttattacggagagtggagctcttctctttgtcccgccaagtagcccgagagagcacctacttgtcctccttgaagggctccaggcttcaccctgaagaactgggaggccctccactgaagaagctgaaacaagaggttggagaacagagtcaccctgaaatccagcagcctcccccaggccctgagtcctatgtacccccataccgccccagcctggaggaggacagcgccagcctgtctggggagagtctggatggacatttgcaggctgtggggtcatgtccaaggctgacgccgccccctgctgacctgcctctggcattgccagcccatgggctatggagccgacacatcctgcagcagacactgatggacgaggggctgcggctcgcccgcctcgtctcccacgaccgcgtgggccgcctcagcccctgtgtgcctgcgaagccacctctcgcagagttcgaggaagggctgctggacagatgtcctgccccaggaccccatcccgcgctggtggagggtcgcaggagcagcgtgaaagtggaggctgaggccagccggcagtgagggttggactggtgtcttcagacccaggacctcagacttctggctcacacagacccccacgctctccatccccggaatctagtcacaaccctggatccttcctctgcccttctcctgcctccccacctgctccatgggcataagactgtggggcttcaagcaataacaagcagaggcctggagagaggacacaaggagggtgcgtggtgccctcacccctgcccagagcgagggggcaaggactctgcctccagggcatctggggttttcccctccctcacacaacacactcccattctctttaggtttgcaccagtggtgtgagcagttggactcagtttggacaagggggaaagggggacttccctgggaaggtccagctaaaagtggcaacatttgcccccagaattgggggcctgggaacactggacctgctccttctcccctctccttccccgtttttgtgcttctggtttgtttctttaattaatttaacaagtgctgcagtttgccctcccattcccatctatcccccaagtcctttgcaatttcttccctgccctacataggggcggtgggtgtgggatcccttcactggccccctcgggaggcctgggttggactcagggtctcctccagctgggggctggaccgcagcacctatctgagcagttagagcgtctttcttttcagattgtgtacagtagattatttattttgttattttggaataaaatttattttatggcttaggatctatgacccctgccttgagagggagaatgggataggggagtgaagggaagctggcggtggatggggcaacagaaaagatgcagcaggcagggccctctcatacactggagggccacatggccaggcctggacccagactctcaccctggctcccaggcagcattggaggtgtggagccatacgtagatgtcacagccacttggacccacttgggcacagtcagactccaaattcagagtatttgggggttagcatatgtcagagaggccagcacacttgctgctgtcttctgtgcagtgtctcaccctcccaaatttgtgttgtcacgtaggcaaaagcagatagacacatgttctatgtggtcatgcaactaaggtgccagctatacatttaacatatcctaggtacatacacgttcacacagctatacacgaagaatctcagcccttgtacttttgcatagtctcatacacgtatcagaagcctccacctggctaacaggaatttggggctttgggagattttttaatcagggcaaaacctgtactagtaaccacatgtccagacccctcctatgctcccacccagggtcccttgagctgcttcccattcccctagggctgagacccaatatcctctatccctggcctctagtgtaaatgtgtctgtatgttcctgcctatccgtcctaggccctgggtcagaatgggcggagaagccttccatgccctaacctgtgctcttacccagcccccctcctgctcagccccatcaccctcagagagctctgtatgtgtgtgtgcgtgcgtgtgcgcgctgcaggtgcaggcatgttggggtgtgtctcagagcctgaacttcccttccagtcagtgctggaaggaggtgggcaggggaatgatagaaaggaaggagtggattggctccacccactgtgcattctcctgttagtcttttcctcctgacccaggagtaggtggggataggagggcaccctccccatctgctgcttggcagggcatgagcaagtgtccagagcaggtctgtgggggtagtagaagagctgtctctttgggttctccctccagctgggatcaccaactggggttggcccttaggtccatgtgggacattgagatcccagattgcccatagtgggagggctgcaggag

SEQ ID NO: 7602 - protein, 525 aa, Homo sapiens; identical to SEQ ID NO: 1094

SEQ ID NO: 7603 - DNA, 2023 bp, Homo sapiens
gtgcgtcctgcgggggcggaggcgcggagaggcggcaagcgcagccggggagggtgggggggcagaggcacagacagaggcgcggaggctcggagagagaagacgtggagggagggacagagcctggacagcggtggacacggcatcgtgcgcggggaagagggcagcacgcagcaggcgccgagcgccgggcaccgagaagggcagcccgggtgatctccggccgtccatgcacagagcgccttcccccacagccgagcagccgccgggcggaggggacagcgcccgccggaccctgcagcccagactcaacagggaggggacgacgtgcagcagctgtgtgaggcgggtgaggaggagtttctggagatcatggcacttgtgggcatggccaccaagcccctccatgtccggcgcctgcagaaggcactgagagagtgggccaccaatccagggctcttcagtcaaccagtgcctgctgttcccgtctccagcatcccgctcttcaagatctctgagactgcgggtacccggaaagggagcatgagcaatgggcatggcagcccaggggaaaaggcaggcagtgcccgcagttttagccccaagagcccccttgaacttggagagaagctatcaccactgcctgggggacctggggcaggggacccccggatctggccaggccggagcactccagagtcggacgttggggcaggaggagaagaggaggctggctcgccccccttctccccccctgcagggggaggagtccctgaggggactggggctggggggctggcagcaggtgggactgggggtggtccagaccgactggagccagagatggtacgcatggtggtggaaagtgtggagaggatcttccggagcttcccaaggggggatgctggggaggtcacatccctgctaaagctgaataagaagctggcacggagcgttgggcacatctttgagatggatgataatgacagccagaaggaagaggagatccgcaaatacagcatcatctatggccgtttcgactctaagcggcgggagggcaagcagctcagcctgcacgaggtgagaacccccaggcctcctaggattgcccttgacttccaggtctccagccgcttacctctgcgagtttctacagtctccgactatctttcattatctcttgaccaggaccccaggccctgatcccctccccaacaggcccctaccccagcggccgcagtgcttccatcctcagctgagggggaagcagagatacaggcagcaccgagctgttcagctccttgtcactcaggaccccacaggagaggaggaggccccgggcattcctaggaagctgtgggtgctgacctctgtcttcccacctcagaaagctcccatgtagtgtcaaaaccaaagcaagcgtctgatggatgggcctcatttgtccaatggtgaaggggtgtgaggaggtctggtgaggcagcggggaagttcgaattctgactctcctggctgccctccctccacagctcaccatcaacgaggctgctgcccagttctgcatgagggacaacacgctcttattacggagagtggagctcttctctttgtcccgccaagtagcccgagagagcacctacttgtcctccttgaagggctccaggtgagaccccttccccaggtccttcctggactggaatcctgctatggagttagatcatgtcctaaccttcagctcaggcagctctaggcctgcttcccgcccacctggatgtcctgcttttggccaagtcagcttgtctcaggtctggtctctcctcccatccatgtcgggtccccccaaccccctacaacaatagtgcttgaactagagactctttctcggccagcttcttggcaaaggttttaaataacacatgcctctggctgggttctgtgctctgccagtcgagtggccctcgtcagcctcatccactttattcttacccatcttttcaggcttcaccctgaagaactgggaggc

SEQ ID NO: 7604 - protein, 67 aa, Homo sapiens
MHRAPSPTAEQPPGGGDSARRTLQPRLNREGTTCSSCVRRVRRSFWRSWHLWAWPPSPSMSGACRRH

SEQ ID NO: 7605 - DNA, 1866 bp, Homo sapiens
agacagaggcgcggaggctcggagagagaagacgtggagggagggacagagcctggacagcggtggacacggcatcgtgcgcggggaagaggctgcagctgtaccgggtcctgcagcgcgccaacctcctttcctactatgagaccttcatccagcagggaggggacgacgtgcagcagctgtgtgaggcgggtgaggaggagtttctggagatcatggcacttgtgggcatggccaccaagcccctccatgtccggcgcctgcagaaggcactgagagagtgggccaccaatccagggctcttcagtcaaccagtgcctgctgttcccgtctccagcatcccgctcttcaagatctctgagactgcgggtacccggaaagggagcatgagcaatgggcatggcagcccaggggaaaaggcaggcagtgcccgcagttttagccccaagagcccccttgaacttggagagaagctatcaccactgcctgggggacctggggcaggggacccccggatctggccaggccggagcactccagagtcggacgttggggcaggaggagaagaggaggctggctcgccccccttctccccccctgcagggggaggagtccctgaggggactggggctggggggctggcagcaggtgggactgggggtggtccagaccgactggagccagagatggtacgcatggtggtggaaagtgtggagaggatcttccggagcttcccaaggggggatgctggggaggtcacatccctgctaaagctgaataagaagctggcacggagcgttgggcacatctttgagatggatgataatgacagccagaaggaagaggagatccgcaaatacagcatcatctatggccgtttcgactctaagcggcgggagggcaagcagctcagcctgcacgaggtgagaacccccaggcctcctaggattgcccttgacttccaggtctccagccgcttacctctgcgagtttctacagtctccgactatctttcattatctcttgaccaggaccccaggccctgatcccctccccaacaggcccctaccccagcggccgcagtgcttccatcctcagctgagggggaagcagagatacaggcagcaccgagctgttcagctccttgtcactcaggaccccacaggagaggaggaggccccgggcattcctaggaagctgtgggtgctgacctctgtcttcccacctcagaaagctcccatgtagtgtcaaaaccaaagcaagcgtctgatggatgggcctcatttgtccaatggtgaaggggtgtgaggaggtctggtgaggcagcggggaagttcgaattctgactctcctggctgccctccctccacagctcaccatcaacgaggctgctgcccagttctgcatgagggacaacacgctcttattacggagagtggagctcttctctttgtcccgccaagtagcccgagagagcacctacttgtcctccttgaagggctccaggtgagaccccttccccaggtccttcctggactggaatcctgctatggagttagatcatgtcctaaccttcagctcaggcagctctaggcctgcttcccgcccacctggatgtcctgcttttggccaagtcagcttgtctcaggtctggtctctcctcccatccatgtcgggtccccccaaccccctacaacaatagtgcttgaactagagactctttctcggccagcttcttggcaaaggttttaaataacacatgcctctggctgggttctgtgctctgccagtcgagtggccctcgtcagcctcatccactttattcttacccatcttttcaggcttcaccctgaagaactgggaggc

SEQ ID NO: 7606 - protein, 276 aa, Homo sapiens
MALVGMATKPLHVRRLQKALREWATNPGLFSQPVPAVPVSSIPLFKISETAGTRKGSMSNGHGSPGEKAGSARSFSPKSPLELGEKLSPLPGGPGAGDPRIWPGRSTPESDVGAGGEEEAGSPPFSPPAGGGVPEGTGAGGLAAGGTGGGPDRLEPEMVRMVVESVERIFRSFPRGDAGEVTSLLKLNKKLARSVGHIFEMDDNDSQKEEEIRKYSIIYGRFDSKRREGKQLSLHEVRTPRPPRIALDFQVSSRLPLRVSTVSDYLSLSLDQDPRP

SEQ ID NO: 7607 - DNA, 993 bp, Homo sapiens
agacgtggagggagggacagagcctggacagcggtggacacggcatcgtgctgcggctcgcccgcctcgtctcccacgaccgcgtgggccgcctcagcccctgtgtgcctgcgaagccacctctcgcagagttcgaggaagggctgctggacagatgtcctgccccaggaccccatcccgcgctggtggagggtcgcaggagcagcgtgaaagtggaggctgaggccagccggcagtgagggttggactggtgtcttcagacccaggacctcagacttctggctcacacagacccccacgctctccatccccggaatctagtcacaaccctggatccttcctctgcccttctcctgcctccccacctgctccatgggcataagactgtggggcttcaagcaataacaagcagaggcctggagagaggacacaaggagggtgcgtggtgccctcacccctgcccagagcgagggggcaaggactctgcctccagggcatctggggttttcccctccctcacacaacacactcccattctctttaggtttgcaccagtggtgtgagcagttggactcagtttggacaagggggaaagggggacttccctgggaaggtccagctaaaagtggcaacatttgcccccagaattgggggcctgggaacactggacctgctccttctcccctctccttccccgtttttgtgcttctggtttgtttctttaattaatttaacaagtgctgcagtttgccctcccattcccatctatcccccaagtcctttgcaatttcttccctgccctacataggggcggtgggtgtgggatcccttcactggccccctcgggaggcctgggttggactcagggtctcctccagctgggggctggaccgcagcacctatctgagcagttagagcgtctttcttttcagattgtgtacagtagattatttattttgttattttggaataaaatttattttatggcttagg

SEQ ID NO: 7608 - protein, 78 aa, Homo sapiens
TWREGQSLDSGGHGIVLRLARLVSHDRVGRLSPCVPAKPPLAEFEEGLLDRCPAPGPHPALVEGRRSSVKVEAEASRQ

SEQ ID NO: 7609 - DNA, 2167 bp, Homo sapiens
agacgtggagggagggacagagcctggacagcggtggacacggcatcgtgctgcggctcgcccgcctcgtctcccacgaccgcgtgggccgcctcagcccctgtgtgcctgcgaagccacctctcgcagagttcgaggaagggctgctggacagatgtcctgccccaggaccccatcccgcgctggtggagggtcgcaggagcagcgtgaaagtggaggctgaggccagccggcagtgagggttggactggtgtcttcagacccaggacctcagacttctggctcacacagacccccacgctctccatccccggaatctagtcacaaccctggatccttcctctgcccttctcctgcctccccacctgctccatgggcataagactgtggggcttcaagcaataacaagcagaggcctggagagaggacacaaggagggtgcgtggtgccctcacccctgcccagagcgagggggcaaggactctgcctccagggcatctggggttttcccctccctcacacaacacactcccattctctttaggtttgcaccagtggtgtgagcagttggactcagtttggacaagggggaaagggggacttccctgggaaggtccagctaaaagtggcaacatttgcccccagaattgggggcctgggaacactggacctgctccttctcccctctccttccccgtttttgtgcttctggtttgtttctttaattaatttaacaagtgctgcagtttgccctcccattcccatctatcccccaagtcctttgcaatttcttccctgccctacataggggcggtgggtgtgggatcccttcactggccccctcgggaggcctgggttggactcagggtctcctccagctgggggctggaccgcagcacctatctgagcagttagagcgtctttcttttcagattgtgtacagtagattatttattttgttattttggaataaaatttattttatggcttaggatctatgacccctgccttgagagggagaatgggataggggagtgaagggaagctggcggtggatggggcaacagaaaagatgcagcaggcagggccctctcatacactggagggccacatggccaggcctggacccagactctcaccctggctcccaggcagcattggaggtgtggagccatacgtagatgtcacagccacttggacccacttgggcacagtcagactccaaattcagagtatttgggggttagcatatgtcagagaggccagcacacttgctgctgtcttctgtgcagtgtctcaccctcccaaatttgtgttgtcacgtaggcaaaagcagatagacacatgttctatgtggtcatgcaactaaggtgccagctatacatttaacatatcctaggtacatacacgttcacacagctatacacgaagaatctcagcccttgtacttttgcatagtctcatacacgtatcagaagcctccacctggctaacaggaatttggggctttgggagattttttaatcagggcaaaacctgtactagtaaccacatgtccagacccctcctatgctcccacccagggtcccttgagctgcttcccattcccctagggctgagacccaatatcctctatccctggcctctagtgtaaatgtgtctgtatgttcctgcctatccgtcctaggccctgggtcagaatgggcggagaagccttccatgccctaacctgtgctcttacccagcccccctcctgctcagccccatcaccctcagagagctctgtatgtgtgtgtgcgtgcgtgtgcgcgctgcaggtgcaggcatgttggggtgtgtctcagagcctgaacttcccttccagtcagtgctggaaggaggtgggcaggggaatgatagaaaggaaggagtggattggctccacccactgtgcattctcctgttagtcttttcctcctgacccaggagtaggtggggataggagggcaccctccccatctgctgcttggcagggcatgagcaagtgtccagagcaggtctgtgggggtagtagaagagctgtctctttgggttctccctccagctgggatcaccaactggggttggcccttaggtccatgtgggacattgagatcccagattgcccatagtgggagggctgcaggag

SEQ ID NO: 7610 - protein, 98 aa, Homo sapiens
MQQAGPSHTLEGHMARPGPRLSPWLPGSIGGVEPYVDVTATWTHLGTVRLQIQSIWGLAYVREASTLAAVFCAVSHPPKFVLSRRQKQIDTCSMWSCN

SEQ ID NO: 7611 - DNA, 1766 bp, Homo sapiens
cccacgaccgcgtgggccgcctcagcccctgtgtgcctgcgaagccacctctcgcaggtgaggcagccagcagtgctgtccccaagcaccccggccactcaggccccacacagcaattctggtgtcctggggccaggtgggaggaagagggatatagtcgtcagagagggcagtaggatggctgggctccagccagccaggccttggggtgcagagaggcagaccctgccgagctgctcccaccatggaaagtctggtcctagtgtagatctgtgaaaggggaactggggaatggggggacagagaaaagaggatgaaggagcaggaaggaggagcatcaataagggaagcctcccattcccatctatcccccaagtcctttgcaatttcttccctgccctacataggggcggtgggtgtgggatcccttcactggccccctcgggaggcctgggttggactcagggtctcctccagctgggggctggaccgcagcacctatctgagcagttagagcgtctttcttttcagattgtgtacagtagattatttattttgttattttggaataaaatttattttatggcttaggatctatgacccctgccttgagagggagaatgggataggggagtgaagggaagctggcggtggatggggcaacagaaaagatgcagcaggcagggccctctcatacactggagggccacatggccaggcctggacccagactctcaccctggctcccaggcagcattggaggtgtggagccatacgtagatgtcacagccacttggacccacttgggcacagtcagactccaaattcagagtatttgggggttagcatatgtcagagaggccagcacacttgctgctgtcttctgtgcagtgtctcaccctcccaaatttgtgttgtcacgtaggcaaaagcagatagacacatgttctatgtggtcatgcaactaaggtgccagctatacatttaacatatcctaggtacatacacgttcacacagctatacacgaagaatctcagcccttgtacttttgcatagtctcatacacgtatcagaagcctccacctggctaacaggaatttggggctttgggagattttttaatcagggcaaaacctgtactagtaaccacatgtccagacccctcctatgctcccacccagggtcccttgagctgcttcccattcccctagggctgagacccaatatcctctatccctggcctctagtgtaaatgtgtctgtatgttcctgcctatccgtcctaggccctgggtcagaatgggcggagaagccttccatgccctaacctgtgctcttacccagcccccctcctgctcagccccatcaccctcagagagctctgtatgtgtgtgtgcgtgcgtgtgcgcgctgcaggtgcaggcatgttggggtgtgtctcagagcctgaacttcccttccagtcagtgctggaaggaggtgggcaggggaatgatagaaaggaaggagtggattggctccacccactgtgcattctcctgttagtcttttcctcctgacccaggagtaggtggggataggagggcaccctccccatctgctgcttggcagggcatgagcaagtgtccagagcaggtctgtgggggtagtagaagagctgtctctttgggttctccctccagctgggatcaccaactggggttggcccttaggtccatgtgggacattgagatcccagattgcccatagtgggagggctgcaggag

SEQ ID NO: 7612 - protein, 99 aa, Homo sapiens
MGGQRKEDEGAGRRSINKGSLPFPSIPQVLCNFFPALHRGGGCGIPSLAPSGGLGWTQGLLQLGAGPQHLSEQLERLSFQIVYSRLFILLFWNKIYFMA

SEQ ID NO: 7613 - DNA, 2187 bp, Homo sapiens
tatgggcaatctgggatctcaatgtcccacatggacctaagggccaaccccagttggtgatcccagctggagggagaacccaaagagacagctcttctactacccccacagacctgctctggacacttgctcatgccctgccaagcagcagatggggagggtgccctcctatccccacctactcctgggtcaggaggaaaagactaacaggagaatgcacagtgggtggagccaatccactccttcctttctatcattcccctgcccacctccttccagcactgactggaagggaagttcaggctctgagacacaccccaacatgcctgcacctgcagcgcgcacacgcacgcacacacacatacaacacatttacactagaggccagggatagaggatattgggtctcagccctaggggaatgggaagcagctcaagggaccctgggtgggagcataggaggggtctggacatgtggttactagtacaggttttgccctgattaaaaaatctcccaaagccccaaattcctgttagccaggtggaggcttctgatacgtgtatgagactatgcaaaagtacaagggctgagattcttcgtgtatagctgtgtgaacgtgtatgtacctaggatatgttaaatgtatagctggcaccttagttgcatgaccacatagaacatgtgtctatctgcttttgcctacgtgacaacacaaatttgggagggtgagacactgcacagaagacagcagcaagtgtgctggcctctctgacatatgctaacccccaaatactctgaatttggagtctgactgtgcccaagtgggtccaagtggctgtgacatctacgtatggctccacacctccaatgctgcctgggagccagggtgagagtctgggtccaggcctggccatgtggccctccagtgtatgagagggccctgcctgctgcatcttttctgttgccccatccaccgccagcttcccttcactcccctatcccattctccctctcaaggcaggggtcatagatcctaagccataaaataaattttattccaaaataacaaaataaataatctactgtacacaatctgaaaagaaagacgctctaactgctcagataggtgctgcggtccagcccccagctggaggagaccctgagtccaacccaggcctcccgagggggccagtgaagggatcccacacccaccgcccctatgtagggcagggaagaaattgcaaaggacttgggggatagatgggaatgggagggcaaactgcagcacttgttaaattaattaaagaaacaaaccagaagcacaaaaacggggaaggagaggggagaaggagcaggtccagtgttcccaggcccccaattctgggggcaaatgttgccacttttagctggaccttcccagggaagtccccctttcccccttgtccaaactgagtccaactgctcacaccactggtgcaaacctaaagagaatgggagtgtgttgtgtgagggaggggaaaaccccagatgccctggaggcagagtccttgccccctcgctctgggcaggggtgagggcaccacgcaccctccttgtgtcctctctccaggcctctgcttgttattgcttgaagccccacagtcttatgcccatggagcaggtggggaggcaggagaagggcagaggaaggatccagggttgtgactagattccggggatggagagcgtgggggtctgtgtgagccagaagtctgaggtcctgggtctgaagacaccagtccaaccctcactgccggctggcctcagcctccactttcacgctgctcctgcgaccctccaccagcgcgggatggggtcctggggcaggacatctgtccagcagcccttcctcgaactctgcagggaaaagggggcagttaggagactgcagggtgactggctgcagacagaggtggttgggaacagaagcaggggcaaagaaagctgtgaagatgggctcagtttaggtttattgaattactgcctcctgcccactgcatgtgtatggggggttccattcccatgtgtgtgagccccctcccctccctggctgtgcgtagctctgtctctgtctgtctctctctctttctctcccgcctcctcggttgcgctggaatttctggttctgtcaggagctgcgggggtgg

SEQ ID NO: 7614 - protein, 80 aa, Homo sapiens [sequence omitted]

SEQ ID NO: 7615 - DNA, 2792 bp, Homo sapiens
agaagactgagctcagagcatagaaatagcttgcccaggccatgactaagtcaggataaggagctggagcttgtttcctcactcagtggtcctgactttgcaccactctgcatttgcctagcctgccttcctctaactgtgctctccctacttccaggcctcacctgcagatgccccccagcctgggccagatgagcctgccctttgaccagcctcacccccagggcctgctgccgtgccagcctcaggagcatgctgtgtccagccctgaccccctgctctgctcagatgtgaccatggtggaagacagctgcctgagccagccagtgacagcgtttcctcagggcacttggattggtgaagacatattccctcctctgctgcctcccactgaacaggacctcactaagcttctcctggaggggcaaggggagtcggggggagggtccttgggggcacagcccctcctgcagccctcccactatgggcaatctgggatctcaatgtcccacatggacctaagggccaaccccagttggtgatcccagctggagggagaacccaaagagacagctcttctactacccccacagacctgctctggacacttgctcatgccctgccaagcagcagatggggagggtgccctcctatccccacctactcctgggtcaggaggaaaagactaacaggagaatgcacagtgggtggagccaatccactccttcctttctatcattcccctgcccacctccttccagcactgactggaagggaagttcaggctctgagacacaccccaacatgcctgcacctgcagcgcgcacacgcacgcacacacacatacagagctctctgagggtgatggggctgagcaggaggggggctgggtaagagcacaggttagggcatggaaggcttctccgcccattctgacccagggcctaggacggataggcaggaacatacagacacatttacactagaggccagggatagaggatattgggtctcagccctaggggaatgggaagcagctcaagggaccctgggtgggagcataggaggggtctggacatgtggttactagtacaggttttgccctgattaaaaaatctcccaaagccccaaattcctgttagccaggtggaggcttctgatacgtgtatgagactatgcaaaagtacaagggctgagattcttcgtgtatagctgtgtgaacgtgtatgtacctaggatatgttaaatgtatagctggcaccttagttgcatgaccacatagaacatgtgtctatctgcttttgcctacgtgacaacacaaatttgggagggtgagacactgcacagaagacagcagcaagtgtgctggcctctctgacatatgctaacccccaaatactctgaatttggagtctgactgtgcccaagtgggtccaagtggctgtgacatctacgtatggctccacacctccaatgctgcctgggagccagggtgagagtctgggtccaggcctggccatgtggccctccagtgtatgagagggccctgcctgctgcatcttttctgttgccccatccaccgccagcttcccttcactcccctatcccattctccctctcaaggcaggggtcatagatcctaagccataaaataaattttattccaaaataacaaaataaataatctactgtacacaatctgaaaagaaagacgctctaactgctcagataggtgctgcggtccagcccccagctggaggagaccctgagtccaacccaggcctcccgagggggccagtgaagggatcccacacccaccgcccctatgtagggcagggaagaaattgcaaaggacttgggggatagatgggaatgggagggcaaactgcagcacttgttaaattaattaaagaaacaaaccagaagcacaaaaacggggaaggagaggggagaaggagcaggtccagtgttcccaggcccccaattctgggggcaaatgttgccacttttagctggaccttcccagggaagtccccctttcccccttgtccaaactgagtccaactgctcacaccactggtgcaaacctaaagagaatgggagtgtgttgtgtgagggaggggaaaaccccagatgccctggaggcagagtccttgccccctcgctctgggcaggggtgagggcaccacgcaccctccttgtgtcctctctccaggcctctgcttgttattgcttgaagccccacagtcttatgcccatggagcaggtggggaggcaggagaagggcagaggaaggatccagggttgtgactagattccggggatggagagcgtgggggtctgtgtgagccagaagtctgaggtcctgggtctgaagacaccagtccaaccctcactgccggctggcctcagcctccactttcacgctgctcctgcgaccctccaccagcgcgggatggggtcctggggcaggacatctgtccagcagcccttcctcgaactctgcagggaaaagggggcagttaggagactgcagggtgactggctgcagacagaggtggttgggaacagaagcaggggcaaagaaagctgtgaagatgggctcagtttaggtttattgaattactgcctcctgcccactgcatgtgtatggggggttccattcccatgtgtgtgagccccctcccctccctggctgtgcgtagctctgtctctgtctgtctctctctctttctctcccgcctcctcggttgcgctggaatttctggttctgtcaggagctgcgggggtgg

SEQ ID NO: 7616 - protein, 123 aa, Homo sapiens [sequence omitted]

SEQ ID NO: 7617 - DNA, 2209 bp, Homo sapiens
ctcatctttgccttctagccctccagcttcctctctcttctaggctctttcctcctagcttactaaacccgccttttttccagtctcttccatcctcttccttagttctctctactttccttttccacctctcctccttcaagtctcctcccaccttcccccacttcttaggatgatcagatttgcccctggaagggatcctaacaacacagtgcgatggttaatccccactcagattcaaagcctgctttccaaactcacttaagagctctctgagggtgatggggctgagcaggaggggggctgggtaagagcacaggttagggcatggaaggcttctccgcccattctgacccagggcctaggacggataggcaggaacatacagacacatttacactagaggccagggatagaggatattgggtctcagccctaggggaatgggaagcagctcaagggaccctgggtgggagcataggaggggtctggacatgtggttactagtacaggttttgccctgattaaaaaatctcccaaagccccaaattcctgttagccaggtggaggcttctgatacgtgtatgagactatgcaaaagtacaagggctgagattcttcgtgtatagctgtgtgaacgtgtatgtacctaggatatgttaaatgtatagctggcaccttagttgcatgaccacatagaacatgtgtctatctgcttttgcctacgtgacaacacaaatttgggagggtgagacactgcacagaagacagcagcaagtgtgctggcctctctgacatatgctaacccccaaatactctgaatttggagtctgactgtgcccaagtgggtccaagtggctgtgacatctacgtatggctccacacctccaatgctgcctgggagccagggtgagagtctgggtccaggcctggccatgtggccctccagtgtatgagagggccctgcctgctgcatcttttctgttgccccatccaccgccagcttcccttcactcccctatcccattctccctctcaaggcaggggtcatagatcctaagccataaaataaattttattccaaaataacaaaataaataatctactgtacacaatctgaaaagaaagacgctctaactgctcagataggtgctgcggtccagcccccagctggaggagaccctgagtccaacccaggcctcccgagggggccagtgaagggatcccacacccaccgcccctatgtagggcagggaagaaattgcaaaggacttgggggatagatgggaatgggagggcaaactgcagcacttgttaaattaattaaagaaacaaaccagaagcacaaaaacggggaaggagaggggagaaggagcaggtccagtgttcccaggcccccaattctgggggcaaatgttgccacttttagctggaccttcccagggaagtccccctttcccccttgtccaaactgagtccaactgctcacaccactggtgcaaacctaaagagaatgggagtgtgttgtgtgagggaggggaaaaccccagatgccctggaggcagagtccttgccccctcgctctgggcaggggtgagggcaccacgcaccctccttgtgtcctctctccaggcctctgcttgttattgcttgaagccccacagtcttatgcccatggagcaggtggggaggcaggagaagggcagaggaaggatccagggttgtgactagattccggggatggagagcgtgggggtctgtgtgagccagaagtctgaggtcctgggtctgaagacaccagtccaaccctcactgccggctggcctcagcctccactttcacgctgctcctgcgaccctccaccagcgcgggatggggtcctggggcaggacatctgtccagcagcccttcctcgaactctgcagggaaaagggggcagttaggagactgcagggtgactggctgcagacagaggtggttgggaacagaagcaggggcaaagaaagctgtgaagatgggctcagtttaggtttattgaattactgcctcctgcccactgcatgtgtatggggggttccattcccatgtgtgtgagccccctcccctccctggctgtgcgtagctctgtctctgtctgtctctctctctttctctcccgcctcctcggttgcgctggaatttctggttctgtcaggagctgcgggggtgg

SEQ ID NO: 7618 - protein, 117 aa, Homo sapiens [sequence omitted]

SEQ ID NO: 7619 - DNA, 2940 bp, Homo sapiens
ctcttctctgtgtcgtcagagctccagggagggacctgggtagaaggagaagccggaaacagcgggctggggcagccactgcttacactgaagagggaggacgggagaggagtgtgtgtgtgtgtgtgtgtgtgtgtgtgtatgtatgtgtgtgctttatcttatttttctttttggtggtggtggtggaaggggggaggtgctagcagggccagccttgaactcgctggacagagctacagacctatggggcctggaagtgcccgctgagaaagggagaagacagcagaggggttgccgaggcaacctccaagtcccagatcatgtctctgtggggtctggtctccaagatgcccccagaaaaagtgcagcggctctatgtcgactttccccaacacctgcggcatcttctgggtgactggctggagagccagccctgggagttcctggtcggctccgacgccttctgctgcaacttggctagtgccctactttcagacactgtccagcaccttcaggcctcggtgggagagcagggggaggggagcaccatcttgcaacacatcagcacccttgagagcatatatcagagggtccttgggggcacagcccctcctgcagccctcccactatgggcaatctgggatctcaatgtcccacatggacctaagggccaaccccagttggtgatcccagctggagggagaacccaaagagacagctcttctactacccccacagacctgctctggacacttgctcatgccctgccaagcagcagatggggagggtgccctcctatccccacctactcctgggtcaggaggaaaagactaacaggagaatgcacagtgggtggagccaatccactccttcctttctatcattcccctgcccacctccttccagcactgactggaagggaagttcaggctctgagacacaccccaacatgcctgcacctgcagcgcgcacacgcacgcacacacacatacagagctctctgagggtgatggggctgagcaggaggggggctgggtaagagcacaggttagggcatggaaggcttctccgcccattctgacccagggcctaggacggataggcaggaacatacagacacatttacactagaggccagggatagaggatattgggtctcagccctaggggaatgggaagcagctcaagggaccctgggtgggagcataggaggggtctggacatgtggttactagtacaggttttgccctgattaaaaaatctcccaaagccccaaattcctgttagccaggtggaggcttctgatacgtgtatgagactatgcaaaagtacaagggctgagattcttcgtgtatagctgtgtgaacgtgtatgtacctaggatatgttaaatgtatagctggcaccttagttgcatgaccacatagaacatgtgtctatctgcttttgcctacgtgacaacacaaatttgggagggtgagacactgcacagaagacagcagcaagtgtgctggcctctctgacatatgctaacccccaaatactctgaatttggagtctgactgtgcccaagtgggtccaagtggctgtgacatctacgtatggctccacacctccaatgctgcctgggagccagggtgagagtctgggtccaggcctggccatgtggccctccagtgtatgagagggccctgcctgctgcatcttttctgttgccccatccaccgccagcttcccttcactcccctatcccattctccctctcaaggcaggggtcatagatcctaagccataaaataaattttattccaaaataacaaaataaataatctactgtacacaatctgaaaagaaagacgctctaactgctcagataggtgctgcggtccagcccccagctggaggagaccctgagtccaacccaggcctcccgagggggccagtgaagggatcccacacccaccgcccctatgtagggcagggaagaaattgcaaaggacttgggggatagatgggaatgggagggcaaactgcagcacttgttaaattaattaaagaaacaaaccagaagcacaaaaacggggaaggagaggggagaaggagcaggtccagtgttcccaggcccccaattctgggggcaaatgttgccacttttagctggaccttcccagggaagtccccctttcccccttgtccaaactgagtccaactgctcacaccactggtgcaaacctaaagagaatgggagtgtgttgtgtgagggaggggaaaaccccagatgccctggaggcagagtccttgccccctcgctctgggcaggggtgagggcaccacgcaccctccttgtgtcctctctccaggcctctgcttgttattgcttgaagccccacagtcttatgcccatggagcaggtggggaggcaggagaagggcagaggaaggatccagggttgtgactagattccggggatggagagcgtgggggtctgtgtgagccagaagtctgaggtcctgggtctgaagacaccagtccaaccctcactgccggctggcctcagcctccactttcacgctgctcctgcgaccctccaccagcgcgggatggggtcctggggcaggacatctgtccagcagcccttcctcgaactctgcagggaaaagggggcagttaggagactgcagggtgactggctgcagacagaggtggttgggaacagaagcaggggcaaagaaagctgtgaagatgggctcagtttaggtttattgaattactgcctcctgcccactgcatgtgtatggggggttccattcccatgtgtgtgagccccctcccctccctggctgtgcgtagctctgtctctgtctgtctctctctctttctctcccgcctcctcggttgcgctggaatttctggttctgtcaggagctgcgggggtgg

SEQ ID NO: 7620 - protein, 227 aa, Homo sapiens
MSLWGLVSKMPPEKVQRLYVDFPQHLRHLLGDWLESQPWEFLVGSDAFCCNLASALLSDTVQHLQASVGEQGEGSTILQHISTLESIYQRVLGGTAPPAALPLWAIWDLNVPHGPKGQPQLVIPAGGRTQRDSSSTTPTDLLWTLAHALPSSRWGGCPPIPTYSWVRRKRLTGECTVGGANPLLPFYHSPAHLLPALTGREVQALRHTPTCLHLQRAHARTHTYRAL

SEQ ID NO: 7621 - DNA, 5117 bp, Homo sapiens
ctcttctctgtgtcgtcagagctccagggagggacctgggtagaaggagaagccggaaacagcgggctggggcagccactgcttacactgaagagggaggacgggagaggagtgtgtgtgtgtgtgtgtgtgtgtgtgtgtatgtatgtgtgtgctttatcttatttttctttttggtggtggtggtggaaggggggaggtgctagcagggccagccttgaactcgctggacagagctacagacctatggggcctggaagtgcccgctgagaaagggagaagacagcagaggggttgccgaggcaacctccaagtcccagatcatgtctctgtggggtctggtctccaagatgcccccagaaaaagtgcagcggctctatgtcgactttccccaacacctgcggcatcttctgggtgactggctggagagccagccctgggagttcctggtcggctccgacgccttctgctgcaacttggctagtgccctactttcagacactgtccagcaccttcaggcctcggtgggagagcagggggaggggagcaccatcttgcaacacatcagcacccttgagagcatatatcagagggaccccctgaagctggtggccactttcagacaaatacttcaaggagagaaaaaagctgttatggaacagttccgccacttgccaatgcctttccactggaagcaggaagaactcaagtttaagacaggcttgcggaggctgcagcaccgagtaggggagatccaccttctccgagaagccctgcagaagggggctgaggctggccaagtgtctctgcacagcttgatagaaactcctgctaatgggactgggccaagtgaggccctggccatgctactgcaggagaccactggagagctagaggcagccaaagccctagtgctgaagaggatccagatttggaaacggcagcagcagctggcagggaatggcgcaccgtttgaggagagcctggccccactccaggagaggtgtgaaagcctggtggacatttattcccagctacagcaggaggtaggggcggctggtggggagcttgagcccaagacccgggcatcgctgactggccggctggatgaagtcctgagaaccctcgtcaccagttgcttcctggtggagaagcagcccccccaggtactgaagactcagaccaagttccaggctggagttcgattcctgttgggcttgaggttcctgggggccccagccaagcctccgctggtcagggccgacatggtgacagagaagcaggcgcgggagctgagtgtgcctcagggtcctggggctggagcagaaagcactggagaaatcatcaacaacactgtgcccttggagaacagcattcctgggaactgctgctctgccctgttcaagaacctgcttctcaagaagatcaagcggtgtgagcggaagggcactgagtctgtcacagaggagaagtgcgctgtgctcttctctgccagcttcacacttggccccggcaaactccccatccagctccaggccctgtctctgcccctggtggtcatcgtccatggcaaccaagacaacaatgccaaagccactatcctgtgggacaatgccttctctgagatggaccgcgtgccctttgtggtggctgagcgggtgccctgggagaagatgtgtgaaactctgaacctgaagttcatggctgaggtggggaccaaccgggggctgctcccagagcacttcctcttcctggcccagaagatcttcaatgacaacagcctcagtatggaggccttccagcaccgttctgtgtcctggtcgcagttcaacaaggagatcctgctgggccgtggcttcaccttttggcagtggtttgatggtgtcctggacctcaccaaacgctgtctccggagctactggtctgaccggctgatcattggcttcatcagcaaacagtacgttactagccttcttctcaatgagcccgacggaacctttctcctccgcttcagcgactcagagattgggggcatcaccattgcccatgtcatccggggccaggatggctctccacagatagagaacatccagccattctctgccaaagacctgtccattcgctcactgggggaccgaatccgggatcttgctcagctcaaaaatctctatcccaagaagcccaaggatgaggctttccggagccactacaagcctgaacagatgggtaaggatggcaggggttatgtcccagctaccatcaagatgaccgtggaaagggaccaaccacttcctaccccagagctccagatgcctaccatggtgccttcttatgaccttggaatggcccctgattcctccatgagcatgcagcttggcccagatatggtgccccaggtgtacccaccacactctcactccatccccccgtatcaaggcctctccccagaagaatcagtcaacgtgttgtcagccttccaggagcctcacctgcagatgccccccagcctgggccagatgagcctgccctttgaccagcctcacccccagggcctgctgccgtgccagcctcaggagcatgctgtgtccagccctgaccccctgctctgctcagatgtgaccatggtggaagacagctgcctgagccagccagtgacagcgtttcctcagggcacttggattggtgaagacatattccctcctctgctgcctcccactgaacaggacctcactaagcttctcctggaggggcaaggggagtcggggggagggtccttgggggcacagcccctcctgcagccctcccactatgggcaatctgggatctcaatgtcccacatggacctaagggccaaccccagttggtgatcccagctggagggagaacccaaagagacagctcttctactacccccacagacctgctctggacacttgctcatgccctgccaagcagcagatggggagggtgccctcctatccccacctactcctgggtcaggaggaaaagactaacaggagaatgcacagtgggtggagccaatccactccttcctttctatcattcccctgcccacctccttccagcactgactggaagggaagttcaggctctgagacacaccccaacatgcctgcacctgcagcgcgcacacgcacgcacacacacatacagagctctctgagggtgatggggctgagcaggaggggggctgggtaagagcacaggttagggcatggaaggcttctccgcccattctgacccagggcctaggacggataggcaggaacatacagacacatttacactagaggccagggatagaggatattgggtctcagccctaggggaatgggaagcagctcaagggaccctgggtgggagcataggaggggtctggacatgtggttactagtacaggttttgccctgattaaaaaatctcccaaagccccaaattcctgttagccaggtggaggcttctgatacgtgtatgagactatgcaaaagtacaagggctgagattcttcgtgtatagctgtgtgaacgtgtatgtacctaggatatgttaaatgtatagctggcaccttagttgcatgaccacatagaacatgtgtctatctgcttttgcctacgtgacaacacaaatttgggagggtgagacactgcacagaagacagcagcaagtgtgctggcctctctgacatatgctaacccccaaatactctgaatttggagtctgactgtgcccaagtgggtccaagtggctgtgacatctacgtatggctccacacctccaatgctgcctgggagccagggtgagagtctgggtccaggcctggccatgtggccctccagtgtatgagagggccctgcctgctgcatcttttctgttgccccatccaccgccagcttcccttcactcccctatcccattctccctctcaaggcaggggtcatagatcctaagccataaaataaattttattccaaaataacaaaataaataatctactgtacacaatctgaaaagaaagacgctctaactgctcagataggtgctgcggtccagcccccagctggaggagaccctgagtccaacccaggcctcccgagggggccagtgaagggatcccacacccaccgcccctatgtagggcagggaagaaattgcaaaggacttgggggatagatgggaatgggagggcaaactgcagcacttgttaaattaattaaagaaacaaaccagaagcacaaaaacggggaaggagaggggagaaggagcaggtccagtgttcccaggcccccaattctgggggcaaatgttgccacttttagctggaccttcccagggaagtccccctttcccccttgtccaaactgagtccaactgctcacaccactggtgcaaacctaaagagaatgggagtgtgttgtgtgagggaggggaaaaccccagatgccctggaggcagagtccttgccccctcgctctgggcaggggtgagggcaccacgcaccctccttgtgtcctctctccaggcctctgcttgttattgcttgaagccccacagtcttatgcccatggagcaggtggggaggcaggagaagggcagaggaaggatccagggttgtgactagattccggggatggagagcgtgggggtctgtgtgagccagaagtctgaggtcctgggtctgaagacaccagtccaaccctcactgccggctggcctcagcctccactttcacgctgctcctgcgaccctccaccagcgcgggatggggtcctggggcaggacatctgtccagcagcccttcctcgaactctgcagggaaaagggggcagttaggagactgcagggtgactggctgcagacagaggtggttgggaacagaagcaggggcaaagaaagctgtgaagatgggctcagtttaggtttattgaattactgcctcctgcccactgcatgtgtatggggggttccattcccatgtgtgtgagccccctcccctccctggctgtgcgtagctctgtctctgtctgtctctctctctttctctcccgcctcctcggttgcgctggaatttctggttctgtcaggagctgcgggggtgg

SEQ ID NO: 7622 - protein, 847 aa, Homo sapiens; identical to SEQ ID NO: 1096

SEQ ID NO: 7623 - DNA, 2380 bp, Homo sapiens
ctcttctctgtgtcgtcagagctccagggagggacctgggtagaaggagaagccggaaacagcgggctggggcagccactgcttacactgaagagggaggacgggagaggagtgtgtgtgtgtgtgtgtgtgtgtgtgtgtatgtatgtgtgtgctttatcttatttttctttttggtggtggtggtggaaggggggaggtgctagcagggccagccttgaactcgctggacagagctacagacctatggggcctggaagtgcccgctgagaaagggagaagacagcagaggggttgccgaggcaacctccaagtcccagatcatgtctctgtggggtctggtctccaagatgcccccagaaaaagtgcagcggctctatgtcgactttccccaacacctgcggcatcttctgggtgactggctggagagccagccctgggagttcctggtcggctccgacgccttctgctgcaacttggctagtgccctactttcagacactgtccagcaccttcaggcctcggtgggagagcagggggaggggagcaccatcttgcaacacatttacactagaggccagggatagaggatattgggtctcagccctaggggaatgggaagcagctcaagggaccctgggtgggagcataggaggggtctggacatgtggttactagtacaggttttgccctgattaaaaaatctcccaaagccccaaattcctgttagccaggtggaggcttctgatacgtgtatgagactatgcaaaagtacaagggctgagattcttcgtgtatagctgtgtgaacgtgtatgtacctaggatatgttaaatgtatagctggcaccttagttgcatgaccacatagaacatgtgtctatctgcttttgcctacgtgacaacacaaatttgggagggtgagacactgcacagaagacagcagcaagtgtgctggcctctctgacatatgctaacccccaaatactctgaatttggagtctgactgtgcccaagtgggtccaagtggctgtgacatctacgtatggctccacacctccaatgctgcctgggagccagggtgagagtctgggtccaggcctggccatgtggccctccagtgtatgagagggccctgcctgctgcatcttttctgttgccccatccaccgccagcttcccttcactcccctatcccattctccctctcaaggcaggggtcatagatcctaagccataaaataaattttattccaaaataacaaaataaataatctactgtacacaatctgaaaagaaagacgctctaactgctcagataggtgctgcggtccagcccccagctggaggagaccctgagtccaacccaggcctcccgagggggccagtgaagggatcccacacccaccgcccctatgtagggcagggaagaaattgcaaaggacttgggggatagatgggaatgggagggcaaactgcagcacttgttaaattaattaaagaaacaaaccagaagcacaaaaacggggaaggagaggggagaaggagcaggtccagtgttcccaggcccccaattctgggggcaaatgttgccacttttagctggaccttcccagggaagtccccctttcccccttgtccaaactgagtccaactgctcacaccactggtgcaaacctaaagagaatgggagtgtgttgtgtgagggaggggaaaaccccagatgccctggaggcagagtccttgccccctcgctctgggcaggggtgagggcaccacgcaccctccttgtgtcctctctccaggcctctgcttgttattgcttgaagccccacagtcttatgcccatggagcaggtggggaggcaggagaagggcagaggaaggatccagggttgtgactagattccggggatggagagcgtgggggtctgtgtgagccagaagtctgaggtcctgggtctgaagacaccagtccaaccctcactgccggctggcctcagcctccactttcacgctgctcctgcgaccctccaccagcgcgggatggggtcctggggcaggacatctgtccagcagcccttcctcgaactctgcagggaaaagggggcagttaggagactgcagggtgactggctgcagacagaggtggttgggaacagaagcaggggcaaagaaagctgtgaagatgggctcagtttaggtttattgaattactgcctcctgcccactgcatgtgtatggggggttccattcccatgtgtgtgagccccctcccctccctggctgtgcgtagctctgtctctgtctgtctctctctctttctctcccgcctcctcggttgcgctggaatttctggttctgtcaggagctgcgggggtgg

SEQ ID NO: 7624 - protein, 99 aa, Homo sapiens
MSTFPNTCGIFWVTGWRASPGSSWSAPTPSAATWLVPYFQTLSSTFRPRWESRGRGAPSCNTFTLEARDRGYWVSALGEWEAAQGTLGGSIGGVWTCGY

SEQ ID NO: 7625 - DNA, 803 bp, Homo sapiens
gcagagttcgaggaagggctgctggacagatgtcctgccccaggaccccatcccgcgctggtggagggtcgcaggagcagcgtgaaagtggaggctgaggccagccggcagtgagggttggactggtgtcttcagacccaggacctcagacttctggctcacacagacccccacgctctccatccccggaatctagtcacaaccctggatccttcctctgcccttctcctgcctccccacctgctccatgggcataagactgtggggcttcaagcaataacaagcagaggcctggagagaggacacaaggagggtgcgtggtgccctcacccctgcccagagcgagggggcaaggactctgcctccagggcatctggggttttcccctccctcacacaacacactcccattctctttaggtttgcaccagtggtgtgagcagttggactcagtttggacaagggggaaagggggacttccctgctccttctcccctctccttccccgtttttgtgcttctggtttgtttctttaattaatttaacaagtgctgcagtttgccctcccattcccatctatcccccaagtcctttgcaatttcttccctgccctacataggggcggtgggtgtgggatcccttcactggccccctcgggaggcctgggttggactcagggtctcctccagctgggggctggaccgcagcacctatctgagcagttagagcgtctttcttttcagattgtgtacagtagattatttattttgttattttggaataaaatttattttatggcttagg

SEQ ID NO: 7626 - protein, 84 aa, Homo sapiens
QAEAWREDTRRVRGALTPAQSEGARTLPPGHLGFSPPSHNTLPFSLGLHQWCEQLDSVWTRGKGGLPCSFSPLLPRFCASGLFL

SEQ ID NO: 7627 - DNA, 1977 bp, Homo sapiens
gcagagttcgaggaagggctgctggacagatgtcctgccccaggaccccatcccgcgctggtggagggtcgcaggagcagcgtgaaagtggaggctgaggccagccggcagtgagggttggactggtgtcttcagacccaggacctcagacttctggctcacacagacccccacgctctccatccccggaatctagtcacaaccctggatccttcctctgcccttctcctgcctccccacctgctccatgggcataagactgtggggcttcaagcaataacaagcagaggcctggagagaggacacaaggagggtgcgtggtgccctcacccctgcccagagcgagggggcaaggactctgcctccagggcatctggggttttcccctccctcacacaacacactcccattctctttaggtttgcaccagtggtgtgagcagttggactcagtttggacaagggggaaagggggacttccctgctccttctcccctctccttccccgtttttgtgcttctggtttgtttctttaattaatttaacaagtgctgcagtttgccctcccattcccatctatcccccaagtcctttgcaatttcttccctgccctacataggggcggtgggtgtgggatcccttcactggccccctcgggaggcctgggttggactcagggtctcctccagctgggggctggaccgcagcacctatctgagcagttagagcgtctttcttttcagattgtgtacagtagattatttattttgttattttggaataaaatttattttatggcttaggatctatgacccctgccttgagagggagaatgggataggggagtgaagggaagctggcggtggatggggcaacagaaaagatgcagcaggcagggccctctcatacactggagggccacatggccaggcctggacccagactctcaccctggctcccaggcagcattggaggtgtggagccatacgtagatgtcacagccacttggacccacttgggcacagtcagactccaaattcagagtatttgggggttagcatatgtcagagaggccagcacacttgctgctgtcttctgtgcagtgtctcaccctcccaaatttgtgttgtcacgtaggcaaaagcagatagacacatgttctatgtggtcatgcaactaaggtgccagctatacatttaacatatcctaggtacatacacgttcacacagctatacacgaagaatctcagcccttgtacttttgcatagtctcatacacgtatcagaagcctccacctggctaacaggaatttggggctttgggagattttttaatcagggcaaaacctgtactagtaaccacatgtccagacccctcctatgctcccacccagggtcccttgagctgcttcccattcccctagggctgagacccaatatcctctatccctggcctctagtgtaaatgtgtctgtatgttcctgcctatccgtcctaggccctgggtcagaatgggcggagaagccttccatgccctaacctgtgctcttacccagcccccctcctgctcagccccatcaccctcagagagctctgtatgtgtgtgtgcgtgcgtgtgcgcgctgcaggtgcaggcatgttggggtgtgtctcagagcctgaacttcccttccagtcagtgctggaaggaggtgggcaggggaatgatagaaaggaaggagtggattggctccacccactgtgcattctcctgttagtcttttcctcctgacccaggagtaggtggggataggagggcaccctccccatctgctgcttggcagggcatgagcaagtgtccagagcaggtctgtgggggtagtagaagagctgtctctttgggttctccctccagctgggatcaccaactggggttggcccttaggtccatgtgggacattgagatcccagattgcccatagtgggagggctgcaggag

SEQ ID NO: 7628 - protein, 98 aa, Homo sapiens; identical to SEQ ID NO: 7610

SEQ ID NO: 7629 - DNA, 457 bp, Homo sapiens
caaggagggtttgcaccagtggtgtgagcagttggactcagtttggacaagggggaaagggggacttccctgggaaggtccagctaaaagtggcaacatttgcccccagaattgggggcctgggaacactggacctgctccttctcccctctccttccccgtttttgtgcttctggtttgtttctttaattaatttaacaagtgctgcagtttgccctcccattcccatctatcccccaagtcctttgcaatttcttccctgccctacataggggcggtgggtgtgggatcccttcactggccccctcgggaggcctgggttggactcagggtctcctccagctgggggctggaccgcagcacctatctgagcagttagagcgtctttcttttcagattgtgtacagtagattatttattttgttattttggaataaaatttattttatggcttagg

SEQ ID NO: 7630 - protein, 89 aa, Homo sapiens [sequence omitted]

SEQ ID NO: 7631 - DNA, 1631 bp, Homo sapiens
caaggagggtttgcaccagtggtgtgagcagttggactcagtttggacaagggggaaagggggacttccctgggaaggtccagctaaaagtggcaacatttgcccccagaattgggggcctgggaacactggacctgctccttctcccctctccttccccgtttttgtgcttctggtttgtttctttaattaatttaacaagtgctgcagtttgccctcccattcccatctatcccccaagtcctttgcaatttcttccctgccctacataggggcggtgggtgtgggatcccttcactggccccctcgggaggcctgggttggactcagggtctcctccagctgggggctggaccgcagcacctatctgagcagttagagcgtctttcttttcagattgtgtacagtagattatttattttgttattttggaataaaatttattttatggcttaggatctatgacccctgccttgagagggagaatgggataggggagtgaagggaagctggcggtggatggggcaacagaaaagatgcagcaggcagggccctctcatacactggagggccacatggccaggcctggacccagactctcaccctggctcccaggcagcattggaggtgtggagccatacgtagatgtcacagccacttggacccacttgggcacagtcagactccaaattcagagtatttgggggttagcatatgtcagagaggccagcacacttgctgctgtcttctgtgcagtgtctcaccctcccaaatttgtgttgtcacgtaggcaaaagcagatagacacatgttctatgtggtcatgcaactaaggtgccagctatacatttaacatatcctaggtacatacacgttcacacagctatacacgaagaatctcagcccttgtacttttgcatagtctcatacacgtatcagaagcctccacctggctaacaggaatttggggctttgggagattttttaatcagggcaaaacctgtactagtaaccacatgtccagacccctcctatgctcccacccagggtcccttgagctgcttcccattcccctagggctgagacccaatatcctctatccctggcctctagtgtaaatgtgtctgtatgttcctgcctatccgtcctaggccctgggtcagaatgggcggagaagccttccatgccctaacctgtgctcttacccagcccccctcctgctcagccccatcaccctcagagagctctgtatgtgtgtgtgcgtgcgtgtgcgcgctgcaggtgcaggcatgttggggtgtgtctcagagcctgaacttcccttccagtcagtgctggaaggaggtgggcaggggaatgatagaaaggaaggagtggattggctccacccactgtgcattctcctgttagtcttttcctcctgacccaggagtaggtggggataggagggcaccctccccatctgctgcttggcagggcatgagcaagtgtccagagcaggtctgtgggggtagtagaagagctgtctctttgggttctccctccagctgggatcaccaactggggttggcccttaggtccatgtgggacattgagatcccagattgcccatagtgggagggctgcaggag

SEQ ID NO: 7632 - protein, 98 aa, Homo sapiens; identical to SEQ ID NO: 7610

SEQ ID NO: 7633 - DNA, 1097 bp, Homo sapiens
tatgggcaatctgggatctcaatgtcccacatggacctaagggccaaccccagttggtgatcccagctggagggagaacccaaagagacagctcttctactacccccacagacctgctctggacacttgctcatgccctgccaagcagcagatggggagggtgccctcctatccccacctactcctgggtcaggaggaaaagactaacaggagaatgcacagtgggtggagccaatccactccttcctttctatcattcccctgcccacctccttccagcactgactggaagggaagttcaggctctgagacacaccccaacatgcctgcacctgcagcgcgcacacgcacgcacacacacatacaacacatttacactagaggccagggatagaggatattgggtctcagccctaggggaatgggaagcagctcaagggaccctgggtgggagcataggaggggtctggacatgtggttactagtacaggttttgccctgattaaaaaatctcccaaagccccaaattcctgttagccaggtggaggcttctgatacgtgtatgagactatgcaaaagtacaagggctgagattcttcgtgtatagctgtgtgaacgtgtatgtacctaggatatgttaaatgtatagctggcaccttagttgcatgaccacatagaacatgtgtctatctgcttttgcctacgtgacaacacaaatttgggagggtgagacactgcacagaagacagcagcaagtgtgctggcctctctgacatatgctaacccccaaatactctgaatttggagtctgactgtgcccaagtgggtccaagtggctgtgacatctacgtatggctccacacctccaatgctgcctgggagccagggtgagagtctgggtccaggcctggccatgtggccctccagtgtatgagagggccctgcctgctgcatcttttctgttgccccatccaccgccagcttcccttcactcccctatcccattctccctctcaaggcaggggtcatagatcctaagccataaaataaattttattccaaaataacaaaataaataatctactgtacacaatctg

SEQ ID NO: 7634 - protein, 80 aa, Homo sapiens [sequence omitted]

SEQ ID NO: 7635 - DNA, 1702 bp, Homo sapiens
agaagactgagctcagagcatagaaatagcttgcccaggccatgactaagtcaggataaggagctggagcttgtttcctcactcagtggtcctgactttgcaccactctgcatttgcctagcctgccttcctctaactgtgctctccctacttccaggcctcacctgcagatgccccccagcctgggccagatgagcctgccctttgaccagcctcacccccagggcctgctgccgtgccagcctcaggagcatgctgtgtccagccctgaccccctgctctgctcagatgtgaccatggtggaagacagctgcctgagccagccagtgacagcgtttcctcagggcacttggattggtgaagacatattccctcctctgctgcctcccactgaacaggacctcactaagcttctcctggaggggcaaggggagtcggggggagggtccttgggggcacagcccctcctgcagccctcccactatgggcaatctgggatctcaatgtcccacatggacctaagggccaaccccagttggtgatcccagctggagggagaacccaaagagacagctcttctactacccccacagacctgctctggacacttgctcatgccctgccaagcagcagatggggagggtgccctcctatccccacctactcctgggtcaggaggaaaagactaacaggagaatgcacagtgggtggagccaatccactccttcctttctatcattcccctgcccacctccttccagcactgactggaagggaagttcaggctctgagacacaccccaacatgcctgcacctgcagcgcgcacacgcacgcacacacacatacagagctctctgagggtgatggggctgagcaggaggggggctgggtaagagcacaggttagggcatggaaggcttctccgcccattctgacccagggcctaggacggataggcaggaacatacagacacatttacactagaggccagggatagaggatattgggtctcagccctaggggaatgggaagcagctcaagggaccctgggtgggagcataggaggggtctggacatgtggttactagtacaggttttgccctgattaaaaaatctcccaaagccccaaattcctgttagccaggtggaggcttctgatacgtgtatgagactatgcaaaagtacaagggctgagattcttcgtgtatagctgtgtgaacgtgtatgtacctaggatatgttaaatgtatagctggcaccttagttgcatgaccacatagaacatgtgtctatctgcttttgcctacgtgacaacacaaatttgggagggtgagacactgcacagaagacagcagcaagtgtgctggcctctctgacatatgctaacccccaaatactctgaatttggagtctgactgtgcccaagtgggtccaagtggctgtgacatctacgtatggctccacacctccaatgctgcctgggagccagggtgagagtctgggtccaggcctggccatgtggccctccagtgtatgagagggccctgcctgctgcatcttttctgttgccccatccaccgccagcttcccttcactcccctatcccattctccctctcaaggcaggggtcatagatcctaagccataaaataaattttattccaaaataacaaaataaataatctactgtacacaatctg

SEQ ID NO: 7636 - protein, 123 aa, Homo sapiens [sequence omitted]

SEQ ID NO: 7637 - DNA, 1119 bp, Homo sapiens
ctcatctttgccttctagccctccagcttcctctctcttctaggctctttcctcctagcttactaaacccgccttttttccagtctcttccatcctcttccttagttctctctactttccttttccacctctcctccttcaagtctcctcccaccttcccccacttcttaggatgatcagatttgcccctggaagggatcctaacaacacagtgcgatggttaatccccactcagattcaaagcctgctttccaaactcacttaagagctctctgagggtgatggggctgagcaggaggggggctgggtaagagcacaggttagggcatggaaggcttctccgcccattctgacccagggcctaggacggataggcaggaacatacagacacatttacactagaggccagggatagaggatattgggtctcagccctaggggaatgggaagcagctcaagggaccctgggtgggagcataggaggggtctggacatgtggttactagtacaggttttgccctgattaaaaaatctcccaaagccccaaattcctgttagccaggtggaggcttctgatacgtgtatgagactatgcaaaagtacaagggctgagattcttcgtgtatagctgtgtgaacgtgtatgtacctaggatatgttaaatgtatagctggcaccttagttgcatgaccacatagaacatgtgtctatctgcttttgcctacgtgacaacacaaatttgggagggtgagacactgcacagaagacagcagcaagtgtgctggcctctctgacatatgctaacccccaaatactctgaatttggagtctgactgtgcccaagtgggtccaagtggctgtgacatctacgtatggctccacacctccaatgctgcctgggagccagggtgagagtctgggtccaggcctggccatgtggccctccagtgtatgagagggccctgcctgctgcatcttttctgttgccccatccaccgccagcttcccttcactcccctatcccattctccctctcaaggcaggggtcatagatcctaagccataaaataaattttattccaaaataacaaaataaataatctactgtacacaatctg

SEQ ID NO: 7638 - protein, 59 aa, Homo sapiens
MAPHLQCCLGARVRVWVQAWPCGPPVYERALPAASFLLPHPPPASLHSPIPFSLSRQGS

SEQ ID NO: 7639 - DNA, 1290 bp, Homo sapiens
ctcttctctgtgtcgtcagagctccagggagggacctgggtagaaggagaagccggaaacagcgggctggggcagccactgcttacactgaagagggaggacgggagaggagtgtgtgtgtgtgtgtgtgtgtgtgtgtgtatgtatgtgtgtgctttatcttatttttctttttggtggtggtggtggaaggggggaggtgctagcagggccagccttgaactcgctggacagagctacagacctatggggcctggaagtgcccgctgagaaagggagaagacagcagaggggttgccgaggcaacctccaagtcccagatcatgtctctgtggggtctggtctccaagatgcccccagaaaaagtgcagcggctctatgtcgactttccccaacacctgcggcatcttctgggtgactggctggagagccagccctgggagttcctggtcggctccgacgccttctgctgcaacttggctagtgccctactttcagacactgtccagcaccttcaggcctcggtgggagagcagggggaggggagcaccatcttgcaacacatttacactagaggccagggatagaggatattgggtctcagccctaggggaatgggaagcagctcaagggaccctgggtgggagcataggaggggtctggacatgtggttactagtacaggttttgccctgattaaaaaatctcccaaagccccaaattcctgttagccaggtggaggcttctgatacgtgtatgagactatgcaaaagtacaagggctgagattcttcgtgtatagctgtgtgaacgtgtatgtacctaggatatgttaaatgtatagctggcaccttagttgcatgaccacatagaacatgtgtctatctgcttttgcctacgtgacaacacaaatttgggagggtgagacactgcacagaagacagcagcaagtgtgctggcctctctgacatatgctaacccccaaatactctgaatttggagtctgactgtgcccaagtgggtccaagtggctgtgacatctacgtatggctccacacctccaatgctgcctgggagccagggtgagagtctgggtccaggcctggccatgtggccctccagtgtatgagagggccctgcctgctgcatcttttctgttgccccatccaccgccagcttcccttcactcccctatcccattctccctctcaaggcaggggtcatagatcctaagccataaaataaattttattccaaaataacaaaataaataatctactgtacacaatctg

SEQ ID NO: 7640 - protein, 99 aa, Homo sapiens; identical to SEQ ID NO: 7624

SEQ ID NO: 7641 - DNA, 1850 bp, Homo sapiens
ctcttctctgtgtcgtcagagctccagggagggacctgggtagaaggagaagccggaaacagcgggctggggcagccactgcttacactgaagagggaggacgggagaggagtgtgtgtgtgtgtgtgtgtgtgtgtgtgtatgtatgtgtgtgctttatcttatttttctttttggtggtggtggtggaaggggggaggtgctagcagggccagccttgaactcgctggacagagctacagacctatggggcctggaagtgcccgctgagaaagggagaagacagcagaggggttgccgaggcaacctccaagtcccagatcatgtctctgtggggtctggtctccaagatgcccccagaaaaagtgcagcggctctatgtcgactttccccaacacctgcggcatcttctgggtgactggctggagagccagccctgggagttcctggtcggctccgacgccttctgctgcaacttggctagtgccctactttcagacactgtccagcaccttcaggcctcggtgggagagcagggggaggggagcaccatcttgcaacacatcagcacccttgagagcatatatcagagggtccttgggggcacagcccctcctgcagccctcccactatgggcaatctgggatctcaatgtcccacatggacctaagggccaaccccagttggtgatcccagctggagggagaacccaaagagacagctcttctactacccccacagacctgctctggacacttgctcatgccctgccaagcagcagatggggagggtgccctcctatccccacctactcctgggtcaggaggaaaagactaacaggagaatgcacagtgggtggagccaatccactccttcctttctatcattcccctgcccacctccttccagcactgactggaagggaagttcaggctctgagacacaccccaacatgcctgcacctgcagcgcgcacacgcacgcacacacacatacagagctctctgagggtgatggggctgagcaggaggggggctgggtaagagcacaggttagggcatggaaggcttctccgcccattctgacccagggcctaggacggataggcaggaacatacagacacatttacactagaggccagggatagaggatattgggtctcagccctaggggaatgggaagcagctcaagggaccctgggtgggagcataggaggggtctggacatgtggttactagtacaggttttgccctgattaaaaaatctcccaaagccccaaattcctgttagccaggtggaggcttctgatacgtgtatgagactatgcaaaagtacaagggctgagattcttcgtgtatagctgtgtgaacgtgtatgtacctaggatatgttaaatgtatagctggcaccttagttgcatgaccacatagaacatgtgtctatctgcttttgcctacgtgacaacacaaatttgggagggtgagacactgcacagaagacagcagcaagtgtgctggcctctctgacatatgctaacccccaaatactctgaatttggagtctgactgtgcccaagtgggtccaagtggctgtgacatctacgtatggctccacacctccaatgctgcctgggagccagggtgagagtctgggtccaggcctggccatgtggccctccagtgtatgagagggccctgcctgctgcatcttttctgttgccccatccaccgccagcttcccttcactcccctatcccattctccctctcaaggcaggggtcatagatcctaagccataaaataaattttattccaaaataacaaaataaataatctactgtacacaatctg

SEQ ID NO: 7642 - protein, 227 aa, Homo sapiens; identical to SEQ ID NO: 7620

SEQ ID NO: 7643 - DNA, 4027 bp, Homo sapiens
ctcttctctgtgtcgtcagagctccagggagggacctgggtagaaggagaagccggaaacagcgggctggggcagccactgcttacactgaagagggaggacgggagaggagtgtgtgtgtgtgtgtgtgtgtgtgtgtgtatgtatgtgtgtgctttatcttatttttctttttggtggtggtggtggaaggggggaggtgctagcagggccagccttgaactcgctggacagagctacagacctatggggcctggaagtgcccgctgagaaagggagaagacagcagaggggttgccgaggcaacctccaagtcccagatcatgtctctgtggggtctggtctccaagatgcccccagaaaaagtgcagcggctctatgtcgactttccccaacacctgcggcatcttctgggtgactggctggagagccagccctgggagttcctggtcggctccgacgccttctgctgcaacttggctagtgccctactttcagacactgtccagcaccttcaggcctcggtgggagagcagggggaggggagcaccatcttgcaacacatcagcacccttgagagcatatatcagagggaccccctgaagctggtggccactttcagacaaatacttcaaggagagaaaaaagctgttatggaacagttccgccacttgccaatgcctttccactggaagcaggaagaactcaagtttaagacaggcttgcggaggctgcagcaccgagtaggggagatccaccttctccgagaagccctgcagaagggggctgaggctggccaagtgtctctgcacagcttgatagaaactcctgctaatgggactgggccaagtgaggccctggccatgctactgcaggagaccactggagagctagaggcagccaaagccctagtgctgaagaggatccagatttggaaacggcagcagcagctggcagggaatggcgcaccgtttgaggagagcctggccccactccaggagaggtgtgaaagcctggtggacatttattcccagctacagcaggaggtaggggcggctggtggggagcttgagcccaagacccgggcatcgctgactggccggctggatgaagtcctgagaaccctcgtcaccagttgcttcctggtggagaagcagcccccccaggtactgaagactcagaccaagttccaggctggagttcgattcctgttgggcttgaggttcctgggggccccagccaagcctccgctggtcagggccgacatggtgacagagaagcaggcgcgggagctgagtgtgcctcagggtcctggggctggagcagaaagcactggagaaatcatcaacaacactgtgcccttggagaacagcattcctgggaactgctgctctgccctgttcaagaacctgcttctcaagaagatcaagcggtgtgagcggaagggcactgagtctgtcacagaggagaagtgcgctgtgctcttctctgccagcttcacacttggccccggcaaactccccatccagctccaggccctgtctctgcccctggtggtcatcgtccatggcaaccaagacaacaatgccaaagccactatcctgtgggacaatgccttctctgagatggaccgcgtgccctttgtggtggctgagcgggtgccctgggagaagatgtgtgaaactctgaacctgaagttcatggctgaggtggggaccaaccgggggctgctcccagagcacttcctcttcctggcccagaagatcttcaatgacaacagcctcagtatggaggccttccagcaccgttctgtgtcctggtcgcagttcaacaaggagatcctgctgggccgtggcttcaccttttggcagtggtttgatggtgtcctggacctcaccaaacgctgtctccggagctactggtctgaccggctgatcattggcttcatcagcaaacagtacgttactagccttcttctcaatgagcccgacggaacctttctcctccgcttcagcgactcagagattgggggcatcaccattgcccatgtcatccggggccaggatggctctccacagatagagaacatccagccattctctgccaaagacctgtccattcgctcactgggggaccgaatccgggatcttgctcagctcaaaaatctctatcccaagaagcccaaggatgaggctttccggagccactacaagcctgaacagatgggtaaggatggcaggggttatgtcccagctaccatcaagatgaccgtggaaagggaccaaccacttcctaccccagagctccagatgcctaccatggtgccttcttatgaccttggaatggcccctgattcctccatgagcatgcagcttggcccagatatggtgccccaggtgtacccaccacactctcactccatccccccgtatcaaggcctctccccagaagaatcagtcaacgtgttgtcagccttccaggagcctcacctgcagatgccccccagcctgggccagatgagcctgccctttgaccagcctcacccccagggcctgctgccgtgccagcctcaggagcatgctgtgtccagccctgaccccctgctctgctcagatgtgaccatggtggaagacagctgcctgagccagccagtgacagcgtttcctcagggcacttggattggtgaagacatattccctcctctgctgcctcccactgaacaggacctcactaagcttctcctggaggggcaaggggagtcggggggagggtccttgggggcacagcccctcctgcagccctcccactatgggcaatctgggatctcaatgtcccacatggacctaagggccaaccccagttggtgatcccagctggagggagaacccaaagagacagctcttctactacccccacagacctgctctggacacttgctcatgccctgccaagcagcagatggggagggtgccctcctatccccacctactcctgggtcaggaggaaaagactaacaggagaatgcacagtgggtggagccaatccactccttcctttctatcattcccctgcccacctccttccagcactgactggaagggaagttcaggctctgagacacaccccaacatgcctgcacctgcagcgcgcacacgcacgcacacacacatacagagctctctgagggtgatggggctgagcaggaggggggctgggtaagagcacaggttagggcatggaaggcttctccgcccattctgacccagggcctaggacggataggcaggaacatacagacacatttacactagaggccagggatagaggatattgggtctcagccctaggggaatgggaagcagctcaagggaccctgggtgggagcataggaggggtctggacatgtggttactagtacaggttttgccctgattaaaaaatctcccaaagccccaaattcctgttagccaggtggaggcttctgatacgtgtatgagactatgcaaaagtacaagggctgagattcttcgtgtatagctgtgtgaacgtgtatgtacctaggatatgttaaatgtatagctggcaccttagttgcatgaccacatagaacatgtgtctatctgcttttgcctacgtgacaacacaaatttgggagggtgagacactgcacagaagacagcagcaagtgtgctggcctctctgacatatgctaacccccaaatactctgaatttggagtctgactgtgcccaagtgggtccaagtggctgtgacatctacgtatggctccacacctccaatgctgcctgggagccagggtgagagtctgggtccaggcctggccatgtggccctccagtgtatgagagggccctgcctgctgcatcttttctgttgccccatccaccgccagcttcccttcactcccctatcccattctccctctcaaggcaggggtcatagatcctaagccataaaataaattttattccaaaataacaaaataaataatctactgtacacaatctg

SEQ ID NO: 7644 - protein, 847 aa, Homo sapiens; identical to SEQ ID NO: 1096

SEQ ID NO: 7645 - DNA, 1282 bp, Homo sapiens
agaagactgagctcagagcatagaaatagcttgcccaggccatgactaagtcaggataaggagctggagcttgtttcctcactcagtggtcctgactttgcaccactctgcatttgcctagcctgccttcctctaactgtgctctccctacttccaggcctcacctgcagatgccccccagcctgggccagatgagcctgccctttgaccagcctcacccccagggcctgctgccgtgccagcctcaggagcatgctgtgtccagccctgaccccctgctctgctcagatgtgaccatggtggaagacagctgcctgagccagccagtgacagcgtttcctcagggcacttggattggtgaagacatattccctcctctgctgcctcccactgaacaggacctcactaagcttctcctggaggggcaaggggagtcggggggagggtccttgggggcacagcccctcctgcagccctcccactatgggcaatctgggatctcaatgtcccacatggacctaagggccaaccccagttggtgatcccagctggagggagaacccaaagagacagctcttctactacccccacagacctgctctggacacttgctcatgccctgccaagcagcagatggggagggtgccctcctatccccacctactcctgggtcaggaggaaaagactaacaggagaatgcacagtgggtggagccaatccactccttcctttctatcattcccctgcccacctccttccagcactgactggaagggaagttcaggctctgagacacaccccaacatgcctgcacctgcagcgcgcacacgcacgcacacacacatacagagctctctgagggtgatggggctgagcaggaggggggctgggtaagagcacaggttagggcatggaaggcttctccgcccattctgacccagggcctaggacggataggcaggaacatacagacacatttacactagaggccagggatagaggatattgggtctcagccctaggggaatgggaagcagctcaagggaccctgggtgggagcataggaggggtctggacatgtggttactagtacaggttttgccctgattaaaaaatctcccaaagccccaaattcctgttagccaggtggaggcttctgatacgtgtatgagactatgcaaaagtacaagggctgagattcttcgtgtatagctgtgtgaacgtgtatgtacctaggatatgttaaatgtatagctggcaccttagttgcatgaccacatag

SEQ ID NO: 7646 - protein, 123 aa, Homo sapiens [sequence omitted]

SEQ ID NO: 7647 - DNA, 699 bp, Homo sapiens
ctcatctttgccttctagccctccagcttcctctctcttctaggctctttcctcctagcttactaaacccgccttttttccagtctcttccatcctcttccttagttctctctactttccttttccacctctcctccttcaagtctcctcccaccttcccccacttcttaggatgatcagatttgcccctggaagggatcctaacaacacagtgcgatggttaatccccactcagattcaaagcctgctttccaaactcacttaagagctctctgagggtgatggggctgagcaggaggggggctgggtaagagcacaggttagggcatggaaggcttctccgcccattctgacccagggcctaggacggataggcaggaacatacagacacatttacactagaggccagggatagaggatattgggtctcagccctaggggaatgggaagcagctcaagggaccctgggtgggagcataggaggggtctggacatgtggttactagtacaggttttgccctgattaaaaaatctcccaaagccccaaattcctgttagccaggtggaggcttctgatacgtgtatgagactatgcaaaagtacaagggctgagattcttcgtgtatagctgtgtgaacgtgtatgtacctaggatatgttaaatgtatagctggcaccttagttgcatgaccacatag

SEQ ID NO: 7648 - protein, 59 aa, Homo sapiens [sequence omitted]

SEQ ID NO: 7649 - DNA, 870 bp, Homo sapiens
ctcttctctgtgtcgtcagagctccagggagggacctgggtagaaggagaagccggaaacagcgggctggggcagccactgcttacactgaagagggaggacgggagaggagtgtgtgtgtgtgtgtgtgtgtgtgtgtgtatgtatgtgtgtgctttatcttatttttctttttggtggtggtggtggaaggggggaggtgctagcagggccagccttgaactcgctggacagagctacagacctatggggcctggaagtgcccgctgagaaagggagaagacagcagaggggttgccgaggcaacctccaagtcccagatcatgtctctgtggggtctggtctccaagatgcccccagaaaaagtgcagcggctctatgtcgactttccccaacacctgcggcatcttctgggtgactggctggagagccagccctgggagttcctggtcggctccgacgccttctgctgcaacttggctagtgccctactttcagacactgtccagcaccttcaggcctcggtgggagagcagggggaggggagcaccatcttgcaacacatttacactagaggccagggatagaggatattgggtctcagccctaggggaatgggaagcagctcaagggaccctgggtgggagcataggaggggtctggacatgtggttactagtacaggttttgccctgattaaaaaatctcccaaagccccaaattcctgttagccaggtggaggcttctgatacgtgtatgagactatgcaaaagtacaagggctgagattcttcgtgtatagctgtgtgaacgtgtatgtacctaggatatgttaaatgtatagctggcaccttagttgcatgaccacatag

SEQ ID NO: 7650 - protein, 99 aa, Homo sapiens; identical to SEQ ID NO: 7624

SEQ ID NO: 7651 - DNA, 1430 bp, Homo sapiens
ctcttctctgtgtcgtcagagctccagggagggacctgggtagaaggagaagccggaaacagcgggctggggcagccactgcttacactgaagagggaggacgggagaggagtgtgtgtgtgtgtgtgtgtgtgtgtgtgtatgtatgtgtgtgctttatcttatttttctttttggtggtggtggtggaaggggggaggtgctagcagggccagccttgaactcgctggacagagctacagacctatggggcctggaagtgcccgctgagaaagggagaagacagcagaggggttgccgaggcaacctccaagtcccagatcatgtctctgtggggtctggtctccaagatgcccccagaaaaagtgcagcggctctatgtcgactttccccaacacctgcggcatcttctgggtgactggctggagagccagccctgggagttcctggtcggctccgacgccttctgctgcaacttggctagtgccctactttcagacactgtccagcaccttcaggcctcggtgggagagcagggggaggggagcaccatcttgcaacacatcagcacccttgagagcatatatcagagggtccttgggggcacagcccctcctgcagccctcccactatgggcaatctgggatctcaatgtcccacatggacctaagggccaaccccagttggtgatcccagctggagggagaacccaaagagacagctcttctactacccccacagacctgctctggacacttgctcatgccctgccaagcagcagatggggagggtgccctcctatccccacctactcctgggtcaggaggaaaagactaacaggagaatgcacagtgggtggagccaatccactccttcctttctatcattcccctgcccacctccttccagcactgactggaagggaagttcaggctctgagacacaccccaacatgcctgcacctgcagcgcgcacacgcacgcacacacacatacagagctctctgagggtgatggggctgagcaggaggggggctgggtaagagcacaggttagggcatggaaggcttctccgcccattctgacccagggcctaggacggataggcaggaacatacagacacatttacactagaggccagggatagaggatattgggtctcagccctaggggaatgggaagcagctcaagggaccctgggtgggagcataggaggggtctggacatgtggttactagtacaggttttgccctgattaaaaaatctcccaaagccccaaattcctgttagccaggtggaggcttctgatacgtgtatgagactatgcaaaagtacaagggctgagattcttcgtgtatagctgtgtgaacgtgtatgtacctaggatatgttaaatgtatagctggcaccttagttgcatgaccacatag

SEQ ID NO: 7652 - protein, 227 aa, Homo sapiens; identical to SEQ ID NO: 7620

SEQ ID NO: 7653 - DNA, 3607 bp, Homo sapiens
ctcttctctgtgtcgtcagagctccagggagggacctgggtagaaggagaagccggaaacagcgggctggggcagccactgcttacactgaagagggaggacgggagaggagtgtgtgtgtgtgtgtgtgtgtgtgtgtgtatgtatgtgtgtgctttatcttatttttctttttggtggtggtggtggaaggggggaggtgctagcagggccagccttgaactcgctggacagagctacagacctatggggcctggaagtgcccgctgagaaagggagaagacagcagaggggttgccgaggcaacctccaagtcccagatcatgtctctgtggggtctggtctccaagatgcccccagaaaaagtgcagcggctctatgtcgactttccccaacacctgcggcatcttctgggtgactggctggagagccagccctgggagttcctggtcggctccgacgccttctgctgcaacttggctagtgccctactttcagacactgtccagcaccttcaggcctcggtgggagagcagggggaggggagcaccatcttgcaacacatcagcacccttgagagcatatatcagagggaccccctgaagctggtggccactttcagacaaatacttcaaggagagaaaaaagctgttatggaacagttccgccacttgccaatgcctttccactggaagcaggaagaactcaagtttaagacaggcttgcggaggctgcagcaccgagtaggggagatccaccttctccgagaagccctgcagaagggggctgaggctggccaagtgtctctgcacagcttgatagaaactcctgctaatgggactgggccaagtgaggccctggccatgctactgcaggagaccactggagagctagaggcagccaaagccctagtgctgaagaggatccagatttggaaacggcagcagcagctggcagggaatggcgcaccgtttgaggagagcctggccccactccaggagaggtgtgaaagcctggtggacatttattcccagctacagcaggaggtaggggcggctggtggggagcttgagcccaagacccgggcatcgctgactggccggctggatgaagtcctgagaaccctcgtcaccagttgcttcctggtggagaagcagcccccccaggtactgaagactcagaccaagttccaggctggagttcgattcctgttgggcttgaggttcctgggggccccagccaagcctccgctggtcagggccgacatggtgacagagaagcaggcgcgggagctgagtgtgcctcagggtcctggggctggagcagaaagcactggagaaatcatcaacaacactgtgcccttggagaacagcattcctgggaactgctgctctgccctgttcaagaacctgcttctcaagaagatcaagcggtgtgagcggaagggcactgagtctgtcacagaggagaagtgcgctgtgctcttctctgccagcttcacacttggccccggcaaactccccatccagctccaggccctgtctctgcccctggtggtcatcgtccatggcaaccaagacaacaatgccaaagccactatcctgtgggacaatgccttctctgagatggaccgcgtgccctttgtggtggctgagcgggtgccctgggagaagatgtgtgaaactctgaacctgaagttcatggctgaggtggggaccaaccgggggctgctcccagagcacttcctcttcctggcccagaagatcttcaatgacaacagcctcagtatggaggccttccagcaccgttctgtgtcctggtcgcagttcaacaaggagatcctgctgggccgtggcttcaccttttggcagtggtttgatggtgtcctggacctcaccaaacgctgtctccggagctactggtctgaccggctgatcattggcttcatcagcaaacagtacgttactagccttcttctcaatgagcccgacggaacctttctcctccgcttcagcgactcagagattgggggcatcaccattgcccatgtcatccggggccaggatggctctccacagatagagaacatccagccattctctgccaaagacctgtccattcgctcactgggggaccgaatccgggatcttgctcagctcaaaaatctctatcccaagaagcccaaggatgaggctttccggagccactacaagcctgaacagatgggtaaggatggcaggggttatgtcccagctaccatcaagatgaccgtggaaagggaccaaccacttcctaccccagagctccagatgcctaccatggtgccttcttatgaccttggaatggcccctgattcctccatgagcatgcagcttggcccagatatggtgccccaggtgtacccaccacactctcactccatccccccgtatcaaggcctctccccagaagaatcagtcaacgtgttgtcagccttccaggagcctcacctgcagatgccccccagcctgggccagatgagcctgccctttgaccagcctcacccccagggcctgctgccgtgccagcctcaggagcatgctgtgtccagccctgaccccctgctctgctcagatgtgaccatggtggaagacagctgcctgagccagccagtgacagcgtttcctcagggcacttggattggtgaagacatattccctcctctgctgcctcccactgaacaggacctcactaagcttctcctggaggggcaaggggagtcggggggagggtccttgggggcacagcccctcctgcagccctcccactatgggcaatctgggatctcaatgtcccacatggacctaagggccaaccccagttggtgatcccagctggagggagaacccaaagagacagctcttctactacccccacagacctgctctggacacttgctcatgccctgccaagcagcagatggggagggtgccctcctatccccacctactcctgggtcaggaggaaaagactaacaggagaatgcacagtgggtggagccaatccactccttcctttctatcattcccctgcccacctccttccagcactgactggaagggaagttcaggctctgagacacaccccaacatgcctgcacctgcagcgcgcacacgcacgcacacacacatacagagctctctgagggtgatggggctgagcaggaggggggctgggtaagagcacaggttagggcatggaaggcttctccgcccattctgacccagggcctaggacggataggcaggaacatacagacacatttacactagaggccagggatagaggatattgggtctcagccctaggggaatgggaagcagctcaagggaccctgggtgggagcataggaggggtctggacatgtggttactagtacaggttttgccctgattaaaaaatctcccaaagccccaaattcctgttagccaggtggaggcttctgatacgtgtatgagactatgcaaaagtacaagggctgagattcttcgtgtatagctgtgtgaacgtgtatgtacctaggatatgttaaatgtatagctggcaccttagttgcatgaccacatag

SEQ ID NO: 7654 - protein, 847 aa, Homo sapiens; identical to SEQ ID NO: 1096

SEQ ID NO: 7655 - DNA, 4731 bp, Homo sapiens
gtagtgaatgacacagatttgccagatgacatgtagcggacctctgcatcagccaagaggaattaagctttgtcactccccactgggactacctttctcctggtatgtgcgcaaggaattcatatgctgctgctgctgcagccaccagagcagagagccttgagtacactttgccacagaaagcagtgagcaagaatgatagctgtctcttttaaatgccgttgtcaaattctgaggcgacttactaaagaggaattcaagggctccacagtcgtcgagctgatgaagaaggaaggcactaccctgggtctgacggtatcgggaggaattgataaggatggcaagccaagagtatctaatctgcggcaaggaggaattgctgctagaagtgaccagctggatgtgggtgactacatcaaagcagtgaatggaatcaacctggccaaattccgccatgacgagatcatcagcttgctgaagaatgtgggagaaagagtggttcttgaagtagagtacgagcttccaccggtctctgtgcaaggatcaagtgttattttccgaacagtggaggtcacattacataaagaaggcaatacctttggttttgtaattcgagggggagcacatgatgatagaaataaatctcgtccagttgtgataacatgtgttcgtcctggagggcctgctgacagagagggcacgatcaaacccggtgacaggttgctcagtgtggatggaattcggcttcttggaactacgcatgctgaagccatgagtattcttaaacaatgtggacaagaagcagcactgctgatagaatatgatgtctcagtaatggactctgtggcaacagcatccgggccactactagtcgaagttgccaaaactcctggtgccagccttggggttgccctaactacctcgatgtgctgtaacaaacaagtcattgtcatagacaaaatcaaatctgcaagtattgcagacagatgtggcgcattgcatgtgggagatcacatcctctccatcgatggaaccagcatggagtactgtacacttgcagaagcaacccagttcctggccaacaccactgaccaggtcaagcttgagatccttccccatcatcagacccggctggccctaaaggggcccgaccatgtgtccttagcctccagcacagtaggattggctgggcaggttgttcacacagaaaccacagaggttgtgctgacggcagatcctgtcacaggatttgggatccaactgcagggcagtgtgtttgccacagaaactctctcttctccacctctgatttcctatatcgaagctgacagcccagcagagagatgtggggtgctacagattggagacagagtgatggccatcaatggaattccaacagaagacagcaccttcgaagaagccagtcagctcctccgagactcttcaatcacgagcaaggtcacactggaaatcgagtttgatgttgcagagtctgtcatcccaagtagtggaacatttcatgtaaagctgcctaagaagcacaatgtggaacttggaataaccataagttcaccatccagtagaaaaccaggagaccccctcgtcatttcagatatcaagaaagggagtgtggcacacagaactgggaccctggaacttggggataaattgctcgcaatagataatatccggctggacaactgttccatggaagatgcagttcagatcctccagcaatgtgaagacctggtgaagctcaaaatccgcaaagatgaagataattcagatgagcaagaaagttccggagcaattatttacaccgtggagcttaaacgctacggggggccccttggcatcacaatttcaggaactgaagagccgtttgatcctataatcatttcaagcctcactaaagggggattagctgaaagaactggcgcaatccacataggagaccgaatcctagccatcaatagcagcagcttgaaagggaagcctctgagtgaagccatccatttgttacagatggcaggagagactgtcaccttgaaaattaagaaacagacagatgcccagtcagcatcgagccccaagaagttccctatttctagccatttgagtgacctgggggatgtggaggaggactcctcaccagcacagaagccaggcaagctctccgacatgtacccctccacggtgcccagtgtggacagtgctgtggattcatgggatgggtctgcaatagacaccagctatggaactcaaggcactagttttcaggcctcaggatacaatttcaacacctatgactggaggagtccaaaacagagaggcagcttgtccccagtcactaagcctcgaagccagacttacccagatgtggggctgagttatgaagactgggaccggtccacagccagtggttttgcaggggctgccgatagtgcagagacagaacaagaggagaacttctggtctcaagcgctggaggatttggaaacctgcggacagtcaggaattctgagagaactggaggcaacaatcatgtcggggagcacgatgagtttgaatcatgaggctccaacacctcgcagtcagctggggcgacaggccagcttccaggagcgcagcagctcgcggccgcactacagccaaacaactcggagcaacaccctgccttcagatgtgggtaggaagtcagtaaccctgagaaaaatgaaacaagaaataaaggagatcatgtctccaactcctgtggagctgcacaaggtgaccttgtacaaggactctgacatggaggactttgggttcagtgtagcagatggcttactggagaaaggagtgtatgtcaaaaatattcgcccagctgggccaggagatcttggtggcttaaagccctatgacaggctcttacaggtgaatcatgtccgaaccagagactttgactgctgccttgttgtgcccctcatagcagaatccgggaataagctggacctggttattagtagaaacccactggcttcacagaagtctatagaccaacagagtctaccaggagattggagtgaacagaacagtgcttttttccagcagcctagccacggtggtaatttggagacacgagaacccactaatacattatagcaacgctttttataaagcaggacaaaagacaatatctacatggtgctaaaaatcctttaagatttctgtgacctttgaagcacagataatcaatcaacgtggcattaactgcaagcacaggggtcttttaaatctctctcatggctcatgttcacttcccttttcaagttgaagaggtttcttttttggtgaccactatggtatatggtgggcaatgccctgccagtcccaacggtagagaaaaataggccgtcccccacaactctacaattaacatcagaggaaattttttacaagttcatcttactatcactttttaaaaagagaaacatctgtttgaaaatattctctgtgatgatttccttaattcactttgaaatcagtttcttactatgaagtcattaatgtaagaacttggccaacaaagcttttcttctcataggctggctctactaggggaactagtgtttggtaaactgctgggactaccacaatgggaggggtacaggtataaaattaagttatcttaaaatgtttcagcaatgatgcacgtaggagaccataataggtggtggtaaatgttttgcccacgtataggaatgattttaactaagatgtatgctattccctatgcaacaaattatcaaacaggatatgtcttgtgacctgttttttttttaaggacacatttttaatagctgaaaatctctgataatgaattagagtgtgtagtaaacatgagaattagttatattatcttatttttaaaattcaagactaagaacttcagagaatgaagagtctattaaaatgaggttcatcttaatgataggcaaaccaaactcatactgcttgacatgttttgaaaactggtaatattgagggtgtacagcacatgtacttaaaaatgacactggactatcttttgctctgagccatgccacttaccgaaattgtaaatacatttttcacaaatgcattgccaattattaccatccctcaaagcaataaattgtgacagttgctttaaatgtttgtcagcaactgttttcatttgttcagatattttgaatagctacactaataactgttattatttggtgaacataaaaaaataaatagatctgtatattgatggtagactctccatattgaaatgattattttccaaacattttcattttggtcaataattcaaactaccacttaggcaaagtattcgaacactgtgtcctttgtttaaggaaatataaaaaaaaaatcacctttctttttgtgcaaaaaaaatattatttcaatcacatttcagaaccgccagggcaagaaagtataaagcaggatcatgttaagaaaaaagaaaaaaagatcatgagtcacttaaatatgtatttttatttgtaacaaacaagtattaaactgtaaagtatttttgtacaaatttaatactttaatagcatggtatttatcgtctatgtatggttttggggaattcaaaattgttcaaatatttgtatggaaaaaaataaaaccctctaccaaatggaataaacagtgattttaaaaagccaaataaagaggatatgcatt

SEQ ID NO: 7656 - protein, 982 aa, Homo sapiens
MIAVSFKCRCQILRRLTKEEFKGSTVVELMKKEGTTLGLTVSGGIDKDGKPRVSNLRQGGIAARSDQLDVGDYIKAVNGINLAKFRHDEIISLLKNVGERVVLEVEYELPPVSVQGSSVIFRTVEVTLHKEGNTFGFVIRGGAHDDRNKSRPVVITCVRPGGPADREGTIKPGDRLLSVDGIRLLGTTHAEAMSILKQCGQEAALLIEYDVSVMDSVATASGPLLVEVAKTPGASLGVALTTSMCCNKQVIVIDKIKSASIADRCGALHVGDHILSIDGTSMEYCTLAEATQFLANTTDQVKLEILPHHQTRLALKGPDHVSLASSTVGLAGQVVHTETTEVVLTADPVTGFGIQLQGSVFATETLSSPPLISYIEADSPAERCGVLQIGDRVMAINGIPTEDSTFEEASQLLRDSSITSKVTLEIEFDVAESVIPSSGTFHVKLPKKHNVELGITISSPSSRKPGDPLVISDIKKGSVAHRTGTLELGDKLLAIDNIRLDNCSMEDAVQILQQCEDLVKLKIRKDEDNSDEQESSGAIIYTVELKRYGGPLGITISGTEEPFDPIIISSLTKGGLAERTGAIHIGDRILAINSSSLKGKPLSEAIHLLQMAGETVTLKIKKQTDAQSASSPKKFPISSHLSDLGDVEEDSSPAQKPGKLSDMYPSTVPSVDSAVDSWDGSAIDTSYGTQGTSFQASGYNFNTYDWRSPKQRGSLSPVTKPRSQTYPDVGLSYEDWDRSTASGFAGAADSAETEQEENFWSQALEDLETCGQSGILRELEATIMSGSTMSLNHEAPTPRSQLGRQASFQERSSSRPHYSQTTRSNTLPSDVGRKSVTLRKMKQEIKEIMSPTPVELHKVTLYKDSDMEDFGFSVADGLLEKGVYVKNIRPAGPGDLGGLKPYDRLLQVNHVRTRDFDCCLVVPLIAESGNKLDLVISRNPLASQKSIDQQSLPGDWSEQNSAFFQQPSHGGNLETREPTNTL

SEQ ID NO: 7657 - DNA, 4965 bp, Homo sapiens
agtgcttagcgttagatttatggaatggctcctcacacagtgtcgtccctgctttgtacaatttggtgctttgttgctatcgaaacggcattactttctaagccattgtgattgtgaagggggaggaggctgtggcaggcaggggtggtagtagtagtgaatgacacagatttgccagatgacatgtagcggacctctgcatcagccaagaggaattaagctttgtcactccccactgggactacctttctcctggtatgtgcgcaaggaattcatatgctgctgctgctgcagccaccagagcagagagccttgagtacactttgccacagaaagcagtgagcaagaatgatagctgtctcttttaaatgccgttgtcaaattctgaggcgacttactaaagatgagagtccctacactaaatccgccagccagacaaagccgcctgatggagcgttggctgtgaggagacagagcatcccagaggaattcaagggctccacagtcgtcgagctgatgaagaaggaaggcactaccctgggtctgacggtatcgggaggaattgataaggatggcaagccaagagtatctaatctgcggcaaggaggaattgctgctagaagtgaccagctggatgtgggtgactacatcaaagcagtgaatggaatcaacctggccaaattccgccatgacgagatcatcagcttgctgaagaatgtgggagaaagagtggttcttgaagtagagtacgagcttccaccggtctctgtgcaaggatcaagtgttattttccgaacagtggaggtcacattacataaagaaggcaatacctttggttttgtaattcgagggggagcacatgatgatagaaataaatctcgtccagttgtgataacatgtgttcgtcctggagggcctgctgacagagagggcacgatcaaacccggtgacaggttgctcagtgtggatggaattcggcttcttggaactacgcatgctgaagccatgagtattcttaaacaatgtggacaagaagcagcactgctgatagaatatgatgtctcagtaatggactctgtggcaacagcatccgggccactactagtcgaagttgccaaaactcctggtgccagccttggggttgccctaactacctcgatgtgctgtaacaaacaagtcattgtcatagacaaaatcaaatctgcaagtattgcagacagatgtggcgcattgcatgtgggagatcacatcctctccatcgatggaaccagcatggagtactgtacacttgcagaagcaacccagttcctggccaacaccactgaccaggtcaagcttgagatccttccccatcatcagacccggctggccctaaaggggcccgaccatgtgtccttagcctccagcacagtaggattggctgggcaggttgttcacacagaaaccacagaggttgtgctgacggcagatcctgtcacaggatttgggatccaactgcagggcagtgtgtttgccacagaaactctctcttctccacctctgatttcctatatcgaagctgacagcccagcagagagatgtggggtgctacagattggagacagagtgatggccatcaatggaattccaacagaagacagcaccttcgaagaagccagtcagctcctccgagactcttcaatcacgagcaaggtcacactggaaatcgagtttgatgttgcagagtctgtcatcccaagtagtggaacatttcatgtaaagctgcctaagaagcacaatgtggaacttggaataaccataagttcaccatccagtagaaaaccaggagaccccctcgtcatttcagatatcaagaaagggagtgtggcacacagaactgggaccctggaacttggggataaattgctcgcaatagataatatccggctggacaactgttccatggaagatgcagttcagatcctccagcaatgtgaagacctggtgaagctcaaaatccgcaaagatgaagataattcagatgagcaagaaagttccggagcaattatttacaccgtggagcttaaacgctacggggggccccttggcatcacaatttcaggaactgaagagccgtttgatcctataatcatttcaagcctcactaaagggggattagctgaaagaactggcgcaatccacataggagaccgaatcctagccatcaatagcagcagcttgaaagggaagcctctgagtgaagccatccatttgttacagatggcaggagagactgtcaccttgaaaattaagaaacagacagatgcccagtcagcatcgagccccaagaagttccctatttctagccatttgagtgacctgggggatgtggaggaggactcctcaccagcacagaagccaggcaagctctccgacatgtacccctccacggtgcccagtgtggacagtgctgtggattcatgggatgggtctgcaatagacaccagctatggaactcaaggcactagttttcaggcctcaggatacaatttcaacacctatgactggaggagtccaaaacagagaggcagcttgtccccagtcactaagcctcgaagccagacttacccagatgtggggctgagttatgaagactgggaccggtccacagccagtggttttgcaggggctgccgatagtgcagagacagaacaagaggagaacttctggtctcaagcgctggaggatttggaaacctgcggacagtcaggaattctgagagaactggaggcaacaatcatgtcggggagcacgatgagtttgaatcatgaggctccaacacctcgcagtcagctggggcgacaggccagcttccaggagcgcagcagctcgcggccgcactacagccaaacaactcggagcaacaccctgccttcagatgtgggtaggaagtcagtaaccctgagaaaaatgaaacaagaaataaaggagatcatgtctccaactcctgtggagctgcacaaggtgaccttgtacaaggactctgacatggaggactttgggttcagtgtagcagatggcttactggagaaaggagtgtatgtcaaaaatattcgcccagctgggccaggagatcttggtggcttaaagccctatgacaggctcttacaggtgaatcatgtccgaaccagagactttgactgctgccttgttgtgcccctcatagcagaatccgggaataagctggacctggttattagtagaaacccactggcttcacagaagtctatagaccaacagagtctaccaggagattggagtgaacagaacagtgcttttttccagcagcctagccacggtggtaatttggagacacgagaacccactaatacattatagcaacgctttttataaagcaggacaaaagacaatatctacatggtgctaaaaatcctttaagatttctgtgacctttgaagcacagataatcaatcaacgtggcattaactgcaagcacaggggtcttttaaatctctctcatggctcatgttcacttcccttttcaagttgaagaggtttcttttttggtgaccactatggtatatggtgggcaatgccctgccagtcccaacggtagagaaaaataggccgtcccccacaactctacaattaacatcagaggaaattttttacaagttcatcttactatcactttttaaaaagagaaacatctgtttgaaaatattctctgtgatgatttccttaattcactttgaaatcagtttcttactatgaagtcattaatgtaagaacttggccaacaaagcttttcttctcataggctggctctactaggggaactagtgtttggtaaactgctgggactaccacaatgggaggggtacaggtataaaattaagttatcttaaaatgtttcagcaatgatgcacgtaggagaccataataggtggtggtaaatgttttgcccacgtataggaatgattttaactaagatgtatgctattccctatgcaacaaattatcaaacaggatatgtcttgtgacctgttttttttttaaggacacatttttaatagctgaaaatctctgataatgaattagagtgtgtagtaaacatgagaattagttatattatcttatttttaaaattcaagactaagaacttcagagaatgaagagtctattaaaatgaggttcatcttaatgataggcaaaccaaactcatactgcttgacatgttttgaaaactggtaatattgagggtgtacagcacatgtacttaaaaatgacactggactatcttttgctctgagccatgccacttaccgaaattgtaaatacatttttcacaaatgcattgccaattattaccatccctcaaagcaataaattgtgacagttgctttaaatgtttgtcagcaactgttttcatttgttcagatattttgaatagctacactaataactgttattatttggtgaacataaaaaaataaatagatctgtatattgatggtagactctccatattgaaatgattattttccaaacattttcattttggtcaataattcaaactaccacttaggcaaagtattcgaacactgtgtcctttgtttaaggaaatataaaaaaaaaatcacctttctttttgtgcaaaaaaaatattatttcaatcacatttcagaaccgccagggcaagaaagtataaagcaggatcatgttaagaaaaaagaaaaaaagatcatgagtcacttaaatatgtatttttatttgtaacaaacaagtattaaactgtaaagtatttttgtacaaatttaatactttaatagcatggtatttatcgtctatgtatggttttggggaattcaaaattgttcaaatatttgtatggaaaaaaataaaaccctctaccaaatggaataaacagtgattttaaaaagccaaataaagaggatatgcatt

SEQ ID NO: 7658 - protein, 1009 aa, Homo sapiens
MIAVSFKCRCQILRRLTKDESPYTKSASQTKPPDGALAVRRQSIPEEFKGSTVVELMKKEGTTLGLTVSGGIDKDGKPRVSNLRQGGIAARSDQLDVGDYIKAVNGINLAKFRHDEIISLLKNVGERVVLEVEYELPPVSVQGSSVIFRTVEVTLHKEGNTFGFVIRGGAHDDRNKSRPVVITCVRPGGPADREGTIKPGDRLLSVDGIRLLGTTHAEAMSILKQCGQEAALLIEYDVSVMDSVATASGPLLVEVAKTPGASLGVALTTSMCCNKQVIVIDKIKSASIADRCGALHVGDHILSIDGTSMEYCTLAEATQFLANTTDQVKLEILPHHQTRLALKGPDHVSLASSTVGLAGQVVHTETTEVVLTADPVTGFGIQLQGSVFATETLSSPPLISYIEADSPAERCGVLQIGDRVMAINGIPTEDSTFEEASQLLRDSSITSKVTLEIEFDVAESVIPSSGTFHVKLPKKHNVELGITISSPSSRKPGDPLVISDIKKGSVAHRTGTLELGDKLLAIDNIRLDNCSMEDAVQILQQCEDLVKLKIRKDEDNSDEQESSGAIIYTVELKRYGGPLGITISGTEEPFDPIIISSLTKGGLAERTGAIHIGDRILAINSSSLKGKPLSEAIHLLQMAGETVTLKIKKQTDAQSASSPKKFPISSHLSDLGDVEEDSSPAQKPGKLSDMYPSTVPSVDSAVDSWDGSAIDTSYGTQGTSFQASGYNFNTYDWRSPKQRGSLSPVTKPRSQTYPDVGLSYEDWDRSTASGFAGAADSAETEQEENFWSQALEDLETCGQSGILRELEATIMSGSTMSLNHEAPTPRSQLGRQASFQERSSSRPHYSQTTRSNTLPSDVGRKSVTLRKMKQEIKEIMSPTPVELHKVTLYKDSDMEDFGFSVADGLLEKGVYVKNIRPAGPGDLGGLKPYDRLLQVNHVRTRDFDCCLVVPLIAESGNKLDLVISRNPLASQKSIDQQSLPGDWSEQNSAFFQQPSHGGNLETREPTNTL

SEQ ID NO: 7659 - DNA, 5121 bp, Homo sapiens
agtgcttagcgttagatttatggaatggctcctcacacagtgtcgtccctgctttgtacaatttggtgctttgttgctatcgaaacggcattactttctaagccattgtgattgtgaagggggaggaggctgtggcaggcaggggtggtagtagtagtgaatgacacagatttgccagatgacatgtagcggacctctgcatcagccaagaggaattaagctttgtcactccccactgggactacctttctcctggtatgtgcgcaaggaattcatatgctgctgctgctgcagccaccagagcagagagccttgagtacactttgccacagaaagcagtgagcaagaatgatagctgtctcttttaaatgccgttgtcaaattctgaggcgacttactaaagatgagagtccctacactaaatccgccagccagacaaagccgcctgatggagcgttggctgtgaggagacagagcatcccagaggaattcaagggctccacagtcgtcgagctgatgaagaaggaaggcactaccctgggtctgacggtatcgggaggaattgataaggatggcaagccaagagtatctaatctgcggcaaggaggaattgctgctagaagtgaccagctggatgtgggtgactacatcaaagcagtgaatggaatcaacctggccaaattccgccatgacgagatcatcagcttgctgaagaatgtgggagaaagagtggttcttgaagtagagtacgagcttccaccggtctctgtgcaaggatcaagtgttattttccgaacagtggaggtcacattacataaagaaggcaatacctttggttttgtaattcgagggggagcacatgatgatagaaataaatctcgtccagttgtgataacatgtgttcgtcctggagggcctgctgacagagagggcacgatcaaacccggtgacaggttgctcagtgtggatggaattcggcttcttggaactacgcatgctgaagccatgagtattcttaaacaatgtggacaagaagcagcactgctgatagaatatgatgtctcagtaatggactctgtggcaacagcatccgggccactactagtcgaagttgccaaaactcctggtgccagccttggggttgccctaactacctcgatgtgctgtaacaaacaagtcattgtcatagacaaaatcaaatctgcaagtattgcagacagatgtggcgcattgcatgtgggagatcacatcctctccatcgatggaaccagcatggagtactgtacacttgcagaagcaacccagttcctggccaacaccactgaccaggtcaagcttgagatccttccccatcatcagacccggctggccctaaaggggcccgaccatgcagctttggtgtcttcatccttctctcctacctccatgagtgcatacagcctgagttccctgaacatggggactctacctcgaagcctctactccaccagcccacgtggaaccatgatgaggaggagactgaaaaagaaagacttcaaaagctcattgtccttagcctccagcacagtaggattggctgggcaggttgttcacacagaaaccacagaggttgtgctgacggcagatcctgtcacaggatttgggatccaactgcagggcagtgtgtttgccacagaaactctctcttctccacctctgatttcctatatcgaagctgacagcccagcagagagatgtggggtgctacagattggagacagagtgatggccatcaatggaattccaacagaagacagcaccttcgaagaagccagtcagctcctccgagactcttcaatcacgagcaaggtcacactggaaatcgagtttgatgttgcagagtctgtcatcccaagtagtggaacatttcatgtaaagctgcctaagaagcacaatgtggaacttggaataaccataagttcaccatccagtagaaaaccaggagaccccctcgtcatttcagatatcaagaaagggagtgtggcacacagaactgggaccctggaacttggggataaattgctcgcaatagataatatccggctggacaactgttccatggaagatgcagttcagatcctccagcaatgtgaagacctggtgaagctcaaaatccgcaaagatgaagataattcagatgagcaagaaagttccggagcaattatttacaccgtggagcttaaacgctacggggggccccttggcatcacaatttcaggaactgaagagccgtttgatcctataatcatttcaagcctcactaaagggggattagctgaaagaactggcgcaatccacataggagaccgaatcctagccatcaatagcagcagcttgaaagggaagcctctgagtgaagccatccatttgttacagatggcaggagagactgtcaccttgaaaattaagaaacagacagatgcccagtcagcatcgagccccaagaagttccctatttctagccatttgagtgacctgggggatgtggaggaggactcctcaccagcacagaagccaggcaagctctccgacatgtacccctccacggtgcccagtgtggacagtgctgtggattcatgggatgggtctgcaatagacaccagctatggaactcaaggcactagttttcaggcctcaggatacaatttcaacacctatgactggaggagtccaaaacagagaggcagcttgtccccagtcactaagcctcgaagccagacttacccagatgtggggctgagttatgaagactgggaccggtccacagccagtggttttgcaggggctgccgatagtgcagagacagaacaagaggagaacttctggtctcaagcgctggaggatttggaaacctgcggacagtcaggaattctgagagaactggaggcaacaatcatgtcggggagcacgatgagtttgaatcatgaggctccaacacctcgcagtcagctggggcgacaggccagcttccaggagcgcagcagctcgcggccgcactacagccaaacaactcggagcaacaccctgccttcagatgtgggtaggaagtcagtaaccctgagaaaaatgaaacaagaaataaaggagatcatgtctccaactcctgtggagctgcacaaggtgaccttgtacaaggactctgacatggaggactttgggttcagtgtagcagatggcttactggagaaaggagtgtatgtcaaaaatattcgcccagctgggccaggagatcttggtggcttaaagccctatgacaggctcttacaggtgaatcatgtccgaaccagagactttgactgctgccttgttgtgcccctcatagcagaatccgggaataagctggacctggttattagtagaaacccactggcttcacagaagtctatagaccaacagagtctaccaggagattggagtgaacagaacagtgcttttttccagcagcctagccacggtggtaatttggagacacgagaacccactaatacattatagcaacgctttttataaagcaggacaaaagacaatatctacatggtgctaaaaatcctttaagatttctgtgacctttgaagcacagataatcaatcaacgtggcattaactgcaagcacaggggtcttttaaatctctctcatggctcatgttcacttcccttttcaagttgaagaggtttcttttttggtgaccactatggtatatggtgggcaatgccctgccagtcccaacggtagagaaaaataggccgtcccccacaactctacaattaacatcagaggaaattttttacaagttcatcttactatcactttttaaaaagagaaacatctgtttgaaaatattctctgtgatgatttccttaattcactttgaaatcagtttcttactatgaagtcattaatgtaagaacttggccaacaaagcttttcttctcataggctggctctactaggggaactagtgtttggtaaactgctgggactaccacaatgggaggggtacaggtataaaattaagttatcttaaaatgtttcagcaatgatgcacgtaggagaccataataggtggtggtaaatgttttgcccacgtataggaatgattttaactaagatgtatgctattccctatgcaacaaattatcaaacaggatatgtcttgtgacctgttttttttttaaggacacatttttaatagctgaaaatctctgataatgaattagagtgtgtagtaaacatgagaattagttatattatcttatttttaaaattcaagactaagaacttcagagaatgaagagtctattaaaatgaggttcatcttaatgataggcaaaccaaactcatactgcttgacatgttttgaaaactggtaatattgagggtgtacagcacatgtacttaaaaatgacactggactatcttttgctctgagccatgccacttaccgaaattgtaaatacatttttcacaaatgcattgccaattattaccatccctcaaagcaataaattgtgacagttgctttaaatgtttgtcagcaactgttttcatttgttcagatattttgaatagctacactaataactgttattatttggtgaacataaaaaaataaatagatctgtatattgatggtagactctccatattgaaatgattattttccaaacattttcattttggtcaataattcaaactaccacttaggcaaagtattcgaacactgtgtcctttgtttaaggaaatataaaaaaaaaatcacctttctttttgtgcaaaaaaaatattatttcaatcacatttcagaaccgccagggcaagaaagtataaagcaggatcatgttaagaaaaaagaaaaaaagatcatgagtcacttaaatatgtatttttatttgtaacaaacaagtattaaactgtaaagtatttttgtacaaatttaatactttaatagcatggtatttatcgtctatgtatggttttggggaattcaaaattgttcaaatatttgtatggaaaaaaataaaaccctctaccaaatggaataaacagtgattttaaaaagccaaataaagaggatatgcatt

SEQ ID NO: 7660 - protein, 1061 aa, Homo sapiens
MIAVSFKCRCQILRRLTKDESPYTKSASQTKPPDGALAVRRQSIPEEFKGSTVVELMKKEGTTLGLTVSGGIDKDGKPRVSNLRQGGIAARSDQLDVGDYIKAVNGINLAKFRHDEIISLLKNVGERVVLEVEYELPPVSVQGSSVIFRTVEVTLHKEGNTFGFVIRGGAHDDRNKSRPVVITCVRPGGPADREGTIKPGDRLLSVDGIRLLGTTHAEAMSILKQCGQEAALLIEYDVSVMDSVATASGPLLVEVAKTPGASLGVALTTSMCCNKQVIVIDKIKSASIADRCGALHVGDHILSIDGTSMEYCTLAEATQFLANTTDQVKLEILPHHQTRLALKGPDHAALVSSSFSPTSMSAYSLSSLNMGTLPRSLYSTSPRGTMMRRRLKKKDFKSSLSLASSTVGLAGQVVHTETTEVVLTADPVTGFGIQLQGSVFATETLSSPPLISYIEADSPAERCGVLQIGDRVMAINGIPTEDSTFEEASQLLRDSSITSKVTLEIEFDVAESVIPSSGTFHVKLPKKHNVELGITISSPSSRKPGDPLVISDIKKGSVAHRTGTLELGDKLLAIDNIRLDNCSMEDAVQILQQCEDLVKLKIRKDEDNSDEQESSGAIIYTVELKRYGGPLGITISGTEEPFDPIIISSLTKGGLAERTGAIHIGDRILAINSSSLKGKPLSEAIHLLQMAGETVTLKIKKQTDAQSASSPKKFPISSHLSDLGDVEEDSSPAQKPGKLSDMYPSTVPSVDSAVDSWDGSAIDTSYGTQGTSFQASGYNFNTYDWRSPKQRGSLSPVTKPRSQTYPDVGLSYEDWDRSTASGFAGAADSAETEQEENFWSQALEDLETCGQSGILRELEATIMSGSTMSLNHEAPTPRSQLGRQASFQERSSSRPHYSQTTRSNTLPSDVGRKSVTLRKMKQEIKEIMSPTPVELHKVTLYKDSDMEDFGFSVADGLLEKGVYVKNIRPAGPGDLGGLKPYDRLLQVNHVRTRDFDCCLVVPLIAESGNKLDLVISRNPLASQKSIDQQSLPGDWSEQNSAFFQQPSHGGNLETREPTNTL

SEQ ID NO: 7661 - DNA, 4611 bp, Homo sapiens
aatcttaaatgcaaaaggtttctcagatggtgttctctgtgagcagtctatgagagtccctacactaaatccgccagccagacaaagccgcctgatggagcgttggctgtgaggagacagagcatcccagaggaattcaagggctccacagtcgtcgagctgatgaagaaggaaggcactaccctgggtctgacggtatcgggaggaattgataaggatggcaagccaagagtatctaatctgcggcaaggaggaattgctgctagaagtgaccagctggatgtgggtgactacatcaaagcagtgaatggaatcaacctggccaaattccgccatgacgagatcatcagcttgctgaagaatgtgggagaaagagtggttcttgaagtagagtacgagcttccaccggtctctgtgcaaggatcaagtgttattttccgaacagtggaggtcacattacataaagaaggcaatacctttggttttgtaattcgagggggagcacatgatgatagaaataaatctcgtccagttgtgataacatgtgttcgtcctggagggcctgctgacagagagggcacgatcaaacccggtgacaggttgctcagtgtggatggaattcggcttcttggaactacgcatgctgaagccatgagtattcttaaacaatgtggacaagaagcagcactgctgatagaatatgatgtctcagtaatggactctgtggcaacagcatccgggccactactagtcgaagttgccaaaactcctggtgccagccttggggttgccctaactacctcgatgtgctgtaacaaacaagtcattgtcatagacaaaatcaaatctgcaagtattgcagacagatgtggcgcattgcatgtgggagatcacatcctctccatcgatggaaccagcatggagtactgtacacttgcagaagcaacccagttcctggccaacaccactgaccaggtcaagcttgagatccttccccatcatcagacccggctggccctaaaggggcccgaccatgtgtccttagcctccagcacagtaggattggctgggcaggttgttcacacagaaaccacagaggttgtgctgacggcagatcctgtcacaggatttgggatccaactgcagggcagtgtgtttgccacagaaactctctcttctccacctctgatttcctatatcgaagctgacagcccagcagagagatgtggggtgctacagattggagacagagtgatggccatcaatggaattccaacagaagacagcaccttcgaagaagccagtcagctcctccgagactcttcaatcacgagcaaggtcacactggaaatcgagtttgatgttgcagagtctgtcatcccaagtagtggaacatttcatgtaaagctgcctaagaagcacaatgtggaacttggaataaccataagttcaccatccagtagaaaaccaggagaccccctcgtcatttcagatatcaagaaagggagtgtggcacacagaactgggaccctggaacttggggataaattgctcgcaatagataatatccggctggacaactgttccatggaagatgcagttcagatcctccagcaatgtgaagacctggtgaagctcaaaatccgcaaagatgaagataattcagatgagcaagaaagttccggagcaattatttacaccgtggagcttaaacgctacggggggccccttggcatcacaatttcaggaactgaagagccgtttgatcctataatcatttcaagcctcactaaagggggattagctgaaagaactggcgcaatccacataggagaccgaatcctagccatcaatagcagcagcttgaaagggaagcctctgagtgaagccatccatttgttacagatggcaggagagactgtcaccttgaaaattaagaaacagacagatgcccagtcagcatcgagccccaagaagttccctatttctagccatttgagtgacctgggggatgtggaggaggactcctcaccagcacagaagccaggcaagctctccgacatgtacccctccacggtgcccagtgtggacagtgctgtggattcatgggatgggtctgcaatagacaccagctatggaactcaaggcactagttttcaggcctcaggatacaatttcaacacctatgactggaggagtccaaaacagagaggcagcttgtccccagtcactaagcctcgaagccagacttacccagatgtggggctgagttatgaagactgggaccggtccacagccagtggttttgcaggggctgccgatagtgcagagacagaacaagaggagaacttctggtctcaagcgctggaggatttggaaacctgcggacagtcaggaattctgagagaactggaggcaacaatcatgtcggggagcacgatgagtttgaatcatgaggctccaacacctcgcagtcagctggggcgacaggccagcttccaggagcgcagcagctcgcggccgcactacagccaaacaactcggagcaacaccctgccttcagatgtgggtaggaagtcagtaaccctgagaaaaatgaaacaagaaataaaggagatcatgtctccaactcctgtggagctgcacaaggtgaccttgtacaaggactctgacatggaggactttgggttcagtgtagcagatggcttactggagaaaggagtgtatgtcaaaaatattcgcccagctgggccaggagatcttggtggcttaaagccctatgacaggctcttacaggtgaatcatgtccgaaccagagactttgactgctgccttgttgtgcccctcatagcagaatccgggaataagctggacctggttattagtagaaacccactggcttcacagaagtctatagaccaacagagtctaccaggagattggagtgaacagaacagtgcttttttccagcagcctagccacggtggtaatttggagacacgagaacccactaatacattatagcaacgctttttataaagcaggacaaaagacaatatctacatggtgctaaaaatcctttaagatttctgtgacctttgaagcacagataatcaatcaacgtggcattaactgcaagcacaggggtcttttaaatctctctcatggctcatgttcacttcccttttcaagttgaagaggtttcttttttggtgaccactatggtatatggtgggcaatgccctgccagtcccaacggtagagaaaaataggccgtcccccacaactctacaattaacatcagaggaaattttttacaagttcatcttactatcactttttaaaaagagaaacatctgtttgaaaatattctctgtgatgatttccttaattcactttgaaatcagtttcttactatgaagtcattaatgtaagaacttggccaacaaagcttttcttctcataggctggctctactaggggaactagtgtttggtaaactgctgggactaccacaatgggaggggtacaggtataaaattaagttatcttaaaatgtttcagcaatgatgcacgtaggagaccataataggtggtggtaaatgttttgcccacgtataggaatgattttaactaagatgtatgctattccctatgcaacaaattatcaaacaggatatgtcttgtgacctgttttttttttaaggacacatttttaatagctgaaaatctctgataatgaattagagtgtgtagtaaacatgagaattagttatattatcttatttttaaaattcaagactaagaacttcagagaatgaagagtctattaaaatgaggttcatcttaatgataggcaaaccaaactcatactgcttgacatgttttgaaaactggtaatattgagggtgtacagcacatgtacttaaaaatgacactggactatcttttgctctgagccatgccacttaccgaaattgtaaatacatttttcacaaatgcattgccaattattaccatccctcaaagcaataaattgtgacagttgctttaaatgtttgtcagcaactgttttcatttgttcagatattttgaatagctacactaataactgttattatttggtgaacataaaaaaataaatagatctgtatattgatggtagactctccatattgaaatgattattttccaaacattttcattttggtcaataattcaaactaccacttaggcaaagtattcgaacactgtgtcctttgtttaaggaaatataaaaaaaaaatcacctttctttttgtgcaaaaaaaatattatttcaatcacatttcagaaccgccagggcaagaaagtataaagcaggatcatgttaagaaaaaagaaaaaaagatcatgagtcacttaaatatgtatttttatttgtaacaaacaagtattaaactgtaaagtatttttgtacaaatttaatactttaatagcatggtatttatcgtctatgtatggttttggggaattcaaaattgttcaaatatttgtatggaaaaaaataaaaccctctaccaaatggaataaacagtgattttaaaaagccaaataaagaggatatgcatt

SEQ ID NO: 7662 - protein, 953 aa, Homo sapiens
MKKEGTTLGLTVSGGIDKDGKPRVSNLRQGGIAARSDQLDVGDYIKAVNGINLAKFRHDEIISLLKNVGERVVLEVEYELPPVSVQGSSVIFRTVEVTLHKEGNTFGFVIRGGAHDDRNKSRPVVITCVRPGGPADREGTIKPGDRLLSVDGIRLLGTTHAEAMSILKQCGQEAALLIEYDVSVMDSVATASGPLLVEVAKTPGASLGVALTTSMCCNKQVIVIDKIKSASIADRCGALHVGDHILSIDGTSMEYCTLAEATQFLANTTDQVKLEILPHHQTRLALKGPDHVSLASSTVGLAGQVVHTETTEVVLTADPVTGFGIQLQGSVFATETLSSPPLISYIEADSPAERCGVLQIGDRVMAINGIPTEDSTFEEASQLLRDSSITSKVTLEIEFDVAESVIPSSGTFHVKLPKKHNVELGITISSPSSRKPGDPLVISDIKKGSVAHRTGTLELGDKLLAIDNIRLDNCSMEDAVQILQQCEDLVKLKIRKDEDNSDEQESSGAIIYTVELKRYGGPLGITISGTEEPFDPIIISSLTKGGLAERTGAIHIGDRILAINSSSLKGKPLSEAIHLLQMAGETVTLKIKKQTDAQSASSPKKFPISSHLSDLGDVEEDSSPAQKPGKLSDMYPSTVPSVDSAVDSWDGSAIDTSYGTQGTSFQASGYNFNTYDWRSPKQRGSLSPVTKPRSQTYPDVGLSYEDWDRSTASGFAGAADSAETEQEENFWSQALEDLETCGQSGILRELEATIMSGSTMSLNHEAPTPRSQLGRQASFQERSSSRPHYSQTTRSNTLPSDVGRKSVTLRKMKQEIKEIMSPTPVELHKVTLYKDSDMEDFGFSVADGLLEKGVYVKNIRPAGPGDLGGLKPYDRLLQVNHVRTRDFDCCLVVPLIAESGNKLDLVISRNPLASQKSIDQQSLPGDWSEQNSAFFQQPSHGGNLETREPTNTL

SEQ ID NO: 7663 - DNA, 5002 bp, Homo sapiens
gatggaccgcttcctgggttttgtcaaggcgataagaagatctaggagaagaaaggggaaaaagtaccgaccagaagaggattaccacgagggctatgaggatgtctattattacgcttcagagcattttcgaaagtctcgctctgttgcccgggctggagtgtggtggcttgatcctggttcaacctctgcctcccaggttcaaggagtctcgtgcctcagcctcctaagtacctgggattacagagtcatttctacagaaagaagcaggactgtttctcatcaggattctatgctcgtgtccagaactgtgaaatgaggagtggtgacgctgactatacctccttttaattgagacagtaaggccttctcaccttccccagcttactggggatgggaacagaacataagacaccagcagaaagagaagccaagagaaaatgagagtccctacactaaatccgccagccagacaaagccgcctgatggagcgttggctgtgaggagacagagcatcccagaggaattcaagggctccacagtcgtcgagctgatgaagaaggaaggcactaccctgggtctgacggtatcgggaggaattgataaggatggcaagccaagagtatctaatctgcggcaaggaggaattgctgctagaagtgaccagctggatgtgggtgactacatcaaagcagtgaatggaatcaacctggccaaattccgccatgacgagatcatcagcttgctgaagaatgtgggagaaagagtggttcttgaagtagagtacgagcttccaccggtctctgtgcaaggatcaagtgttattttccgaacagtggaggtcacattacataaagaaggcaatacctttggttttgtaattcgagggggagcacatgatgatagaaataaatctcgtccagttgtgataacatgtgttcgtcctggagggcctgctgacagagagggcacgatcaaacccggtgacaggttgctcagtgtggatggaattcggcttcttggaactacgcatgctgaagccatgagtattcttaaacaatgtggacaagaagcagcactgctgatagaatatgatgtctcagtaatggactctgtggcaacagcatccgggccactactagtcgaagttgccaaaactcctggtgccagccttggggttgccctaactacctcgatgtgctgtaacaaacaagtcattgtcatagacaaaatcaaatctgcaagtattgcagacagatgtggcgcattgcatgtgggagatcacatcctctccatcgatggaaccagcatggagtactgtacacttgcagaagcaacccagttcctggccaacaccactgaccaggtcaagcttgagatccttccccatcatcagacccggctggccctaaaggggcccgaccatgtgtccttagcctccagcacagtaggattggctgggcaggttgttcacacagaaaccacagaggttgtgctgacggcagatcctgtcacaggatttgggatccaactgcagggcagtgtgtttgccacagaaactctctcttctccacctctgatttcctatatcgaagctgacagcccagcagagagatgtggggtgctacagattggagacagagtgatggccatcaatggaattccaacagaagacagcaccttcgaagaagccagtcagctcctccgagactcttcaatcacgagcaaggtcacactggaaatcgagtttgatgttgcagagtctgtcatcccaagtagtggaacatttcatgtaaagctgcctaagaagcacaatgtggaacttggaataaccataagttcaccatccagtagaaaaccaggagaccccctcgtcatttcagatatcaagaaagggagtgtggcacacagaactgggaccctggaacttggggataaattgctcgcaatagataatatccggctggacaactgttccatggaagatgcagttcagatcctccagcaatgtgaagacctggtgaagctcaaaatccgcaaagatgaagataattcagatgagcaagaaagttccggagcaattatttacaccgtggagcttaaacgctacggggggccccttggcatcacaatttcaggaactgaagagccgtttgatcctataatcatttcaagcctcactaaagggggattagctgaaagaactggcgcaatccacataggagaccgaatcctagccatcaatagcagcagcttgaaagggaagcctctgagtgaagccatccatttgttacagatggcaggagagactgtcaccttgaaaattaagaaacagacagatgcccagtcagcatcgagccccaagaagttccctatttctagccatttgagtgacctgggggatgtggaggaggactcctcaccagcacagaagccaggcaagctctccgacatgtacccctccacggtgcccagtgtggacagtgctgtggattcatgggatgggtctgcaatagacaccagctatggaactcaaggcactagttttcaggcctcaggatacaatttcaacacctatgactggaggagtccaaaacagagaggcagcttgtccccagtcactaagcctcgaagccagacttacccagatgtggggctgagttatgaagactgggaccggtccacagccagtggttttgcaggggctgccgatagtgcagagacagaacaagaggagaacttctggtctcaagcgctggaggatttggaaacctgcggacagtcaggaattctgagagaactggaggcaacaatcatgtcggggagcacgatgagtttgaatcatgaggctccaacacctcgcagtcagctggggcgacaggccagcttccaggagcgcagcagctcgcggccgcactacagccaaacaactcggagcaacaccctgccttcagatgtgggtaggaagtcagtaaccctgagaaaaatgaaacaagaaataaaggagatcatgtctccaactcctgtggagctgcacaaggtgaccttgtacaaggactctgacatggaggactttgggttcagtgtagcagatggcttactggagaaaggagtgtatgtcaaaaatattcgcccagctgggccaggagatcttggtggcttaaagccctatgacaggctcttacaggtgaatcatgtccgaaccagagactttgactgctgccttgttgtgcccctcatagcagaatccgggaataagctggacctggttattagtagaaacccactggcttcacagaagtctatagaccaacagagtctaccaggagattggagtgaacagaacagtgcttttttccagcagcctagccacggtggtaatttggagacacgagaacccactaatacattatagcaacgctttttataaagcaggacaaaagacaatatctacatggtgctaaaaatcctttaagatttctgtgacctttgaagcacagataatcaatcaacgtggcattaactgcaagcacaggggtcttttaaatctctctcatggctcatgttcacttcccttttcaagttgaagaggtttcttttttggtgaccactatggtatatggtgggcaatgccctgccagtcccaacggtagagaaaaataggccgtcccccacaactctacaattaacatcagaggaaattttttacaagttcatcttactatcactttttaaaaagagaaacatctgtttgaaaatattctctgtgatgatttccttaattcactttgaaatcagtttcttactatgaagtcattaatgtaagaacttggccaacaaagcttttcttctcataggctggctctactaggggaactagtgtttggtaaactgctgggactaccacaatgggaggggtacaggtataaaattaagttatcttaaaatgtttcagcaatgatgcacgtaggagaccataataggtggtggtaaatgttttgcccacgtataggaatgattttaactaagatgtatgctattccctatgcaacaaattatcaaacaggatatgtcttgtgacctgttttttttttaaggacacatttttaatagctgaaaatctctgataatgaattagagtgtgtagtaaacatgagaattagttatattatcttatttttaaaattcaagactaagaacttcagagaatgaagagtctattaaaatgaggttcatcttaatgataggcaaaccaaactcatactgcttgacatgttttgaaaactggtaatattgagggtgtacagcacatgtacttaaaaatgacactggactatcttttgctctgagccatgccacttaccgaaattgtaaatacatttttcacaaatgcattgccaattattaccatccctcaaagcaataaattgtgacagttgctttaaatgtttgtcagcaactgttttcatttgttcagatattttgaatagctacactaataactgttattatttggtgaacataaaaaaataaatagatctgtatattgatggtagactctccatattgaaatgattattttccaaacattttcattttggtcaataattcaaactaccacttaggcaaagtattcgaacactgtgtcctttgtttaaggaaatataaaaaaaaaatcacctttctttttgtgcaaaaaaaatattatttcaatcacatttcagaaccgccagggcaagaaagtataaagcaggatcatgttaagaaaaaagaaaaaaagatcatgagtcacttaaatatgtatttttatttgtaacaaacaagtattaaactgtaaagtatttttgtacaaatttaatactttaatagcatggtatttatcgtctatgtatggttttggggaattcaaaattgttcaaatatttgtatggaaaaaaataaaaccctctaccaaatggaataaacagtgattttaaaaagccaaataaagaggatatgcatt

SEQ ID NO: 7664 - protein, 953 aa, Homo sapiens; identical to SEQ ID NO: 7662

SEQ ID NO: 7665 - DNA, 111 bp, Homo sapiens
agctgccaatgaaaaactaatacttcttcataatcagctactaagaaatttgatagatgaaaaaagataatgaaagctggtgtaagcaatcaaaataaacatgagttaacc

SEQ ID NO: 7666 - DNA, 677 bp, Homo sapiens
ggagaggtgatctcggcatctactccaaacgcctcgctttgattcctatataaccttgttgataactggagttttggggaatcttaggttttaagaacttcatttcacaggtacttaaaattaatatcctccactgcaaggccaagaattggtaatcatgtagatctcctgtatgagttcctcttcacagcagagatagatttggaccctagacccagatgttgcattccctcacgaaacgactgtgagcaggtctctaagccttggtttctttaccaaggttgtcagaggtgagacagacaggtgtgggctggtaacctgaagcagctggtgatctgagcagttcctcatctctctcagcacctatcacaggtcctggcaccgtcagaatacaccaggcctccggcactcctcactagctccatcgcctctcacctggacttttgcagtcacctcccagctggtctccctgtttctgctcctgttctctgacacacagcaaagccagccacctggtcctcttaaacttcaagagcagtcatagcacttctctgctctgaaactctcctgggatgtccagtctcagtaggagtaaaagctaatggcctcacagtgccctaaaggaccctccccattcattctggtgcccaggagctctccctcttcctcacttccac

SEQ ID NO: 7667 - protein, 69 aa, Homo sapiens
SEQFLISLSTYHRSWHRQNTPGLRHSSLAPSPLTWTFAVTSQLVSLFLLLFSDTQQSQPPGPLKLQEQS

SEQ ID NO: 7668 - DNA, 1641 bp, Homo sapiens
atgaagactggagtgagccctcatcagccagatggactgtttcatctcttccgaaatagaaacctccaacctactcagcccttttgaggccaaaaagatacccatgggccctcaaaaaccaacagtctctacaccagactaaaacaagtttcctaaaagcattttccttttgggctcatttttattacctctccatcccatggtccgaagataagaataatttgcatataacagtcagtattaaaatttttgatttgcaatggatcaatgaatgacgaggtcagcccatctgtgactgaaccaatcaatgaatgagaaatggaaactgttggggggaatgcacttctacttagaggcagatatggcgaagcaaaccaaagatcttgtgtctctctctgatggagatatttaattgctggcatcatgcttcccagtctgttcttcctgtctgagcaaatttggaagcccaagctaccatggagctatcatatggacctcccagactgtgtgagcaagaaataaaccttggttgagataagccgttcagaccattgcaaatcagaaaacagactttgaggattaaaaatataataagtgaaatagatgcctccagacatcgcattacaaagtcttcttatttcttgcagcaggaaatgtcaagacacagacaagcaactactcaaaggccacatggctggtaaatggcaacatcagaccacacacccagtagtttggcttaagagcatgccgataacatcacgctgtaatatctttccaacaacccatttgcgatatttatcatgagcggtaggggatgaagaggtatgtgcttgaaaggcaatcaggatctactttggaggaaactcaaactaagacaagttgctgctggtgctggggcccgaggaggtccgcgccggaggagggccacagggactgagcgagtgacagacgcaccacccgtcaatgctgcaaccctgtaaggcctccatggactctctacgtgagtgtagaatgaatcaagccgactcaaacacagcagctattccacatgcagtggaagatattcaaggagacgacagatggatatctcagcacaacagatttgtcctggatgactttgagcttcttgaacatagagactgggttacattcatcattgtaaatctggggtccacctcaatgacgagcacatgagaggcattggataaatacttcctgaagcatcactttagagagaataactcacaagccctgaagtcctgcatttggtttggctcattgaaaaactactcagaggaatttgacaacgacattaggtgtctccatcacagctttatggaacagttaatgtgagctcgctttcaagtcagaatctaaaagtccaggtgcatcttaactctgaacctttgaagtttactcatcctcatttaatgtgataatgtaatctatatgttcagaatccatttgaggggcagtacagggaaaatggcatgcagaaggaaagatgaactgctctcaggggtgaaatctatctcacacgtgcatttatcttgggcagacactgttgtttaaactaaagataatcacaggcagttctgtgacattaacctgcttagttactcctgaataaaaccaggaatg

SEQ ID NO: 7669 - protein, 76 aa, Homo sapiens
MLQPCKASMDSLRECRMNQADSNTAAIPHAVEDIQGDDRWISQHNRFVLDDFELLEHRDWVTFIIVNLGSTSMTST

SEQ ID NO: 7670 - DNA, 2944 bp, Homo sapiens
tatatttgattccctcttgcaatatgtgcttttgatcatgaaactgctgagaaaaggctccttctaaaccacaaaacaaggttgctgctggtgctggggcccgaggaggtccgcgccggaggagggccacagggactgagcgagtgacagacgcaccacccgtcaatgctgcaaccctgtaaggcctccatggactctctacgtgagtgtagaatgaatcaagccgactcaaacacagcagctattccacatgcagtggaagatattcaaggagacgacagatggatatctcagcacaacagatttgtcctggatggagagggctctgcaaagatctgcagagccctctatgaactgatcatgcagctgatggaggaacacccaaggagagaaacaaaccaccattgcctgactggctcccatcagcgttaatctcttcccagcttccttgatcagttatgccactggcactacagaatccatctctttctcaaagcactttgcattgcaaaatgttcctggatgttcagctctagtgtttgaaagggtggagggatttacactggccttgcacgtagaaggtttattagacacaggagaaaaaatagcctaggaagattgttgtttaaatttatctgaaaccagaaggagactttttagttgtatgtgtgatgcatttgttgaattatcactgtttttcctaggacaatatcaagtccaagaactgaccgatatgaagtttttttttcttggccttgctttctatgggttatgtcatatgtaataattatcagaatcacacctacttggcttaaaaacagatttttattttaatttttaaagctcataatttaaccttttttcttgttttgctttattcatatatatcctcaatattttcttaacatgcagcaacagattgaacatgcttgccattcaaatatgagagatgctatagttacaaaggaatttgttccactttcttaatccttcctatgcatagcagtgaaaaacaaattttgccccatgcagggaaccctttggaaggttttttggttttgtttgtttgtttgttttttgtttagatggattctcattctgttgcccaggctggagtgcaatagcatgatctcggctcactgcaacctctgcctccttggttcaagcgattctcctgcctcagcctccggaatagctaggattacaggcccccaccaccacgcctggctaatttttttgtgtttttagtagcaacggggttttaccatgttggtcaggctgatctcgaactcctgacctcaggtgatccacccacttcggcctcccaaagcgctgggactacaggcgtgagccaccgcagtcagctggaaggtatcatttttatgttgctaaatatcatgtctatcataaacctatgcctgcagcctttcctcttctctgaagtataagccccccttactctcatgatattaccaatgtagaactcattcttgtgtggtattctgcactatagagtctgcgtagtgttctggtatgttctggtatgttttgtttgcttttccctgaaaatctgctatagtttcctttttttggaaaaaaaaaacaacaaaaacctctgctttccattccatactacctgccattatttcaagttttataatatcccaaggtgtacattttatttttttttaattgactttgtttttaaataaagcagtccagaaaatttggtcttttcccgggaggaaacaaatgaagctgctcttcagaatagccattctgcttttatcccaccagttcagtaaaaaagaactagatttgtttaacttttaaggtttctcattaacgtaccttcacctgaaaatttccttcaagagagctctttataatcttaatgtttgcttgggcaacaagaactgccatgtaaaaataaataatgggacgatagatggcatattgttcaatatacctgcggaatatgtataaactggatgtacagacagatattttgaactagaccaggtgggtattgaagtaacccaacaaaatgtgatctgcagtgattctgcttaatgttcaaattcaacagctaaggtatatgttttatgttctgctcgcaaggcaaatggcagtacttttgtgtgctggaggagaggttgctgattggtgccaagacccacttctgattgagagggataaaagttgggctgaattttctctagtcaagactccttctagatttttttttttgtctttaaaaatacatactttaaaaatgtatcatgtcttcattaataacagaaaatacacatggtgctcactaaatttgtttactacattaaaatttcctttttgtttttagtagtccaggttcttgagttttttcaaggcagaatttttttattttattttatttttagctgaggtacagttgtataggaaggagaattaagccagaatttggtgtgtgcaaagacaatttcctatccaggtctttttctgtcagagagtgagagttttgtccaaatgaacccattaggttactactgagcatgcgattttagcttttcttttcacggaggatcaaatatccctttgtgagctgagcttccacttgtttgcttatgtatgtaaacttcagatatcactatattctatatctaccacagctattcaggcaacagtattctaatagctagcctttaaataaaaatctgcctcattactaatgttcaaaaaaacaaagataaaaataggtctaatcctaggtagaaaaggtgtttttccatacatcaagatttatagaaaaggagattcagagtcatgctaagacagaatttcaatgcttacattgttctcctcaaagataaattcattcatctaaccatcttacagagtaatctttgtttttgtttggttctttccattaaaaaaattaagatcg

SEQ ID NO: 7671 - protein, 88 aa, Homo sapiens
MLQPCKASMDSLRECRMNQADSNTAAIPHAVEDIQGDDRWISQHNRFVLDGEGSAKICRALYELIMQLMEEHPRRETNHHCLTGSHQR

SEQ ID NO: 7672 - DNA, 555 bp, Homo sapiens
gcttttgatcatgaaactgctgagaaaaggctccttctaaaccacaaaacaagatatgaagactggagtgagccctcatcagccagatggactgtttcatctcttccgaaatagaaacctccaacctactcagcccttttgaggccaaaaagatacccatgggccctcaaaaaccaacagtctctacaccagactaaaacaagtttcctaaaagcattttccttttgggctcatttttattacctctccatcccatggtccgaagataagaataatttgcatataacagtcagtattaaaatttttgatttgcaatggatcaatgaatgacgaggtcagcccatctgtgactgaaccaatcaatgaatgagaaatgggtaggtgatatttactgtcttctctgttctaaggcctggagggtgagggcattgatctactagtttgcccttatatattttctttgctggagtttcaacatttctccctttcattctgctgcaattgaccaaaacttaaatagtctgggagaggtggagaaagtagatctaatagtat

SEQ ID NO: 7673 - protein, 36 aa, Homo sapiens
MDCFISSEIETSNLLSPFEAKKIPMGPQKPTVSTPD

SEQ ID NO: 7674 - DNA, 569 bp, Homo sapiens
cctctcacagacatcaggattaggttaaaactttcaatgaaagacatgaagatgaaatagccatgaggtctccgtttcaaattgcagaggagaaaatctggttgaccctcctgtacctcttcccttatgtttgaatttggagaaaaatcgcaagaatctctccggggagggagattacagggattgggcatgggagaggcggggaggactcaccaattttaaagatatgaagactggagtgagccctcatcagccagatggactgtttcatctcttccgaaatagaaacctccaacctactcagcccttttgaggccaaaaagatacccatgggccctcaaaaaccaacagtctctacaccagactaaaacaagtttcctaaaagcattttccttttgggctcatttttattacctctccatcccatggtccgaagataagaataatttgcatataacagtcagtattaaaatttttgatttgcaatggatcaatgaatgacgaggtcagcccatctgtgactgaaccaatcaatgaatgagaaatgggtaggtgatatttactgtctt

SEQ ID NO: 7675 - protein, 31 aa, Homo sapiens
MFEFGEKSQESLRGGRLQGLGMGEAGRTHQF

SEQ ID NO: 7676 - DNA, 1207 bp, Homo sapiens
gtcttaacaattctaatttttaaaaaaaatattactattttttttcatcagagccattgcactggaaaataattttttattttcatgatagcctaccgttgaatttaccgttctgatattaatgaaacatctctataaagggttgaagtgtcttcccggattgtcaacttattttattttattttcttcaagcaacaattgctaaggaacagaattgtcaatttattaatgaaatatgacgtgtgttgaacaagacaagctgggtcaagcatttgaagatgcttttgaggttctgaggcaacattcaactggagatcttcagtactcgccagattacagaaattacctggctttaatcaaccatcgtcctcatgtcaaaggaaattccagctgctatggagtgttgcctacagaggagcctgtctataattggagaacggtaattaacagtgctgcggacttctattttgaaggaaatattcatcaatctctgcagaacataactgaaaaccagctggtacaacccactcttctccagcaaaaggggggaaaaggcaggaagaagctccgactgtttgaataccttcacgaatccctgtataatccggagatggcatcttgtattcagtgggtagataaaaccaaaggcatctttcagtttgtatcaaaaaacaaagaaaaacttgccgagctttgggggaaaagaaaaggcaacaggaagaccatgacttaccagaaaatggccagggcactcagaaattacggaagaagtggggaaattaccaaaatccggaggaagctgacttaccagttcagtgaggccattctccaaagactctctccatcctatttcctggggaaagagatcttctattcacagtgtgttcaacctgatcaagaatatctcagtttaaataactggaatgcaaattataattatacatatgccaattaccatgagctaaatcaccatgattgctaaatatactttcatatttcatggtttactggcatcggaaatctctacaagttttaatgatttctccctccctctctttttttcctcctctgaagaaatttaggatttttctcttaaagcaaatactaaagaggaaaaaaaattaactttattgttgcttttatcaaagagtatgtaatctatactaacttgttgggaaattctgccaatgaacaacttttttataat

SEQ ID NO: 7677 - protein, 248 aa, Homo sapiens; identical to SEQ ID NO: 1104

SEQ ID NO: 7678 - DNA, 307 bp, Homo sapiens
tcctcatgtcaaaggaaattccagctgctatggagtgttgcctacagaggagcctgtctataattggagaacggtaattgttggagtgcagtggtgcgattatagctcactgaagcttcaaattcctggggtcaagggatcctcctgcctcagcttcccaagtagctgggactatagacatgtgccaccaggcctggaacagtgctgcggacttctattttgaaggaaatattcatcaatctctgcagaacataactgaaaaccagctggtacaacccactcttctccagcaaaaggggggaaaagg

SEQ ID NO: 7679 - protein, 41 aa, Homo sapiens
MCHQAWNSAADFYFEGNIHQSLQNITENQLVQPTLLQQKGG

SEQ ID NO: 7680 - DNA, 8171 bp, Homo sapiens
accaagactcctggatttgccatttttcctttctgaaggcaggtctcacctatctcctggttcgatctaggaaaaaggaaaggaagggatttaaaagtaaacagtgaaatgagaaagaattcactgggagtttatcaaactaagttaaaatagctaagtcagcctgacaggtgcttggcacagagaaggagcaaatatttcctcatgatgctacaacatttagtaattttttgtcttggattggttgtacaaaatttctgctccccagctgaaaccacagggcaggcaagaagatgtgataggaagtctcttcttacaattaggaccgagtgccgatcctgcgctctcaaccttggagtcaagtgcccggatggttacaccatgattaccagtggctctgtaggggttcgagattgcaggtacacctttgaggtcagaacatactctctgtctctccccggatgccgccatatttgtaggaaggactatctccaacctcggtgttgtcctggccgctggggcccagactgtatagagtgcccaggtggagcggggtcaccctgcaatggcagaggcagttgtgctgaaggcatggaaggaaatggaacctgctcctgccaagaagggtttggtggaacagcctgtgaaacctgtgctgacgacaacttatttggacccagctgttcatcagtgtgcaactgtgtgcatggggtgtgcaacagtggactagatggcgatggaacctgtgagtgctactctgcgtacactggccccaagtgtgacaagcccatccctgaatgtgcagccttgctctgcccagaaaattccagatgttcgccttccactgaagatgaaaacaaactggaatgcaaatgccttcccaattaccgaggcgatggcaaatactgcgaccccatcaatccatgtttacgaaaaatctgccaccctcatgctcattgtacgtacctgggaccaaatcggcacagttgtacatgccaagaaggctaccgtggggatggccaagtgtgcttgcctgtggacccctgccaaattaactttggaaactgccctacaaagtctacagtgtgcaaatatgatgggcctggacagtctcactgcgagtgtaaggagcattaccagaatttcgtacctggagtggggtgcagtatgactgatatatgtaaatcagataacccgtgtcataggaatgcaaattgcaccaccgtcgcaccaggccgaactgaatgcatttgccagaaaggttacgtgggtgatggcttaacgtgttatggaaacattatggagcgactcagagaattaaatactgaacccagaggaaaatggcaaggaaggctgacctctttcatctcactcctagacaaagcttatgcctggccactgagtaagctgggacccttcacggtgctgttacctacagacaagggactgaaaggattcaatgtaaatgagcttttggtggataataaagctgctcaatactttgtgaaactccacataattgctggtcagatgaacatcgaatatatgaataacacagacatgttctacaccttgactggaaagtcgggggaaatcttcaacagcgataaggacaatcaaataaagcttaaactccatggaggcaaaaagaaggtaaaaattatacaaggggacatcattgcttccaatgggcttctgcacatccttgacagagccatggacaagttagaacccacatttgagagcaacaatgagcaaaccataatgacaatgctacaaccaaggtacagcaagttcagatctttgttagaggaaaccaatttgggacatgccttagatgaggatggagttggtggaccatacaccatttttgttccaaataatgaagcattgaataacatgaaggacggcactctcgattacctcctttctccagagggatctcggaagcttctggaactcgtcagataccacattgtcccatttacccagcttgaagtggccactctcatctccacccctcacatcaggagcatggccaaccagctcatacagttcaacaccaccgacaatggacagattctggcaaatgatgtggcaatggaagaaattgagatcactgccaaaaatggccgaatttacacactgacaggagttctcattcctccctccattgtcccgattctgccccatcgatgtgatgaaacaaagagagagatgaaactgggcacttgtgtgagctgttctctggtgtactggagcagatgtcctgctaactctgagcccacagcactcttcacacacagatgtgtctacagtggcaggtttgggagcctgaagagcggctgtgcccggtactgcaatgccactgtgaagattccaaagtgctgcaaaggcttctatggacctgactgcaaccagtgtccaggaggcttctcaaatccatgctcaggaaatggacagtgtgcagatagcctcggcggcaacgggacatgcatttgtgaggagggcttccaaggctcccagtgtcagttctgctctgatcccaataaatacggacctcggtgtaacaaaaaatgcctgtgcgttcacggaacatgcaataacaggatagacagcgatggggcctgcctcactggcacatgcagagacggctctgccgggagactctgtgataagcagacctcagcctgtgggccctacgtgcagttctgtcacatccacgccacctgtgaatacagcaatgggacagccagttgtatttgcaaagcaggatatgaaggagatggaactctgtgttctgagatggacccttgcacaggactaactccaggaggctgtagccgcaatgcagaatgcatcaaaactggcacgggcacccacacctgcgtgtgtcagcagggttggacagggaatgggagagactgctcggagatcaacaactgcctgctgcccagtgcaggcggctgccacgacaacgcatcctgtttgtatgtgggtcccgggcagaatgagtgtgagtgcaagaaaggatttcgaggaaatgggattgactgtgaaccaataacttcatgcttggaacaaaccgggaaatgtcatccattggcaagctgtcaatctacttcgtctggtgtctggagctgtgtttgtcaagagggctatgaaggagatggctttctgtgctatggaaacgcagcagtggaattgtcatttctctccgaagcagctatatttaaccgatggataaataatgcttctctacaacccacactgtcagccacctcaaacctcactgtcctcgtgccttcccaacaagctactgaggacatggaccaggatgagaaaagcttctggttgtcacagagcaatattccagccctaataaagtaccatatgctactaggcacatacagagtggcagatctgcagaccctgtcttcttctgacatgttggcaacatctttgcagggcaacttccttcacttggcaaaggtggatgggaatatcacaattgaaggggcctccattgtcgatggggacaacgcagccacaaatggagtgatacacatcatcaacaaggtgctggtcccacaaagacgtctaactggctccttaccaaacctgctcatgcggctggaacagatgcctgactattccatcttccggggctacatcattcaatataatctggcgaatgcaattgaggctgccgatgcctacacagtgtttgctccaaacaacaatgccatcgagaattacatcagggagaagaaagtcttgtctctagaggaggacgtcctccggtatcatgtggtcctggaggagaaactcctgaagaatgacctgcacaatggcatgcatcgtgagaccatgctgggtttctcctatttccttagcttctttctccataatgaccagctctatgtaaatgaggctccaataaactacaccaatgtagccactgataagggagtgatccatggcttgggaaaagttctggaaattcagaagaacagatgtgataataatgacactactattatacgaggaagatgtaggacatgctcctcagagctgacctgcccattcggaactaaatctctaggtaatgagaagaggagatgcatctatacctcctatttcatgggaagacgaaccctgtttattgggtgccagccaaaatgtgtgagaaccgtcattacgagagaatgctgtgccggcttctttggcccccaatgccagccctgcccagggaatgcccagaatgtctgctttggtaatggcatctgtttggatggagtgaatggcacaggtgtgtgtgagtgtggggagggcttcagcggcacagcctgcgagacctgcaccgagggcaagtacggcatccactgtgaccaagcatgttcttgtgtccatgggagatgcaaccaaggacccttgggagatggctcctgtgactgtgatgttggctggcgaggagtgcattgtgacaatgcaaccacagaagacaactgcaatgggacatgccataccagcgccaactgcctcaccaactcagatggtacagcttcatgcaagtgtgcagcaggattccaaggaaacgggaccatctgcacagcaatcaatgcctgtgagatcagcaatggaggttgctctgccaaggctgactgtaagagaaccaccccaggaaggcgagtgtgcacgtgcaaagcaggctacacgggtgatggcattgtgtgcctggaaatcaacccgtgtttggagaaccatggtggctgtgacaagaatgcggagtgcacacagacaggacccaaccaggctgcctgtaactgtttgccagcatacactggagatggaaaggtctgcacactcatcaatgtctgcttaactaaaaatggcggctgtagtgaatttgccatctgcaaccacactgggcaagtagaaaggacttgtacttgcaagccaaactacattggagatggatttacctgccgcggcagcatttatcaggagcttcccaagaacccgaaaacttcccagtatttcttccagttgcaggagcatttcgtgaaagatctggtcggcccaggccccttcactgtttttgcacctttatctgcagcctttgatgaggaagctcgggttaaagactgggacaaatacggtttaatgccccaggttcttcggtaccatgtggtcgcctgccaccagctgcttctggaaaacctgaaattgatctcaaatgctacttccctccaaggagagccaatagtcatctccgtctctcagagcacggtgtatataaacaataaggctaagatcatatccagtgatatcatcagtactaatgggattgttcatatcatagacaaattgctatctcccaaaaatttgcttatcactcccaaagacaactctggaagaattctgcaaaatcttacgactttggcaacaaacaatggctacatcaaatttagcaacttaatacaggactcaggtttgctgagtgtcatcaccgatcccatccacaccccagtcactctcttctggcccaccgaccaagccctccatgccctacctgctgaacaacaggacttcctgttcaaccaagacaacaaggacaagctgaaggagtatttgaagtttcatgtgatacgagatgccaaggttttagctgtggatcttcccacatccactgcctggaagaccctgcaaggttcagagctgagtgtgaaatgtggagctggcagggacatcggtgacctctttctgaatggccaaacctgcagaattgtgcagcgggagctcttgtttgacctgggtgtggcctacggcattgactgtctgctgattgatcccaccctggggggccgctgtgacacctttactactttcgatgcctcgggggagtgtgggagctgtgtcaatactcccagctgcccaaggtggagtaaaccaaagggtgtgaagcagaagtgtctctacaacctgcccttcaagaggaacctggaaggctgccgggagcggtgcagcctggtgatacagatccccaggtgctgcaagggctacttcgggcgagactgtcaggcctgccctggaggaccagatgccccgtgtaataaccggggtgtctgccttgatcagtactcggccaccggagagtgtaaatgcaacaccggcttcaatgggacggcgtgtgagatgtgctggccggggagattcgggcctgattgtctgccctgtggctgctcagaccacggacagtgcgatgatggcatcacgggctccgggcagtgcctctgtgaaacggggtggacaggcccctcgtgtgacactcaggcagttttgcctgcagtgtgtacgcctccttgttctgctcatgccacctgtaaggagaacaacacgtgtgagtgtaacctggattatgaaggtgacggaatcacatgcacagttgtggatttctgcaaacaggacaacgggggctgtgcaaaggtggccagatgctcccagaagggcacgaaggtctcctgcagctgccagaagggatacaaaggggacgggcacagctgcacagagatagacccctgtgcagacggccttaacggagggtgtcacgagcacgccacctgtaagatgacaggcccgggcaagcacaagtgtgagtgtaaaagtcactatgtcggagatgggctgaactgtgagccggagcagctgcccattgaccgctgcttacaggacaatgggcagtgccatgcagacgccaaatgtgtcgacctccacttccaggataccactgttggggtgttccatctacgctccccactgggccagtataagctgacctttgacaaagccagagaggcctgtgccaacgaagctgcgaccatggcaacctacaaccagctctcctatgcccagaaggccaagtaccacctgtgctcagcaggctggctggagaccgggcgggttgcctaccccacagccttcgcctcccagaactgtggctctggtgtggttgggatagtggactatggacctagacccaacaagagtgaaatgtgggatgtcttctgctatcggatgaaagatgtgaactgcacctgcaaggtgggctatgtgggagatggcttctcatgcagtgggaacctgctgcaggtcctgatgtccttcccctcactcacaaacttcctgacggaagtgctggcctattccaacagctcagctcgaggccgtgcatttctagaacacctgactgacctgtccatccgcggcaccctctttgtgccacagaacagtgggctgggggagaatgagaccttgtctgggcgggacatcgagcaccacctcgccaatgtcagcatgtttttctacaatgaccttgtcaatggcaccaccctgcaaacgaggctgggaagcaagctgctcatcactgccagccaggacccactccaaccgacggagaccaggtttgttgatggaagagccattctgcagtgggacatctttgcctccaatgggatcattcatgtcatttccaggcctttaaaagcaccccctgcccccgtgaccttgacccacactggcttgggagcagggatcttctttgccatcatcctggtgactggggctgttgccttggctgcttactcctactttcggataaaccggagaacaatcggcttccagcattttgagtcggaagaggacattaatgttgcagctcttggcaagcagcagcctgagaatatctcgaaccccttgtatgagagcacaacctcagctcccccagaaccttcctacgaccccttcacggactctgaagaacggcagcttgagggcaatgaccccttgaggacactgtgagggcctggacgggagatgccagccatcactcactgccacctgggccatcaactgtgaattctcagcaccagttgccttttaggaacgtaaagtcctttaagcactcagaagccatacctcatctctctggctgatctgggggttgtttctgtgggtgagagatgtgttgctgtgcccacccagtacagcttcctcctctgaccctttggctcttcttcctttgtactcttcagctggcacctgctccattctgccctacatgatgggtaactgtgatctttcttccctgttagattgtaagcctccgtctt

SEQ ID NO: 7681 - protein, 2551 aa, Homo sapiens; identical to SEQ ID NO: 1106

SEQ ID NO: 7682 - DNA, 8240 bp, Homo sapiens
accaagactcctggatttgccatttttcctttctgaaggcaggtctcacctatctcctggttcgatctaggaaaaaggaaaggaagggatttaaaagtaaacagtgaaatgagaaagaattcactgggagtttatcaaactaagttaaaatagctaagtcagcctgacaggtgcttggcacagagaaggagcaaatatttcctcatgatgctacaacatttagtaattttttgtcttggattggttgtacaaaatttctgctccccagctgaaaccacagggcaggcaagaagatgtgataggaagtctcttcttacaattaggaccgagtgccgatcctgcgctctcaaccttggagtcaagtgcccggatggttacaccatgattaccagtggctctgtaggggttcgagattgcaggtacacctttgaggtcagaacatactctctgtctctccccggatgccgccatatttgtaggaaggactatctccaacctcggtgttgtcctggccgctggggcccagactgtatagagtgcccaggtggagcggggtcaccctgcaatggcagaggcagttgtgctgaaggcatggaaggaaatggaacctgctcctgccaagaagggtttggtggaacagcctgtgaaacctgtgctgacgacaacttatttggacccagctgttcatcagtgtgcaactgtgtgcatggggtgtgcaacagtggactagatggcgatggaacctgtgagtgctactctgcgtacactggccccaagtgtgacaagcccatccctgaatgtgcagccttgctctgcccagaaaattccagatgttcgccttccactgaagatgaaaacaaactggaatgcaaatgccttcccaattaccgaggcgatggcaaatactgcgaccccatcaatccatgtttacgaaaaatctgccaccctcatgctcattgtacgtacctgggaccaaatcggcacagttgtacatgccaagaaggctaccgtggggatggccaagtgtgcttgcctgtggacccctgccaaattaactttggaaactgccctacaaagtctacagtgtgcaaatatgatgggcctggacagtctcactgcgagtgtaaggagcattaccagaatttcgtacctggagtggggtgcagtatgactgatatatgtaaatcagataacccgtgtcataggaatgcaaattgcaccaccgtcgcaccaggccgaactgaatgcatttgccagaaaggttacgtgggtgatggcttaacgtgttatggaaacattatggagcgactcagagaattaaatactgaacccagaggaaaatggcaaggaaggctgacctctttcatctcactcctagacaaagcttatgcctggccactgagtaagctgggacccttcacggtgctgttacctacagacaagggactgaaaggattcaatgtaaatgagcttttggtggataataaagctgctcaatactttgtgaaactccacataattgctggtcagatgaacatcgaatatatgaataacacagacatgttctacaccttgactggaaagtcgggggaaatcttcaacagcgataaggacaatcaaataaagcttaaactccatggaggcaaaaagaaggtaaaaattatacaaggggacatcattgcttccaatgggcttctgcacatccttgacagagccatggacaagttagaacccacatttgagagcaacaatgagcaaaccataatgacaatgctacaaccaaggtacagcaagttcagatctttgttagaggaaaccaatttgggacatgccttagatgaggatggagttggtggaccatacaccatttttgttccaaataatgaagcattgaataacatgaaggacggcactctcgattacctcctttctccagagggatctcggaagcttctggaactcgtcagataccacattgtcccatttacccagcttgaagtggccactctcatctccacccctcacatcaggagcatggccaaccagctcatacagttcaacaccaccgacaatggacagattctggcaaatgatgtggcaatggaagaaattgagatcactgccaaaaatggccgaatttacacactgacaggagttctcattcctccctccattgtcccgattctgccccatcgatgtgatgaaacaaagagagagatgaaactgggcacttgtgtgagctgttctctggtgtactggagcagatgtcctgctaactctgagcccacagcactcttcacacacagatgtgtctacagtggcaggtttgggagcctgaagagcggctgtgcccggtactgcaatgccactgtgaagattccaaagtgctgcaaaggcttctatggacctgactgcaaccagtgtccaggaggcttctcaaatccatgctcaggaaatggacagtgtgcagatagcctcggcggcaacgggacatgcatttgtgaggagggcttccaaggctcccagtgtcagttctgctctgatcccaataaatacggacctcggtgtaacaaaaaatgcctgtgcgttcacggaacatgcaataacaggatagacagcgatggggcctgcctcactggcacatgcagagacggctctgccgggagactctgtgataagcagacctcagcctgtgggccctacgtgcagttctgtcacatccacgccacctgtgaatacagcaatgggacagccagttgtatttgcaaagcaggatatgaaggagatggaactctgtgttctgagatggacccttgcacaggactaactccaggaggctgtagccgcaatgcagaatgcatcaaaactggcacgggcacccacacctgcgtgtgtcagcagggttggacagggaatgggagagactgctcggagatcaacaactgcctgctgcccagtgcaggcggctgccacgacaacgcatcctgtttgtatgtgggtcccgggcagaatgagtgtgagtgcaagaaaggatttcgaggaaatgggattgactgtgaaccaataacttcatgcttggaacaaaccgggaaatgtcatccattggcaagctgtcaatctacttcgtctggtgtctggagctgtgtttgtcaagagggctatgaaggagatggctttctgtgctatggaaacgcagcagtggaattgtcatttctctccgaagcagctatatttaaccgatggataaataatgcttctctacaacccacactgtcagccacctcaaacctcactgtcctcgtgccttcccaacaagctactgaggacatggaccaggatgagaaaagcttctggttgtcacagagcaatattccagccctaataaagtaccatatgctactaggcacatacagagtggcagatctgcagaccctgtcttcttctgacatgttggcaacatctttgcagggcaacttccttcacttggcaaaggtggatgggaatatcacaattgaaggggcctccattgtcgatggggacaacgcagccacaaatggagtgatacacatcatcaacaaggtgctggtcccacaaagacgtctaactggctccttaccaaacctgctcatgcggctggaacagatgcctgactattccatcttccggggctacatcattcaatataatctggcgaatgcaattgaggctgccgatgcctacacagtgtttgctccaaacaacaatgccatcgagaattacatcagggagaagaaagtcttgtctctagaggaggacgtcctccggtatcatgtggtcctggaggagaaactcctgaagaatgacctgcacaatggcatgcatcgtgagaccatgctgggtttctcctatttccttagcttctttctccataatgaccagctctatgtaaatgaggctccaataaactacaccaatgtagccactgataagggagtgatccatggcttgggaaaagttctggaaattcagaagaacagatgtgataataatgacactactattatacgaggaagatgtaggacatgctcctcagagctgacctgcccattcggaactaaatctctaggtaatgagaagaggagatgcatctatacctcctatttcatgggaagacgaaccctgtttattgggtgccagccaaaatgtgtgagaaccgtcattacgagagaatgctgtgccggcttctttggcccccaatgccagccctgcccagggaatgcccagaatgtctgctttggtaatggcatctgtttggatggagtgaatggcacaggtgtgtgtgagtgtggggagggcttcagcggcacagcctgcgagacctgcaccgagggcaagtacggcatccactgtgaccaagcatgttcttgtgtccatgggagatgcaaccaaggacccttgggagatggctcctgtgactgtgatgttggctggcgaggagtgcattgtgacaatgcaaccacagaagacaactgcaatgggacatgccataccagcgccaactgcctcaccaactcagatggtacagcttcatgcaagtgtgcagcaggattccaaggaaacgggaccatctgcacagcaatcaatgcctgtgagatcagcaatggaggttgctctgccaaggctgactgtaagagaaccaccccaggaaggcgagtgtgcacgtgcaaagcaggctacacgggtgatggcattgtgtgcctggaaatcaacccgtgtttggagaaccatggtggctgtgacaagaatgcggagtgcacacagacaggacccaaccaggctgcctgtaactgtttgccagcatacactggagatggaaaggtctgcacactcatcaatgtctgcttaactaaaaatggcggctgtagtgaatttgccatctgcaaccacactgggcaagtagaaaggacttgtacttgcaagccaaactacattggagatggatttacctgccgcggcagcatttatcaggagcttcccaagaacccgaaaacttcccagtatttcttccagttgcaggagcatttcgtgaaagatctggtcggcccaggccccttcactgtttttgcacctttatctgcagcctttgatgaggaagctcgggttaaagactgggacaaatacggtttaatgccccaggttcttcggtaccatgtggtcgcctgccaccagctgcttctggaaaacctgaaattgatctcaaatgctacttccctccaaggagagccaatagtcatctccgtctctcagagcacggtgtatataaacaataaggctaagatcatatccagtgatatcatcagtactaatgggattgttcatatcatagacaaattgctatctcccaaaaatttgcttatcactcccaaagacaactctggaagaattctgcaaaatcttacgactttggcaacaaacaatggctacatcaaatttagcaacttaatacaggactcaggtttgctgagtgtcatcaccgatcccatccacaccccagtcactctcttctggcccaccgaccaagccctccatgccctacctgctgaacaacaggacttcctgttcaaccaagacaacaaggacaagctgaaggagtatttgaagtttcatgtgatacgagatgccaaggttttagctgtggatcttcccacatccactgcctggaagaccctgcaaggttcagagctgagtgtgaaatgtggagctggcagggacatcggtgacctctttctgaatggccaaacctgcagaattgtgcagcgggagctcttgtttgacctgggtgtggcctacggcattgactgtctgctgattgatcccaccctggggggccgctgtgacacctttactactttcgatgcctcgggggagtgtgggagctgtgtcaatactcccagctgcccaaggtggagtaaaccaaagggtgtgaagcagaagtgtctctacaacctgcccttcaagaggaacctggaaggctgccgggagcggtgcagcctggtgatacagatccccaggtgctgcaagggctacttcgggcgagactgtcaggcctgccctggaggaccagatgccccgtgtaataaccggggtgtctgccttgatcagtactcggccaccggagagtgtaaatgcaacaccggcttcaatgggacggcgtgtgagatgtgctggccggggagattcgggcctgattgtctgccctgtggctgctcagaccacggacagtgcgatgatggcatcacgggctccgggcagtgcctctgtgaaacggggtggacaggcccctcgtgtgacactcaggcagttttgcctgcagtgtgtacgcctccttgttctgctcatgccacctgtaaggagaacaacacgtgtgagtgtaacctggattatgaaggtgacggaatcacatgcacagttgtggatttctgcaaacaggacaacgggggctgtgcaaaggtggccagatgctcccagaagggcacgaaggtctcctgcagctgccagaagggatacaaaggggacgggcacagctgcacagagatagacccctgtgcagacggccttaacggagggtgtcacgagcacgccacctgtaagatgacaggcccgggcaagcacaagtgtgagtgtaaaagtcactatgtcggagatgggctgaactgtgagccggagcagctgcccattgaccgctgcttacaggacaatgggcagtgccatgcagacgccaaatgtgtcgacctccacttccaggataccactgttggggtgttccatctacgctccccactgggccagtataagctgacctttgacaaagccagagaggcctgtgccaacgaagctgcgaccatggcaacctacaaccagctctcctatgcccagaaggccaagtaccacctgtgctcagcaggctggctggagaccgggcgggttgcctaccccacagccttcgcctcccagaactgtggctctggtgtggttgggatagtggactatggacctagacccaacaagagtgaaatgtgggatgtcttctgctatcggatgaaagatgtgaactgcacctgcaaggtgggctatgtgggagatggcttctcatgcagtgggaacctgctgcaggtcctgatgtccttcccctcactcacaaacttcctgacggaagtgctggcctattccaacagctcagctcgaggccgtgcatttctagaacacctgactgacctgtccatccgcggcaccctctttgtgccacagaacagtgggctgggggagaatgagaccttgtctgggcgggacatcgagcaccacctcgccaatgtcagcatgtttttctacaatgaccttgtcaatggcaccaccctgcaaacgaggctgggaagcaagctgctcatcactgccagccaggacccactccaaccgacggagaccaggtttgttgatggaagagccattctgcagtgggacatctttgcctccaatgggatcattcatgtcatttccaggcctttaaaagcaccccctgcccccgtgaccttgacccacactggcttgggagcagggatcttctttgccatcatcctggtgactggggctgttgccttggctgcttactcctactttcggataaaccggagaacaatcggcttccagcattttgagtcggaagaggacattaatgttgcagctcttggcaagcagcagcctgagaatatctcgaaccccttgtatgagagcacaacctcagctcccccagaaccttcctacgaccccttcacggactctgaagaacggcagcttgagggcaatgaccccttgaggacactgtgagggcctggacgggagatgccagccatcactcactgccacctgggccatcaactgtgaattctcagcaccagttgccttttaggaacgtaaagtcctttaagcactcagaagccatacctcatctctctggctgatctgggggttgtttctgtgggtgagagatgtgttgctgtgcccacccagtacagcttcctcctctgaccctttggctcttcttcctttgtactcttcagctggcacctgctccattctgccctacatgatgggtaactgtgatctttcttccctgttagattgtaagcctccgtctttgtatcccagcccctagcccagtgcctgacacaggaactgtgcacaataaaggtttatggaacagaaac

SEQ ID NO: 7683 - protein, 2551 aa, Homo sapiens; identical to SEQ ID NO: 1106

SEQ ID NO: 7684 - DNA, 8368 bp, Homo sapiens
accaagactcctggatttgccatttttcctttctgaaggcaggtctcacctatctcctggttcgatctaggaaaaaggaaaggaagggatttaaaagtaaacagtgaaatgagaaagaattcactgggagtttatcaaactaagttaaaatagctaagtcagcctgacaggtgcttggcacagagaaggagcaaatatttcctcatgatgctacaacatttagtaattttttgtcttggattggttgtacaaaatttctgctccccagctgaaaccacagggcaggcaagaagatgtgataggaagtctcttcttacaattaggaccgagtgccgatcctgcgctctcaaccttggagtcaagtgcccggatggttacaccatgattaccagtggctctgtaggggttcgagattgcaggtacacctttgaggtcagaacatactctctgtctctccccggatgccgccatatttgtaggaaggactatctccaacctcggtgttgtcctggccgctggggcccagactgtatagagtgcccaggtggagcggggtcaccctgcaatggcagaggcagttgtgctgaaggcatggaaggaaatggaacctgctcctgccaagaagggtttggtggaacagcctgtgaaacctgtgctgacgacaacttatttggacccagctgttcatcagtgtgcaactgtgtgcatggggtgtgcaacagtggactagatggcgatggaacctgtgagtgctactctgcgtacactggccccaagtgtgacaagcccatccctgaatgtgcagccttgctctgcccagaaaattccagatgttcgccttccactgaagatgaaaacaaactggaatgcaaatgccttcccaattaccgaggcgatggcaaatactgcgaccccatcaatccatgtttacgaaaaatctgccaccctcatgctcattgtacgtacctgggaccaaatcggcacagttgtacatgccaagaaggctaccgtggggatggccaagtgtgcttgcctgtggacccctgccaaattaactttggaaactgccctacaaagtctacagtgtgcaaatatgatgggcctggacagtctcactgcgagtgtaaggagcattaccagaatttcgtacctggagtggggtgcagtatgactgatatatgtaaatcagataacccgtgtcataggaatgcaaattgcaccaccgtcgcaccaggccgaactgaatgcatttgccagaaaggttacgtgggtgatggcttaacgtgttatggaaacattatggagcgactcagagaattaaatactgaacccagaggaaaatggcaaggaaggctgacctctttcatctcactcctagacaaagcttatgcctggccactgagtaagctgggacccttcacggtgctgttacctacagacaagggactgaaaggattcaatgtaaatgagcttttggtggataataaagctgctcaatactttgtgaaactccacataattgctggtcagatgaacatcgaatatatgaataacacagacatgttctacaccttgactggaaagtcgggggaaatcttcaacagcgataaggacaatcaaataaagcttaaactccatggaggcaaaaagaaggtaaaaattatacaaggggacatcattgcttccaatgggcttctgcacatccttgacagagccatggacaagttagaacccacatttgagagcaacaatgagcaaaccataatgacaatgctacaaccaaggtacagcaagttcagatctttgttagaggaaaccaatttgggacatgccttagatgaggatggagttggtggaccatacaccatttttgttccaaataatgaagcattgaataacatgaaggacggcactctcgattacctcctttctccagagggatctcggaagcttctggaactcgtcagataccacattgtcccatttacccagcttgaagtggccactctcatctccacccctcacatcaggagcatggccaaccagctcatacagttcaacaccaccgacaatggacagattctggcaaatgatgtggcaatggaagaaattgagatcactgccaaaaatggccgaatttacacactgacaggagttctcattcctccctccattgtcccgattctgccccatcgatgtgatgaaacaaagagagagatgaaactgggcacttgtgtgagctgttctctggtgtactggagcagatgtcctgctaactctgagcccacagcactcttcacacacagatgtgtctacagtggcaggtttgggagcctgaagagcggctgtgcccggtactgcaatgccactgtgaagattccaaagtgctgcaaaggcttctatggacctgactgcaaccagtgtccaggaggcttctcaaatccatgctcaggaaatggacagtgtgcagatagcctcggcggcaacgggacatgcatttgtgaggagggcttccaaggctcccagtgtcagttctgctctgatcccaataaatacggacctcggtgtaacaaaaaatgcctgtgcgttcacggaacatgcaataacaggatagacagcgatggggcctgcctcactggcacatgcagagacggctctgccgggagactctgtgataagcagacctcagcctgtgggccctacgtgcagttctgtcacatccacgccacctgtgaatacagcaatgggacagccagttgtatttgcaaagcaggatatgaaggagatggaactctgtgttctgagatggacccttgcacaggactaactccaggaggctgtagccgcaatgcagaatgcatcaaaactggcacgggcacccacacctgcgtgtgtcagcagggttggacagggaatgggagagactgctcggagatcaacaactgcctgctgcccagtgcaggcggctgccacgacaacgcatcctgtttgtatgtgggtcccgggcagaatgagtgtgagtgcaagaaaggatttcgaggaaatgggattgactgtgaaccaataacttcatgcttggaacaaaccgggaaatgtcatccattggcaagctgtcaatctacttcgtctggtgtctggagctgtgtttgtcaagagggctatgaaggagatggctttctgtgctatggaaacgcagcagtggaattgtcatttctctccgaagcagctatatttaaccgatggataaataatgcttctctacaacccacactgtcagccacctcaaacctcactgtcctcgtgccttcccaacaagctactgaggacatggaccaggatgagaaaagcttctggttgtcacagagcaatattccagccctaataaagtaccatatgctactaggcacatacagagtggcagatctgcagaccctgtcttcttctgacatgttggcaacatctttgcagggcaacttccttcacttggcaaaggtggatgggaatatcacaattgaaggggcctccattgtcgatggggacaacgcagccacaaatggagtgatacacatcatcaacaaggtgctggtcccacaaagacgtctaactggctccttaccaaacctgctcatgcggctggaacagatgcctgactattccatcttccggggctacatcattcaatataatctggcgaatgcaattgaggctgccgatgcctacacagtgtttgctccaaacaacaatgccatcgagaattacatcagggagaagaaagtcttgtctctagaggaggacgtcctccggtatcatgtggtcctggaggagaaactcctgaagaatgacctgcacaatggcatgcatcgtgagaccatgctgggtttctcctatttccttagcttctttctccataatgaccagctctatgtaaatgaggctccaataaactacaccaatgtagccactgataagggagtgatccatggcttgggaaaagttctggaaattcagaagaacagatgtgataataatgacactactattatacgaggaagatgtaggacatgctcctcagagctgacctgcccattcggaactaaatctctaggtaatgagaagaggagatgcatctatacctcctatttcatgggaagacgaaccctgtttattgggtgccagccaaaatgtgtgagaaccgtcattacgagagaatgctgtgccggcttctttggcccccaatgccagccctgcccagggaatgcccagaatgtctgctttggtaatggcatctgtttggatggagtgaatggcacaggtgtgtgtgagtgtggggagggcttcagcggcacagcctgcgagacctgcaccgagggcaagtacggcatccactgtgaccaagcatgttcttgtgtccatgggagatgcaaccaaggacccttgggagatggctcctgtgactgtgatgttggctggcgaggagtgcattgtgacaatgcaaccacagaagacaactgcaatgggacatgccataccagcgccaactgcctcaccaactcagatggtacagcttcatgcaagtgtgcagcaggattccaaggaaacgggaccatctgcacagcaatcaatgcctgtgagatcagcaatggaggttgctctgccaaggctgactgtaagagaaccaccccaggaaggcgagtgtgcacgtgcaaagcaggctacacgggtgatggcattgtgtgcctggaaatcaacccgtgtttggagaaccatggtggctgtgacaagaatgcggagtgcacacagacaggacccaaccaggctgcctgtaactgtttgccagcatacactggagatggaaaggtctgcacactcatcaatgtctgcttaactaaaaatggcggctgtagtgaatttgccatctgcaaccacactgggcaagtagaaaggacttgtacttgcaagccaaactacattggagatggatttacctgccgcggcagcatttatcaggagcttcccaagaacccgaaaacttcccagtatttcttccagttgcaggagcatttcgtgaaagatctggtcggcccaggccccttcactgtttttgcacctttatctgcagcctttgatgaggaagctcgggttaaagactgggacaaatacggtttaatgccccaggttcttcggtaccatgtggtcgcctgccaccagctgcttctggaaaacctgaaattgatctcaaatgctacttccctccaaggagagccaatagtcatctccgtctctcagagcacggtgtatataaacaataaggctaagatcatatccagtgatatcatcagtactaatgggattgttcatatcatagacaaattgctatctcccaaaaatttgcttatcactcccaaagacaactctggaagaattctgcaaaatcttacgactttggcaacaaacaatggctacatcaaatttagcaacttaatacaggactcaggtttgctgagtgtcatcaccgatcccatccacaccccagtcactctcttctggcccaccgaccaagccctccatgccctacctgctgaacaacaggacttcctgttcaaccaagacaacaaggacaagctgaaggagtatttgaagtttcatgtgatacgagatgccaaggttttagctgtggatcttcccacatccactgcctggaagaccctgcaaggttcagagctgagtgtgaaatgtggagctggcagggacatcggtgacctctttctgaatggccaaacctgcagaattgtgcagcgggagctcttgtttgacctgggtgtggcctacggcattgactgtctgctgattgatcccaccctggggggccgctgtgacacctttactactttcgatgcctcgggggagtgtgggagctgtgtcaatactcccagctgcccaaggtggagtaaaccaaagggtgtgaagcagaagtgtctctacaacctgcccttcaagaggaacctggaaggctgccgggagcggtgcagcctggtgatacagatccccaggtgctgcaagggctacttcgggcgagactgtcaggcctgccctggaggaccagatgccccgtgtaataaccggggtgtctgccttgatcagtactcggccaccggagagtgtaaatgcaacaccggcttcaatgggacggcgtgtgagatgtgctggccggggagattcgggcctgattgtctgccctgtggctgctcagaccacggacagtgcgatgatggcatcacgggctccgggcagtgcctctgtgaaacggggtggacaggcccctcgtgtgacactcaggcagttttgcctgcagtgtgtacgcctccttgttctgctcatgccacctgtaaggagaacaacacgtgtgagtgtaacctggattatgaaggtgacggaatcacatgcacagttgtggatttctgcaaacaggacaacgggggctgtgcaaaggtggccagatgctcccagaagggcacgaaggtctcctgcagctgccagaagggatacaaaggggacgggcacagctgcacagagatagacccctgtgcagacggccttaacggagggtgtcacgagcacgccacctgtaagatgacaggcccgggcaagcacaagtgtgagtgtaaaagtcactatgtcggagatgggctgaactgtgagccggagcagctgcccattgaccgctgcttacaggacaatgggcagtgccatgcagacgccaaatgtgtcgacctccacttccaggataccactgttggggtgttccatctacgctccccactgggccagtataagctgacctttgacaaagccagagaggcctgtgccaacgaagctgcgaccatggcaacctacaaccagctctcctatgcccagaaggccaagtaccacctgtgctcagcaggctggctggagaccgggcgggttgcctaccccacagccttcgcctcccagaactgtggctctggtgtggttgggatagtggactatggacctagacccaacaagagtgaaatgtgggatgtcttctgctatcggatgaaagatgtgaactgcacctgcaaggtgggctatgtgggagatggcttctcatgcagtgggaacctgctgcaggtcctgatgtccttcccctcactcacaaacttcctgacggaagtgctggcctattccaacagctcagctcgaggccgtgcatttctagaacacctgactgacctgtccatccgcggcaccctctttgtgccacagaacagtgggctgggggagaatgagaccttgtctgggcgggacatcgagcaccacctcgccaatgtcagcatgtttttctacaatgaccttgtcaatggcaccaccctgcaaacgaggctgggaagcaagctgctcatcactgccagccaggacccactccaaccgacggagaccaggtttgttgatggaagagccattctgcagtgggacatctttgcctccaatgggatcattcatgtcatttccaggcctttaaaagcaccccctgcccccgtgaccttgacccacactggcttgggagcagggatcttctttgccatcatcctggtgactggggctgttgccttggctgcttactcctactttcggataaaccggagaacaatcggcttccagcattttgagtcggaagaggacattaatgttgcagctcttggcaagcagcagcctgagaatatctcgaaccccttgtatgagagcacaacctcagctcccccagaaccttcctacgaccccttcacggactctgaagaacggcagcttgagggcaatgaccccttgaggacactgtgagggcctggacgggagatgccagccatcactcactgccacctgggccatcaactgtgaattctcagcaccagttgccttttaggaacgtaaagtcctttaagcactcagaagccatacctcatctctctggctgatctgggggttgtttctgtgggtgagagatgtgttgctgtgcccacccagtacagcttcctcctctgaccctttggctcttcttcctttgtactcttcagctggcacctgctccattctgccctacatgatgggtaactgtgatctttcttccctgttagattgtaagcctccgtctttgtatcccagcccctagcccagtgcctgacacaggaactgtgcacaataaaggtttatggaacagaaacaaagtcaacagaacaaacctagtgttttgggactgcaccagaggaggagttgaactctgaaggcaaaatccacttcctggggccttttcaatcaatcagacaccagccttataaattcttctgaattt

SEQ ID NO: 7685 - protein, 2551 aa, Homo sapiens; identical to SEQ ID NO: 1106

SEQ ID NO: 7686 - DNA, 455 bp, Homo sapiens
agttgatggcatggctagtgctcagtcatctggtcaccacaactctactgagcccctcccctgggtgctggactggctctaacactgtgcgaacagacagaggaaggctcatgcttgtggagccaacgttctaagttggggaagagtcaatgtatgaattttaaaaacagtaaaacaagatcatttcagagaacggaagacaacagcaagcacgggccacctgtgaccacgtggaccctaggacccaagagcatggccctggagctgcctggccctactggcctagactgggcctcggccacgcgctcctcaccttcacagtggcattgcagtaccgggcacagccgctcttcaggctcccaaacctgccactgtagacacatctgtgtgtgaagagtgcctggagaaagccaaggagggaaagcatggcagtcagcatgtttaggtcctccagg

SEQ ID NO: 7687 - protein, 79 aa, Homo sapiens
MNFKNSKTRSFQRTEDNSKHGPPVTTWTLGPKSMALELPGPTGLDWASATRSSPSQWHCSTGHSRSSGSQTCHCRHICV

SEQ ID NO: 7688 - DNA, 310 bp, Homo sapiens
cagaagaacagatgtgataataatgacactactattatacgaggaagatgtaggacatgctcctcagagctgacctgcccattcggaactaaatctctatagccagttgaggaccgcagcaagaaatcttgtcagagaagagagattccatatccaaaaccatatccagcctggatatattccacctgcctgatttccttttatagttgaagttgcaactaactttctcaaagaaacagatggcagggtaatgagaagaggagatgcatctatacctcctatttcatgggaagacgaaccctgtttattg

SEQ ID NO: 7689 - protein, 39 aa, Homo sapiens
PAHSELNLYSQLRTAARNLVREERFHIQNHIQPGYIPPA

SEQ ID NO: 7690 - DNA, 9626 bp, Homo sapiens
tacgggaaatgtttggtgcagcatccagaatggacaccactgctgtctgcaccgggggagtgacagagagtcgagggattgtggatagcctgcagaagttttcctcgctccctgcttacctccccacgaacttgcacatctccaatgcagaggagtcctttttccttaaagaagccaaccaagacctcacaaggaactccagtctgcaggcccgggtggagccattcttcatctaccgagccaggacaccccctattatcaatgccagctatggcccattttcagtggagaagataatcccccaggagctcctgttgacatctacagcctttggaaacatggacaaatttcccttcaactggaaattgaaatcccacatccttgacagctccatctactccaacagacccaaagtgcagaccttgttttatgtcactggcatgggctgggatgacagtgaccttacggaagatctaccctgtgtcaagatgtttgctttccctgaggccagggaagtggcagccagctgtcggctgcaaggggccccagggctgtgtgtggctgagctggagctgctgcccgagtggttcagctcaggcctggacctggaaccagaggaggagatcccagccctgctcgggggcaccacgatggagctcttcttcacgctctacccagctgacaaggctggccagtgtcctctggaggaggaaggcaagtgggagaacaatatccactcgggcctggagagcccccagcaagcgtttccagcccgagagaggattgggagtgtggtggtctacccaacccaagatgatctgaagtggtccctggtgagcttggacgagaatgtggtcatctcggtacctctgaatctagtccgggaaggggacacggccacctttttggtctctctgaccagtagctctgtggcagaccagttcactcttagaattaaggcggcagcaggtgtgaagataacggcagtgagagtcagcagtgaggaccaatgggcagtccaggaggaaattgataatggcagcactcagacgtcggccaccctcacctgcatgggccatcgcccggacacgcagagcagggtaaatggatccttctatgagatcttgcaagtggactttggaattgataatagcagtgacctggctggggcccagcagattacctggcaggtggagtacccgattgaggactccatgagtgagctggtcgtctccgagatcttcgtcagccagacaaccttcgtgggcatcgtccctcttgccatggacaccgaggttttgaacactgccattctcactggaaagcctgtttcagttcctgtcaaagtcgtgggggtccaggaggatggttctgtggtcgatgtgtctgagtctgtggaatgcaagtctgccgatgaagatgtcattaaggtttccaacaactgtgattccatttttgtgaatgggaaggaaatgaagagcaaagtggacacgattgtgaacttcacccaccagcacttcacctcccagttcgaggtcactgtctgggcacccaggctccccctgcagattgagatctcagacaccgagctgagccagatcaagggctggaggatcccggttgctgccaacagaaggcctacccgggaaagcgatgacgaggacgatgaggagaagaagggacgaggctgctccctgcagtaccagcacgccacagtgcgtgtcctcacccagtttgtggccgagtcacctgacttagggcagctgacctacatgctgggccccgactggcagtttgacatcactgaccttgtgaccgagttcatgaaggtggaggagccgaaaatcgctcagttacaggacggcaggaccctggctggtcgggagccgggaataaccacggtgcaggtcctctcgccgttgtctgactccatcctggctgagaagacggtgattgtcctggatgaccgagtcaccatcgcggagctgggagtgcagctcgtagctggcatgtctctctccctgcagccacaccgagcagacaaaagggccatcgtctccacagctgctgccctggatgttcttcagtccccacagcaggaagcaatagtaagttcttggattttgttcagtgatggttcggtgacacctttagacatttacgatcctaaggattattctgttactgtctcatcattggatgaaatggtggtgtctgtccaggcaaaccttgagtccaaatggccaattgtggttgcagagggtgaaggacaagggcctttgattaagttagaaatgatgataagtgaaccttgtcagaagaccaagaggaagagtgttcttgccgtgggtaaaggaaatgtcaaggtcaaattcgaaccaagtagtgatgagcaccaaggaggcagcaatgatattgagggcataaatcgggaatataaagaccacctcagtaattccatagagcgcgaaggaaaccaggagagagcagtccaggaatggttccaccgtggcacacctgttggccaagaggaaagtaccaacaaaagcacaaccccccagtctcccatggaagggaagaataagttactcaaaagtggtggtccagatgcctttacaagcttccccactcaagggaagtcaccggaccccaataatcctagtgacctcacagtgacctcaagggggctaacggacttggagattggcatgtatgccttgctctgcgtcttctgtctggccattctggtcttcttgatcaactgcgtggcgtttgcctggaaatacagacacaaaaggtttgctgtgagtgagcagggcaacatcccccattcccacgactgggtctggcttgggaatgaagtggaacttttggagaaccctgttgacattacactcccatcagaggagtgcacaaccatgatagacaggggcctgcagttcgaggagaggaacttccttctgaatggcagttcccagaagacttttcatagtcaactactcagaccctctgactatgtctatgagaaagaaattaaaaatgaacctatgaattcttcgggcccaaagaggaagagagtcaagttcacttcctacaccaccatcctcccagaggacggcggcccatacaccaactccatcctgtttgacagcgatgataacatcaagtgggtctgccaagatatggggctgggggattcacaggactttagagactatatggaaagtctgcaagaccagatgtaaactcctttcttatgtttgtattcacctttatgccttctgttttttgaatgctggagcagtgagtttgatcagcaataggggatgatttaacaaagtttgatttgtggaggtctggtgggattcatttctaagcaggtaaaagaggtttggagagctatagaagctgggttttaagtttggaaatgcctctaaaacagccacatgtggggactggagaaattctaagacaacagttttatggactgcctggtacgagctcagtgcaaatgtattaaacctgaccccacagacattgttagtcatctcgtgacaaatggccatgtggaattagaaaagatttgggtgttgatttttctatttctagaccttttaaagcacagtggacacttattgccccttggcctgagtttagacatacatgaaagatgactgaatgtagctatcctgatttgtcatgagcgctgctcattatttttatatacatttgcacctgcacctgttcctttgacctctggaattctttttgaaacatgaagagaagaaatttcagtcttttccttgagctctgtttgatttacacatgagttttcttccctgggatttgccatgccatgttatttcctgggtctccatgcaggatgtcaggtttttccagttttctgcacttcatcatctagggatggtatccaagaagcttattctcactttgttttttccttccttttgttgttgaactttcttgtataacactgggacaaagggttttacttaaaatgttaatatacagtgagggagggccatctctttactgttttctatgtgaagtttcaaacatttggaaaaaagttgtcaatcacaaacatttatttttattctctgcttgttgaaaactcatggggaactcctggagtgcatttctgagggtaaaaaggccccaacatagctgtatttatacaagtgctttgtggccaacacaatttactatccaaactgaagtcttaaagtagaattgacctacacagaaaggaaattgcctaggcaatagatgcagattacactttccattttaccagaacaaaagtttttttttttttaaataagtagaatgacagttcaagttagcaatatatagaaatccatccatacaatgaccaaaataaataaataaataaaactcaatcatgactttggcagagataaaacattgacaagggtgtgcatttgtggagagaagcagtgggtttccccccaaaatccatacaaataaatgactattccagaactcaagaagcagctattatagaaaaaaaaattaaaaaccacagctattgaaaaattaaaacggcaagagaaaaaaagaaacaactcctgcataatgtttaaataaaaatgttattttaatagcatcatgaatggtcttaaggcaaaaatttcagattagcaaaatgtgatgacatatttattaagattgtattattggaaatgtagacactggactagtatgcctcattatgagctttactgagccatttgcatctctaagaaatatgattttaaaggcccaaagtaggaaggatctgcagggggtcacctgaagcagtgccctgactccaaatggctgataactgagctaatccaaggagaggcgttcagttgttctcttattatagatttccttgggtgggaacatgacaaccccgcctcctctagccatgacgtggcagccaaaaagttcttcctgtatctctggcccacaggactgtagtgtgtttgggaacagtgctgaaattgcaagtgatgtaggcctgacctccagagcccagcgttcagttagttgtataaaatggggcttaggaaccgaagctgatgaagttccaaaagtagttcagtttgatgggataaggaagcaaggagagccaggcattagctgcaaaaggagcttgcagagagatggctgacactttatgggaagattcctcagtcagccaaaagcttttcaaagagtttggtgcagaggtagctcagagccaaccatccaggaccgaagaaagctcatgtgctgattgacacatagctatccaggtgagtcggctccttctatgaggcttttcaatcgtctctccctttggatctctggcattccagaaagactgggaattcatttctgaaaatgatgaacctccgctgaaacggggaggaaatctcttacacacatacagcagggtcctgcccactggtaaagtgagacgttgggtagggggtgtaactggggaggaggtgaaggaaattatccctgccatggggagtgttattcaggaacataaaaattagagcattccctctgatggcagtgcttgacggggtgcagggaacaaactggggagcgttcaaacatgccagtggtttctcagcagggctggaaactggccacagtcctgaagatgcttcttgtgacaacttagagtcactgggagtcacacagctcctgtgtagccgcctttgctcctctgtgttaaaacccagtcagttcaaaataacaatcaaatggaaggccatgggggaagggttccttccaccatataacccacacccagatgtatataaacgcatatacatacatatacccgtgtgtgtgtgtgtgtgtgtgtgtgtgtgtgtgaatactgaagagccagacaacaaactatttagtaagaatcaacagtgactgtcaattgttctcagatttggcatggatactatttctcatgaaataatgtcattaaagtatttcctcctctaaatatttcctgaagatcataaaccatgggttatagcaccttgttttccagctagtcaatatacaactattaggtgctgtgccccaaaatatctaaaatgggggtaaagatataaactattaagccatgaaatctaattttctggggaccatgcatttgcctggattttccaggattttatggctgatagacccaaattattagtcttgataaacaacctgaaccaaacatttataaagtcccttcctctcccatgggaatggaatgctcagactcctgctgagggagacaccagcaagcctcttgagaaggcaccagacagtgaactctgtggtcacatgaagggaggttcagatgctagacgaccagcgtatgacctggaaccattgaggattgcaaccgctgcctccagggtccagatgtgctgcagtagagggcagagcacaggaatcaagaagcagctgccacaccaaagaactgatgcttaaacacacaggtgtgttgcatttgagagaaggcaagaagaaaagacaatagaaggttaccctggaaaaacaacacctagcaaacctcagaatactccatgtgtcccaagagaaggaataattgtctttctagctgttatatattgcacactggccaggataaattcccagactataataatcctgactatgtagacggaagtttctatttataaagtcatgcagggggaaagttgattaatttttgtcccattgccacatctgtagactaagtaatttttaacttgctaacttttagaatgtccacctttgtgcattttggtagcattcttgtttcattattttagaaaggggtcttcccattactgggatgtcggggccctgtcagagaactattattaaggctctgtgagggaactgttcagtctcacagcaaggaccacagagcgtggtttcatctgaaccctacaagtcagggacaccagtgtgttttctactcgagttacctaaaaatggtctcaattttccatttcattctctgtaaatgacacaatagatggtttatagactcagcagccctcaccttttattaaaattatatatgtgtgatgtaatgcatatcacctgtcatgtaaagggacggtatggatggtggaaaagttatgctaaaatatggattgcagatatttttgtatgtaatataggcaatataatgaaacaccgagttttttaaagtgaaagcatgcaaaatcgtagcttttaaatgtacagacatcccactcaaaaatatctaaactgatagtgggaaaaacatttgagacctagtaacatcatgaaatgcactgaatttggaattctggcctagaaaggctgtggcttatgttgggattgatgatggaatctgccagaacattttcatcttattcttcttgacttttggatttttttcttttctttttttctggaaatatttcggaaataaagtgacttcatttttcagcataaaagtatattctaaccacagggtaacacatcgtttttaacatgaaaataaacatttaaacattcttcagttgtttcattattttatctgcatgttccataaagcagctgtatggttggctataatatagatttattttttcttttcagccagagattttaatacccttgatgcagtaataaatggacatcaaaagaaaacatttcttaaaagttgccaacgtattttaccttgaaaacatttcttatttgttatcctagtaggctggggaaagcttctctccagatgtctcagaaaaagatctcctgtttctcatggccccgtccagggtcaaaccatgttgaaagtcagtgctgaaatgcatgatgctgcgggtgtttgagagcctttgacctctgtccaccctttggtctttgctcgtcaatggcttggtcttgtatatgtatctggggcaggggctttgtactgggcccagggtgctgagctttccagaacaggcagagctctagagacctaagaaaaccacaggacaggcggggattctttttgagaggctgaagtagatgtttcagctgaaagatgggtggtacacttgccaagtgcctagaggggctagaggctctctgttggtgtgtgtgtatttcttgaaactgcagagtcatttttggcatgctggcaaatgctactccttgcttttaggatgaatagggatgcctctttggcgataatttgacgtgtcataataaatgcccaataccaaacctagtctttctccaggcccttcagacatcattcaggtaactgggtgtaaacacaggagttggctttgtgaaactgaggcaggatttcctgcctctaaactattggcagcaaaagagccaaaaatgtgctcccaggtgcaaaaccccagccccatcagaattgcttctcagcactttgggtaactgttttgcactaacagcttcctccttgtcttttccctgggaacatgggagcactgacacagaactcaactggtccagccctttgggaggcccaggtgggcagatcacctgaagtcaggagtttgagaccagcctgggcaacatggtgaaaccctgtctctactaaaaatacaaaaattatccagtcgtggtggtgcatgcctgtagtcccagctactctggaggctgaggcaggagaatcacttgaacctgagaggtgaaggttgtagtgagccaagatcgtaccactgcactctggcctgggcaacaagagcgagactttgtctcaaacagaaacaaaacaagaaaaacaaaaagaacttaaccagttctccccagatctcagcgtgcatgcatatatagagtttagtaaaatgtgtttcaaaaaaagaaggataaaagaaagtttgaagtaagatttgtaaaagaatgaacactttaggttttgtgtgtgagtgcaaaatgtaaacacggcatttgaaattttttggtattgaaatccttaatgcctgttagtttctttatggttttatacaattgagataggttctgaagtttttttgttgtttgcttttagaaatttttaaaaatacaaaaaaaaagcgcagaaacattttcatctgggttactgtgtttatagactattctatgactcaagacaactaggacaccatcattttccagataagaaataacagttcaagttcattagggaaattatcttcccagtccaagcaagcaataatgttatcaacttacaatattggacaatcttcatattctatgagatgcctttaaaatttctttggatttaatgctgctcttggtcagttgttcaaatgaaacattgtaatttcatgttaacgacaagagtctcacgggagtctctttagatgctgcaggaactgagaggatagaagacctctctatacatctacattgcccattggagtaaagcactttacagagagatggatgccgctttgggatttggggtctatgtaatgctgatttttttcaaacctgtttggaaatattacttctttgggatggctgaaataacttttgacctgacacatctttctgtacttcctgtggccaaaaaagcaagtgagactttctgtttccca

SEQ ID NO: 7691 - protein, 1078 aa, Homo sapiens; identical to SEQ ID NO: 1108

SEQ ID NO: 7692 - DNA, 8329 bp, Homo sapiens
acagtcaagaaaggtgtagatcctgcagactgcgtggaggccatgctttcacatcaagccttcctcggtgacttgctcagcctgactgtgttcttatttgctgggtctctctctggaaatctccactttgagtgtttccaacaactgtgattccatttttgtgaatgggaaggaaatgaagagcaaagtggacacgattgtgaacttcacccaccagcacttcacctcccagttcgaggtcactgtctgggcacccaggctccccctgcagattgagatctcagacaccgagctgagccagatcaagggctggaggatcccggttgctgccaacagaaggcctacccgggaaagcgatgacgaggacgatgaggagaagaagggacgaggctgctccctgcagtaccagcacgccacagtgcgtgtcctcacccagtttgtggccgagtcacctgacttagggcagctgacctacatgctgggccccgactggcagtttgacatcactgaccttgtgaccgagttcatgaaggtggaggagccgaaaatcgctcagttacaggacggcaggaccctggctggtcgggagccgggaataaccacggtgcaggtcctctcgccgttgtctgactccatcctggctgagaagacggtgattgtcctggatgaccgagtcaccatcgcggagctgggagtgcagctcgtagctggcatgtctctctccctgcagccacaccgagcagacaaaagggccatcgtctccacagctgctgccctggatgttcttcagtccccacagcaggaagcaatagtaagttcttggattttgttcagtgatggttcggtgacacctttagacatttacgatcctaaggattattctgttactgtctcatcattggatgaaatggtggtgtctgtccaggcaaaccttgagtccaaatggccaattgtggttgcagagggtgaaggacaagggcctttgattaagttagaaatgatgataagtgaaccttgtcagaagaccaagaggaagagtgttcttgccgtgggtaaaggaaatgtcaaggtcaaattcgaaccaagtagtgatgagcaccaaggaggcagcaatgatattgagggcataaatcgggaatataaagaccacctcagtaattccatagagcgcgaaggaaaccaggagagagcagtccaggaatggttccaccgtggcacacctgttggccaagaggaaagtaccaacaaaagcacaaccccccagtctcccatggaagggaagaataagttactcaaaagtggtggtccagatgcctttacaagcttccccactcaagggaagtcaccggaccccaataatcctagtgacctcacagtgacctcaagggggctaacggacttggagattggcatgtatgccttgctctgcgtcttctgtctggccattctggtcttcttgatcaactgcgtggcgtttgcctggaaatacagacacaaaaggtttgctgtgagtgagcagggcaacatcccccattcccacgactgggtctggcttgggaatgaagtggaacttttggagaaccctgttgacattacactcccatcagaggagtgcacaaccatgatagacaggggcctgcagttcgaggagaggaacttccttctgaatggcagttcccagaagacttttcatagtcaactactcagaccctctgactatgtctatgagaaagaaattaaaaatgaacctatgaattcttcgggcccaaagaggaagagagtcaagttcacttcctacaccaccatcctcccagaggacggcggcccatacaccaactccatcctgtttgacagcgatgataacatcaagtgggtctgccaagatatggggctgggggattcacaggactttagagactatatggaaagtctgcaagaccagatgtaaactcctttcttatgtttgtattcacctttatgccttctgttttttgaatgctggagcagtgagtttgatcagcaataggggatgatttaacaaagtttgatttgtggaggtctggtgggattcatttctaagcaggtaaaagaggtttggagagctatagaagctgggttttaagtttggaaatgcctctaaaacagccacatgtggggactggagaaattctaagacaacagttttatggactgcctggtacgagctcagtgcaaatgtattaaacctgaccccacagacattgttagtcatctcgtgacaaatggccatgtggaattagaaaagatttgggtgttgatttttctatttctagaccttttaaagcacagtggacacttattgccccttggcctgagtttagacatacatgaaagatgactgaatgtagctatcctgatttgtcatgagcgctgctcattatttttatatacatttgcacctgcacctgttcctttgacctctggaattctttttgaaacatgaagagaagaaatttcagtcttttccttgagctctgtttgatttacacatgagttttcttccctgggatttgccatgccatgttatttcctgggtctccatgcaggatgtcaggtttttccagttttctgcacttcatcatctagggatggtatccaagaagcttattctcactttgttttttccttccttttgttgttgaactttcttgtataacactgggacaaagggttttacttaaaatgttaatatacagtgagggagggccatctctttactgttttctatgtgaagtttcaaacatttggaaaaaagttgtcaatcacaaacatttatttttattctctgcttgttgaaaactcatggggaactcctggagtgcatttctgagggtaaaaaggccccaacatagctgtatttatacaagtgctttgtggccaacacaatttactatccaaactgaagtcttaaagtagaattgacctacacagaaaggaaattgcctaggcaatagatgcagattacactttccattttaccagaacaaaagtttttttttttttaaataagtagaatgacagttcaagttagcaatatatagaaatccatccatacaatgaccaaaataaataaataaataaaactcaatcatgactttggcagagataaaacattgacaagggtgtgcatttgtggagagaagcagtgggtttccccccaaaatccatacaaataaatgactattccagaactcaagaagcagctattatagaaaaaaaaattaaaaaccacagctattgaaaaattaaaacggcaagagaaaaaaagaaacaactcctgcataatgtttaaataaaaatgttattttaatagcatcatgaatggtcttaaggcaaaaatttcagattagcaaaatgtgatgacatatttattaagattgtattattggaaatgtagacactggactagtatgcctcattatgagctttactgagccatttgcatctctaagaaatatgattttaaaggcccaaagtaggaaggatctgcagggggtcacctgaagcagtgccctgactccaaatggctgataactgagctaatccaaggagaggcgttcagttgttctcttattatagatttccttgggtgggaacatgacaaccccgcctcctctagccatgacgtggcagccaaaaagttcttcctgtatctctggcccacaggactgtagtgtgtttgggaacagtgctgaaattgcaagtgatgtaggcctgacctccagagcccagcgttcagttagttgtataaaatggggcttaggaaccgaagctgatgaagttccaaaagtagttcagtttgatgggataaggaagcaaggagagccaggcattagctgcaaaaggagcttgcagagagatggctgacactttatgggaagattcctcagtcagccaaaagcttttcaaagagtttggtgcagaggtagctcagagccaaccatccaggaccgaagaaagctcatgtgctgattgacacatagctatccaggtgagtcggctccttctatgaggcttttcaatcgtctctccctttggatctctggcattccagaaagactgggaattcatttctgaaaatgatgaacctccgctgaaacggggaggaaatctcttacacacatacagcagggtcctgcccactggtaaagtgagacgttgggtagggggtgtaactggggaggaggtgaaggaaattatccctgccatggggagtgttattcaggaacataaaaattagagcattccctctgatggcagtgcttgacggggtgcagggaacaaactggggagcgttcaaacatgccagtggtttctcagcagggctggaaactggccacagtcctgaagatgcttcttgtgacaacttagagtcactgggagtcacacagctcctgtgtagccgcctttgctcctctgtgttaaaacccagtcagttcaaaataacaatcaaatggaaggccatgggggaagggttccttccaccatataacccacacccagatgtatataaacgcatatacatacatatacccgtgtgtgtgtgtgtgtgtgtgtgtgtgtgtgtgaatactgaagagccagacaacaaactatttagtaagaatcaacagtgactgtcaattgttctcagatttggcatggatactatttctcatgaaataatgtcattaaagtatttcctcctctaaatatttcctgaagatcataaaccatgggttatagcaccttgttttccagctagtcaatatacaactattaggtgctgtgccccaaaatatctaaaatgggggtaaagatataaactattaagccatgaaatctaattttctggggaccatgcatttgcctggattttccaggattttatggctgatagacccaaattattagtcttgataaacaacctgaaccaaacatttataaagtcccttcctctcccatgggaatggaatgctcagactcctgctgagggagacaccagcaagcctcttgagaaggcaccagacagtgaactctgtggtcacatgaagggaggttcagatgctagacgaccagcgtatgacctggaaccattgaggattgcaaccgctgcctccagggtccagatgtgctgcagtagagggcagagcacaggaatcaagaagcagctgccacaccaaagaactgatgcttaaacacacaggtgtgttgcatttgagagaaggcaagaagaaaagacaatagaaggttaccctggaaaaacaacacctagcaaacctcagaatactccatgtgtcccaagagaaggaataattgtctttctagctgttatatattgcacactggccaggataaattcccagactataataatcctgactatgtagacggaagtttctatttataaagtcatgcagggggaaagttgattaatttttgtcccattgccacatctgtagactaagtaatttttaacttgctaacttttagaatgtccacctttgtgcattttggtagcattcttgtttcattattttagaaaggggtcttcccattactgggatgtcggggccctgtcagagaactattattaaggctctgtgagggaactgttcagtctcacagcaaggaccacagagcgtggtttcatctgaaccctacaagtcagggacaccagtgtgttttctactcgagttacctaaaaatggtctcaattttccatttcattctctgtaaatgacacaatagatggtttatagactcagcagccctcaccttttattaaaattatatatgtgtgatgtaatgcatatcacctgtcatgtaaagggacggtatggatggtggaaaagttatgctaaaatatggattgcagatatttttgtatgtaatataggcaatataatgaaacaccgagttttttaaagtgaaagcatgcaaaatcgtagcttttaaatgtacagacatcccactcaaaaatatctaaactgatagtgggaaaaacatttgagacctagtaacatcatgaaatgcactgaatttggaattctggcctagaaaggctgtggcttatgttgggattgatgatggaatctgccagaacattttcatcttattcttcttgacttttggatttttttcttttctttttttctggaaatatttcggaaataaagtgacttcatttttcagcataaaagtatattctaaccacagggtaacacatcgtttttaacatgaaaataaacatttaaacattcttcagttgtttcattattttatctgcatgttccataaagcagctgtatggttggctataatatagatttattttttcttttcagccagagattttaatacccttgatgcagtaataaatggacatcaaaagaaaacatttcttaaaagttgccaacgtattttaccttgaaaacatttcttatttgttatcctagtaggctggggaaagcttctctccagatgtctcagaaaaagatctcctgtttctcatggccccgtccagggtcaaaccatgttgaaagtcagtgctgaaatgcatgatgctgcgggtgtttgagagcctttgacctctgtccaccctttggtctttgctcgtcaatggcttggtcttgtatatgtatctggggcaggggctttgtactgggcccagggtgctgagctttccagaacaggcagagctctagagacctaagaaaaccacaggacaggcggggattctttttgagaggctgaagtagatgtttcagctgaaagatgggtggtacacttgccaagtgcctagaggggctagaggctctctgttggtgtgtgtgtatttcttgaaactgcagagtcatttttggcatgctggcaaatgctactccttgcttttaggatgaatagggatgcctctttggcgataatttgacgtgtcataataaatgcccaataccaaacctagtctttctccaggcccttcagacatcattcaggtaactgggtgtaaacacaggagttggctttgtgaaactgaggcaggatttcctgcctctaaactattggcagcaaaagagccaaaaatgtgctcccaggtgcaaaaccccagccccatcagaattgcttctcagcactttgggtaactgttttgcactaacagcttcctccttgtcttttccctgggaacatgggagcactgacacagaactcaactggtccagccctttgggaggcccaggtgggcagatcacctgaagtcaggagtttgagaccagcctgggcaacatggtgaaaccctgtctctactaaaaatacaaaaattatccagtcgtggtggtgcatgcctgtagtcccagctactctggaggctgaggcaggagaatcacttgaacctgagaggtgaaggttgtagtgagccaagatcgtaccactgcactctggcctgggcaacaagagcgagactttgtctcaaacagaaacaaaacaagaaaaacaaaaagaacttaaccagttctccccagatctcagcgtgcatgcatatatagagtttagtaaaatgtgtttcaaaaaaagaaggataaaagaaagtttgaagtaagatttgtaaaagaatgaacactttaggttttgtgtgtgagtgcaaaatgtaaacacggcatttgaaattttttggtattgaaatccttaatgcctgttagtttctttatggttttatacaattgagataggttctgaagtttttttgttgtttgcttttagaaatttttaaaaatacaaaaaaaaagcgcagaaacattttcatctgggttactgtgtttatagactattctatgactcaagacaactaggacaccatcattttccagataagaaataacagttcaagttcattagggaaattatcttcccagtccaagcaagcaataatgttatcaacttacaatattggacaatcttcatattctatgagatgcctttaaaatttctttggatttaatgctgctcttggtcagttgttcaaatgaaacattgtaatttcatgttaacgacaagagtctcacgggagtctctttagatgctgcaggaactgagaggatagaagacctctctatacatctacattgcccattggagtaaagcactttacagagagatggatgccgctttgggatttggggtctatgtaatgctgatttttttcaaacctgtttggaaatattacttctttgggatggctgaaataacttttgacctgacacatctttctgtacttcctgtggccaaaaaagcaagtgagactttctgtttccca

SEQ ID NO: 7693 - protein, 590 aa, Homo sapiens
MKSKVDTIVNFTHQHFTSQFEVTVWAPRLPLQIEISDTELSQIKGWRIPVAANRRPTRESDDEDDEEKKGRGCSLQYQHATVRVLTQFVAESPDLGQLTYMLGPDWQFDITDLVTEFMKVEEPKIAQLQDGRTLAGREPGITTVQVLSPLSDSILAEKTVIVLDDRVTIAELGVQLVAGMSLSLQPHRADKRAIVSTAAALDVLQSPQQEAIVSSWILFSDGSVTPLDIYDPKDYSVTVSSLDEMVVSVQANLESKWPIVVAEGEGQGPLIKLEMMISEPCQKTKRKSVLAVGKGNVKVKFEPSSDEHQGGSNDIEGINREYKDHLSNSIEREGNQERAVQEWFHRGTPVGQEESTNKSTTPQSPMEGKNKLLKSGGPDAFTSFPTQGKSPDPNNPSDLTVTSRGLTDLEIGMYALLCVFCLAILVFLINCVAFAWKYRHKRFAVSEQGNIPHSHDWVWLGNEVELLENPVDITLPSEECTTMIDRGLQFEERNFLLNGSSQKTFHSQLLRPSDYVYEKEIKNEPMNSSGPKRKRVKFTSYTTILPEDGGPYTNSILFDSDDNIKWVCQDMGLGDSQDFRDYMESLQDQM

SEQ ID NO: 7694 - DNA, 1154 bp, Homo sapiens
atgaagacaacatcaggtgattcctggaaccagagcgatctctcagggccgctgcagaccccacatatgctcttccatctgaaggtctcagcccataactgccatcaagaacctgaagacatagcttcctctatgccagacttaaggacatctaaatatctacctctgaacacctatttgaagaaaagattatttcctggaacctaccaattaattgttttactataacaaggaatcatccaacatgttttatttcttcgttttcaaaatgtttggaagtgcctttacagagacattaaatatacggtggaacatacacaacagatcatactgaaaccataggtaatataatgagatagatacattatacaaaaaggtatatagaagcacaatgtcataacagcatgctctgtttataatatctggtgtttaccagggaacaagaatccaattcagaaatgtggaaagtaagggataacaccttttcaaatgccagacaaaacttgtccccactgtttgctgccttgcaatcaccccaaagcacactactggctgggctgtgtaggtttggccactcactatgttctgcagctgagatccggtccacctgcctgagaagagtctgaggctgggaactgatacctaagatgcacatttcaattttgagacaacagcatgccctgtagacacacattaaacatgagcagtattgtaaaaattatttgccatgggaagacacacactacctccctctaagagcacgggtctgttgcatgatacacgctatgtggatgtgactatctttcagtgttttatagccacttatttttccctaggtttgatcatttccttatgacttaattctccactctcagcctttcatagttatggtgtttgcttatgcccacaaataatgtgtggggaatacctagaagacccctgtaatggaggttggacaattggttttgttcttggaatccacactgaatgcccttgctagaagtccaaaataagggtcacagcagaggataactacagaaaggaagtcacttggcaatcaagtccctccatgggccagttcatctttgggcatgtgaactggtggctctggggtaattcactgcactgcagcaactgagatggcaatatgtccg

SEQ ID NO: 7695 - protein, 75 aa, Homo sapiens
MKTTSGDSWNQSDLSGPLQTPHMLFHLKVSAHNCHQEPEDIASSMPDLRTSKYLPLNTYLKKRLFPGTYQLIVLL

SEQ ID NO: 7696 - DNA, 309 bp, Homo sapiens; identical to SEQ ID NO: 1109

SEQ ID NO: 7697 - protein, 102 aa, Homo sapiens; identical to SEQ ID NO: 1110

SEQ ID NO: 7698 - DNA, 6553 bp, Homo sapiens
gaggtgaacctccggagccttggcacagctcgcttctaaagcttggaaatgacccgccacacctgaagcctgcaggtgctgaggccacattcgatcagacccaagctttgggagaccgctggggaaatttcccacttcctctcctgagaccaggaactcagcagagaaactttgtggaaaatgaactgaaggatgccacccagggagagtatctcctgagatcccatcatgcaggccttcccacaagggcccggcagcatgacaaggtgaaggcagagtatgtgcatctcaaccatccgctcaccctcgtgaccagagagcgcgatttggccgtgaaggagaaacaccagctccaagccaagctggagaacctagaacaggtcctgaagcatatgcgagaggcggctgaacggcggcagcagctgcagttggagcatgaccaggccctggctgttctcagtgccaagcagcaggaaattgaccttctgcagaagtccaaggttcgagagctggaagagaaatgccggactcaaagtgagcagttcaacctgctgtcccgggacctggagaagttccggcagcacgctggcaagattgacctgctgggtggcagcgcggtggcccccctggacatctccacggcccccagcaagcctttcccacagttcatgaatggcctagccacctccctcggcaaaggtcaggagagcgctattggaggcagctctgcgatcggtgaatatatccggccccttccgcagcctggtgacaggccggagcctctgtccgccaagcccaccttcctgtcgagatccggtagcgcaagatgcagatctgagtcagacatggagaatgaacggaattccaatacctccaagcagagatactcggggaaggtccacctctgtgttgcccgctatagttacaaccccttcgatggaccgaacgagaaccccgaagctgagctgcccctcacggcgggaaaatacctctacgtctatggagacatggatgaggatgggttctatgaaggagagctcctcgatggccagaggggtctggtgccctccaacttcgtggactttgtgcaggacaacgagtcgcggttggcaagcacgctggggaacgagcaggatcagaacttcatcaaccattccggcatcggcctggagggagagcacatcctggacctccactccccaacccacatagatgcgggcatcaccgacaacagtgccgggaccctggacgtgaacatcgacgacatcggagaagacatcgtgccttaccctagaaaaatcaccctcatcaaacaactcgccaaaagtgttattgtgggctgggagcccccggcggtgccaccaggatggggaacggtgagcagctacaacgtcctggtggacaaggagacacgcatgaacctcacgctggggagcagaactaaagccctcatcgagaagctcaacatggcagcctgcacctaccgcatctccgtgcagtgcgtcaccagcaggggcagctcggatgagctgcagtgcacgctgctggtgggcaaggacgtggtggtggccccctcccacctgcgggtggacaacatcacgcagatctccgcccagctctcctggctacccaccaacagcaactacagccacgtcatcttcctcaacgaggaggagttcgacatcgtcaaggccgccaggtacaagtaccagttcttcaatctcaggcccaacatggcctataaggtgaaggttctggccaaaccccaccagatgccgtggcagctcccgctggagcaaagggagaagaaggaggcctttgtggagttctccacgttgcctgcaggacccccagcacccccacaagatgttaccgtccaggctggggtgacccccgccaccatccgggtctcctggagaccacctgtgctgacgcccaccgggctgtccaatggcgcaaacgttaccggctacggcgtgtatgccaaagggcagagggtggctgaagtcatcttccccacggcagacagcacggccgtggagcttgtgcggctgcggagcctggaggccaagggcgtgaccgtgcggaccctctccgcccagggcgagtccgtggactctgcagttgctgccgttccccccgagctcctggtgcctcctaccccccacccgagacctgcaccccaatcaaagccattagcaagttctggagtccccgaaaccaaagacgagcacctgggtccccacgccaggatggatgaggcctgggagcagagccgtgcacctggccctgtgcatgggcacatgctggagccgcccgtgggccccggaaggcggtcgccctcacccagccgcatcctgccacagccacagggcaccccggtgtccaccaccgtcgccaaggccatggcccgggaggccgcgcagagggtggccgagagcagcaggttagagaaaaggagcgtcttcctagagagaagcagcgcggggcagtacgccgcctcagacgaggaggacgcctatgactctccagacttcaagaggaggggcgcctcggtggacgacttcctgaaaggctctgaacttggcaagcagccgcactgttgccatggagacgagtaccacacagagagcagccgggggtctgacctctcagacatcatggaggaggacgaggaggagctgtattctgaaatgcagctggaagatgggggaaggaggcggcccagcggcacgtcccacaatgccctcaagattttagggaacccagcctctgcaggacgggtggatcacatgggccggaggtttccccgtggcagcgctggtcctcagaggtcccggcccgtgacagtcccatccatcgacgattacgggcgagaccgcctttctccagacttctatgaagagtcagaaactgaccctggtgccgaagagctcccggcccggatctttgtggctctctttgactacgacccgctcaccatgtccccaaacccagatgctgcagaggaggagcttccctttaaagaaggccagatcatcaaggtttatggtgataaagacgctgatggattctaccgtggggaaacctgtgcccggcttggccttattccttgtaacatggtctctgagatacaagcagatgatgaggagatgatggatcagcttcttagacagggctttctccctctgaatacacctgtggagaaaatagagagaagcaggagaagtggcaggcgtcattcggtatcgacgcggagaatggtggccctgtatgactacgaccccagagaaagctcgcccaacgtcgatgtcgaggccgaacttacattttgcacaggagatattattacagtttttggtgaaattgatgaagatggattttattatggggagctgaatgggcagaaaggccttgtgccctcaaacttcttggaagaagtgcctgatgacgtagaagtctatctttctgatgctccatcccactactctcaagatacgccaatgcgctcaaaggcaaaaaggaagaagagtgttcatttcacaccttaatcaggcaatgtagccttcacgtaagtgagcaactgaagataccgataaagataccaacttaagctaccttaaccgggccagtgtggtagacttaaggcttcattgtggggttaaaaaaaaaaaaagatacaaagaaatatgtctcaaaaaactattggacctaaataattagaatattacttggtctcagttgtaaagcaactgaatttatagtgaagcaaatcatctttaataatcatttcctactatttgcattaagaatatttgaaaggccaacattgggaacatatttcttaacaagctaactgtgtgtttacatagagagagctgcatattgcattgttagccactcttggaaaaagcacaacctaacaaacatgtttactataggaagctttactttagaaacttaacccaaggtcaagcagatgagtagtgaacacaggtgatcgagtgttggctctgaacactccaaacactggctcgagtggccagaacgtgttttccttaagtaaccctgcctctaccttacgagagagctatgctcctcctcaaagcacaatcatcctgtgacagaagttgctgcaacacgcgtttgttgttggtataccaatgcaatactaagttgatgaagcacgcagctcaaatgatcacattagatggaatagatggtatcttcaggtgtactttgggatgctttactaggtgttttccattagaattagaccttgattttaaatccaagcaagcttgaagccccttggcttacagcatttgcctgctgaatactaaacactcacatggcaagagttgctctggagaggtagggccagaggaatgctgctgcactgccaactcaggcacatgcttagctgtaaagggaagcgaggtgaagtcgtcctgcagcgtattagagtaaaagtctacccctctgaagcactattaagcgcttaacgtatatttaaatactaccatgtgctatctactgaggaagattcatgttcaattatttggaaataatgcaagcatccactaagggcctttaagctttctttgattataattaaggttcattttagtttttttttttctttcaaccagtgtgccatctccaatatttctatagtataccaaccaccccaggaatgcactttaacaatatcaggattttatataaccaaatagtttcaaatacaacaaaattccctttatgaactttcgctttttaagactactgatgggtactcggccaactttactatcaacctaatttcagatcatgtctcccctgcccttagtcttcatttatgaagtgaattattacctgccttagctttgccaaagcaacggccaccccgcactccctcgagacagagaaacggaacccacacatttatgtctggggcctctctctggcgtgctgtgggagaggacctttgcttctcatggcatacttcaacaactgaaagaacaaatgaacccccctgacctttcctggtgggaaacggggacagtacgatgttaccaagtgaattctgttgttggcgctcacacactcaataaactgtaacactgtacctactaggttcctcctgagggttcaggtacagcaaggagagctccatcccccacagtccatctccattcggggtcacctacgtcatctatgggttctggtagtcctgggagaggcagggaaatgtcctcgaaaaagaaaaaggggctgctttccaaaggcaagaaactgctgaaaaagctgggtgcagtgaaatgattcatgtgcttccggacaactgccaaatctatgtaattttctttaattccaaactagggctttcatgactcaagtacttcctaaaaaaacccaatcttctcccctgacaccagtagagaaatgcacttttgcactaccaaccactttaaaccaaccacgagaacaaagaggagcggttgctctctgtcaccgctggcagtctgctctcattgtccaagctctgatttgggaggtgggaggggacgtcttattaacaaacgggggcgcatagctatcacctgtagctccctccctacctgtaattccagtctttgtgcatttgtcatctgcccttaaaggaatgattttcaacctttctcccttctcaaaatgcttgcctcataatgcataactttcactttgactctggtcttgaaattcctagtttaattcgccttgatgttctgccttataaatgcacaatgatttgtactgtctaataaaaacagtgtatactttgtatgtgtcgtgcattcagtggtcttcatcctgacacagtggtttgagatcaagttgtacaggctgtgcattttaagatactagtttcagtctttcaaagccagccaggctacacacagaaaatgtttactcaatcattcaaaaaagagaaaaggagagaaagtaactttgtttggtaaagcaccagtactccaaccttccagaaagccgattatcttcattgcttttaatgttctattctgtggcatatggttttctgttactttcgttgtcaaaatgccatacccaaatacacagcaatgaatggcacacaagtaatccacataatgcataagccacaccaaaaccagactcaatttaaatctgctccaaatgagtccatacccatcttcatcattggcatttgaacaaaagacttacttacaaagttgctggcagatgtatttgatggttactcttttgtaattcttgtccacttgtaaattgtttttactctttatacatacttttcagactgcctttcttttgtaatttatggacggtttataaatgaatgacaaagctttccccattgtgtcttcaaaaacgctattataaattgtaatataatagtatgtggtagatttattattaaaggaaatccatgtgtggttaagctctgtgtgggtgtgtgcatgtgcacagttagtgtaaaatattttctagaaataaaatttgttattttatacaa

SEQ ID NO: 7699 - protein, 1052 aa, Homo sapiens
MREAAERRQQLQLEHDQALAVLSAKQQEIDLLQKSKVRELEEKCRTQSEQFNLLSRDLEKFRQHAGKIDLLGGSAVAPLDISTAPSKPFPQFMNGLATSLGKGQESAIGGSSAIGEYIRPLPQPGDRPEPLSAKPTFLSRSGSARCRSESDMENERNSNTSKQRYSGKVHLCVARYSYNPFDGPNENPEAELPLTAGKYLYVYGDMDEDGFYEGELLDGQRGLVPSNFVDFVQDNESRLASTLGNEQDQNFINHSGIGLEGEHILDLHSPTHIDAGITDNSAGTLDVNIDDIGEDIVPYPRKITLIKQLAKSVIVGWEPPAVPPGWGTVSSYNVLVDKETRMNLTLGSRTKALIEKLNMAACTYRISVQCVTSRGSSDELQCTLLVGKDVVVAPSHLRVDNITQISAQLSWLPTNSNYSHVIFLNEEEFDIVKAARYKYQFFNLRPNMAYKVKVLAKPHQMPWQLPLEQREKKEAFVEFSTLPAGPPAPPQDVTVQAGVTPATIRVSWRPPVLTPTGLSNGANVTGYGVYAKGQRVAEVIFPTADSTAVELVRLRSLEAKGVTVRTLSAQGESVDSAVAAVPPELLVPPTPHPRPAPQSKPLASSGVPETKDEHLGPHARMDEAWEQSRAPGPVHGHMLEPPVGPGRRSPSPSRILPQPQGTPVSTTVAKAMAREAAQRVAESSRLEKRSVFLERSSAGQYAASDEEDAYDSPDFKRRGASVDDFLKGSELGKQPHCCHGDEYHTESSRGSDLSDIMEEDEEELYSEMQLEDGGRRRPSGTSHNALKILGNPASAGRVDHMGRRFPRGSAGPQRSRPVTVPSIDDYGRDRLSPDFYEESETDPGAEELPARIFVALFDYDPLTMSPNPDAAEEELPFKEGQIIKVYGDKDADGFYRGETCARLGLIPCNMVSEIQADDEEMMDQLLRQGFLPLNTPVEKIERSRRSGRRHSVSTRRMVALYDYDPRESSPNVDVEAELTFCTGDIITVFGEIDEDGFYYGELNGQKGLVPSNFLEEVPDDVEVYLSDAPSHYSQDTPMRSKAKRKKSVHFTP

SEQ ID NO: 7700 - DNA, 3886 bp, Homo sapiens
gtacactgcagttgtctccgaggtgaacctccggagccttggcacagctcgcttctaaagcttggaaatgacccgccacacctgaagcctgcaggtgctgaggccacattcgatcagacccaagctttgggagaccgctggggaaatttcccacttcctctcctgagaccaggaactcagcagagaaactttgtggaaaatgaactgaaggatgccacccagggagagtatctcctgagatcccatcatgcaggccttcccacaagggcccggcagcatgacaaggtgaaggcagagtatgtgcatctcaaccatccgctcaccctcgtgaccagagagcgcgatttggccgtgaaggagaaacaccagctccaagccaagctggagaacctagaacaggtcctgaagcatatgcgagaggcggctgaacggcggcagcagctgcagttggagcatgaccaggccctggctgttctcagtgccaagcagcaggaaattgaccttctgcagaagcctcagaaaaccaacctccagtgtccgcactttaggaagtgtcccatgctttcacagttgacgatgacgttcgttagcactcttggtttcaagcgacagaaaacccaaacaggaaattgtttttgtgcccatcactgaaaatgtggcttcagacatggctagatccagggctcaaatctgctggcctcagacccagtagaatccaaggcctccccgacatcaccaggacttggctgctctctgccctcctctggatcagcttcagccttggtttccctgtggagacccccagccactccagccctgaccctcctggtggcaaagtggctgcagcctcacctcctcccaagccaaagtccaatagaaaggggcttccctctcccgcagcattctcaggcagaggcccattgccctccgtaggccccacaccacccaggtcaccagtcgctgagggttcagactgtgcttggcacaggggaggtccagaccccagccagtccagaggttcttcccaggagaggagctcctgacgctggaggaagaggcctgaggaacaggcctgttacccagaggatccgctatccaggaggctcaggttgaggctaagaaggagcatgaaggcgcagtgcggctgctagagtccaaggttcgagagctggaagagaaatgccggactcaaagtgagcagttcaacctgctgtcccgggacctggagaagttccggcagcacgctggcaagattgacctgctgggtggcagcgcggtggcccccctggacatctccacggcccccagcaagcctttcccacagttcatgaatggcctagccacctccctcggcaaaggtcaggagagcgctattggaggcagctctgcgatcggtgaatatatccggccccttccgcagcctggtgacaggccggagcctctgtccgccaagcccaccttcctgtcgagatccggtagcgcaagatgcagatctgagtcagacatggagaatgaacggaattccaatacctccaagcagagatactcggggaaggtccacctctgtgttgcccgctatagttacaaccccttcgatggaccgaacgagaaccccgaagctgagctgcccctcacggcgggaaaatacctctacgtctatggagacatggatgaggatgggttctatgaaggagagctcctcgatggccagaggggtctggtgccctccaacttcgtggactttgtgcaggacaacgagtcgcggttggcaagcacgctggggaacgagcaggatcagaacttcatcaaccattccggcatcggcctggagggagagcacatcctggacctccactccccaacccacatagatgcgggcatcaccgacaacagtgccgggaccctggacgtgaacatcgacgacatcggagaagacatcgtgccttaccctagaaaaatcaccctcatcaaacaactcgccaaaagtgttattgtgggctgggagcccccggcggtgccaccaggatggggaacggtgagcagctacaacgtcctggtggacaaggagacacgcatgaacctcacgctggggagcagaactaaagccctcatcgagaagctcaacatggcagcctgcacctaccgcatctccgtgcagtgcgtcaccagcaggggcagctcggatgagctgcagtgcacgctgctggtgggcaaggacgtggtggtggccccctcccacctgcgggtggacaacatcacgcagatctccgcccagctctcctggctacccaccaacagcaactacagccacgtcatcttcctcaacgaggaggagttcgacatcgtcaaggccgccaggtacaagtaccagttcttcaatctcaggcccaacatggcctataaggtgaaggttctggccaaaccccaccagatgccgtggcagctcccgctggagcaaagggagaagaaggaggcctttgtggagttctccacgttgcctgcaggacccccagcacccccacaagatgttaccgtccaggctggggtgacccccgccaccatccgggtctcctggagaccacctgtgctgacgcccaccgggctgtccaatggcgcaaacgttaccggctacggcgtgtatgccaaagggcagagggtggctgaagtcatcttccccacggcagacagcacggccgtggagcttgtgcggctgcggagcctggaggccaagggcgtgaccgtgcggaccctctccgcccagggcgagtccgtggactctgcagttgctgccgttccccccgagctcctggtgcctcctaccccccacccgagacctgcaccccaatcaaagccattagcaagttctggagtccccgaaaccaaagacgagcacctgggtccccacgccaggatggatgaggcctgggagcagagccgtgcacctggccctgtgcatgggcacatgctggagccgcccgtgggccccggaaggcggtcgccctcacccagccgcatcctgccacagccacagggcaccccggtgtccaccaccgtcgccaaggccatggcccgggaggccgcgcagagggtggccgagagcagcaggttagagaaaaggagcgtcttcctagagagaagcagcgcggggcagtacgccgcctcagacgaggaggacgcctatgactctccagacttcaagaggaggggcgcctcggtggacgacttcctgaaaggctctgaacttggcaagcagatggtctcctaacagagctggaattagattgaaccgaggcctgaagaagacctgtttccacgcctttccccatgtgccacgttctcctcacctatccaggagtgaatcatcaccttccctgcaatctgctcagattacaaacccggaggaaaggctggagcacttgttctctgggtgaaggacccatacccccactggtttttgagatcggcattcagcgctgtcttatggcagccacagccccaggtggccccagagcccttgacatgtggccacctggggctgagtgtgactgaggccctgaatttttacttctataaaattagttccagattagtttacattctaattagtttacatgtaaacagccacacgtggctggtggccaccagtgctgacgcccagctctggatgaccacacctgctacaagagatgacttttctagagaagagtagaaacacagcggcagaaacacagctctgcacttccgagggcctcccactccttctgatgagactgcagaggaagtctgtttggccaagcatgctattaacacgttttcctgcttgttttgttttttaacagagcaaacaggtctgtttctattaaaatttaaaaagcgttaatattta

SEQ ID NO: 7701 - protein, 645 aa, Homo sapiens
MNGLATSLGKGQESAIGGSSAIGEYIRPLPQPGDRPEPLSAKPTFLSRSGSARCRSESDMENERNSNTSKQRYSGKVHLCVARYSYNPFDGPNENPEAELPLTAGKYLYVYGDMDEDGFYEGELLDGQRGLVPSNFVDFVQDNESRLASTLGNEQDQNFINHSGIGLEGEHILDLHSPTHIDAGITDNSAGTLDVNIDDIGEDIVPYPRKITLIKQLAKSVIVGWEPPAVPPGWGTVSSYNVLVDKETRMNLTLGSRTKALIEKLNMAACTYRISVQCVTSRGSSDELQCTLLVGKDVVVAPSHLRVDNITQISAQLSWLPTNSNYSHVIFLNEEEFDIVKAARYKYQFFNLRPNMAYKVKVLAKPHQMPWQLPLEQREKKEAFVEFSTLPAGPPAPPQDVTVQAGVTPATIRVSWRPPVLTPTGLSNGANVTGYGVYAKGQRVAEVIFPTADSTAVELVRLRSLEAKGVTVRTLSAQGESVDSAVAAVPPELLVPPTPHPRPAPQSKPLASSGVPETKDEHLGPHARMDEAWEQSRAPGPVHGHMLEPPVGPGRRSPSPSRILPQPQGTPVSTTVAKAMAREAAQRVAESSRLEKRSVFLERSSAGQYAASDEEDAYDSPDFKRRGASVDDFLKGSELGKQMVS

SEQ ID NO: 7702 - DNA, 4124 bp, Homo sapiens
actgacgtccgaaaggattagagagaaaaatgtggtcagcgcttaatatggagggcacagtgggtgtgctgctttctcttttccatccctctgtcaacttcattctcttttgggggcaaacaagactcagatctaaacagagtttatggtttgttttgcattttgtatttattaatatttatgccgactttgaaggtgctgaccagaaggcatcagtaacacacacacgcacacgcacacacaccacacaccatgtctgtttggtttgattctgagcctgagatcctggaaatatttcagctgttgttaagaggctggagttaggacccaggaaggacacagcagtggggatataaatagaaaaggagaacagaacaaagtttgaggagagagacttacatcactcactccccctccacccagagagcaggacggaggtgtgaacttgagccagaccagaaggagctcgagagcggccgcaggacaagcccgaggagcaggcgggcgctccaggggaaaaccacgcacaaaaccttcttcagagaaaagggaagctccaaacctgactgagacaaacggaggctcttgaaataaaaagaaaataccgcaggacaaacagcctcccgtccccgggcgcaggtcgcggtcacagtggtgacctgggattgctttcccaggactgcgagtcgggtttgggtttctcctccctgcattccacagctgctctggtcatcgcaacgtgtttattgatcactgaagaatctcaagttttgagacgaggaagaaacacccattaggtctccaagacagctgtgtttcacaaactttaaggagacagaaattttctcccctggaacctgtgaaaatgtcccttttccaaggaagtgaaggttaagaggtcccgttctcacagaccctcaggaatttcacttggctccgagctttgacctccgagagagccatggaaaagctgctgcggctgtgctgctggtactcctggctgctgctattttattacaactttcaggtgcgtggcgtctactccagatcgcaggaccatccaggatttcaggtgttggcgtctgcttcccattactggccactggagaatgtggatgggatccatgaacttcaggatacaactggagatattgtggaagggaaggtcaacaaaggcatttacctgaaagaggaaaagggagtcacgcttctctattacggcaggtacaacagctcctgcatcagcaagccagagcagtgtggccctgaaggggtcacgttttcttttttctggaagacacaaggagaacagtctagaccaatcccttctgcgtatgggggacaggtcatctccaatgggttcaaagtctgctccagcggtggcagaggctctgtggagctgtatacgcgggacaattccatgacatgggaggcctccttcagccccccaggcccctattggactcatgtcctatttacatggaaatccaaggagggcctgaaagtctacgtcaacgggaccctgagcacctctgatccgagtggaaaagtgtctcgtgactatggagagtccaacgtcaacctcgtgatagggtctgagcaggaccaggccaagtgttatgagaacggtgctttcgatgagttcatcatctgggagcgggctctgactccggatgagatcgccatgtacttcactgctgccattggaaagcatgctttattgtcttcaacgctgccaagcctcttcatgacatccacagcaagccccgtgatgcccacagatgcctaccatcccatcataaccaacctgacagaagagagaaaaaccttccaaagtcccggagtgatactgagttacctccaaaatgtatccctcagcttacccagtaagtccctctcggagcagacagccttgaatctcaccaagaccttcttaaaagccgtgggagagatccttctactgcctggttggattgctctgtcagaggacagcgccgtggtactgagtctcatcgacactattgacaccgtcatgggccatgtatcctccaacctgcacggcagcacgccccaggtcaccgtggagggctcctctgccatggcagagttttccgtggccaaaatcctgcccaagaccgtgaattcctcccattaccgcttcccggcccacgggcagagcttcatccagatcccccacgaggccttccacaggcacgcctggagcaccgtcgtgggtctgctgtaccacagcatgcactactacctgaacaacatctggcccgcccacaccaagatcgcggaggccatgcatcaccaggactgcctgctgttcgccaccagccacctgatttccctggaggtgtccccaccacccaccctgtctcagaacctgtcgggctctccactcattacggtccacctcaagcacagattgacacgtaagcagcacagtgaggccaccaacagcagcaaccgagtcttcgtgtactgcgccttcctggacttcagctccggagaaggggtctggtcgaaccacggctgtgcgctcacgagaggaaacctcacctactccgtctgccgctgcactcacctcaccaactttgccatcctcatgcaggtggtcccgctggagcttgcacgcggacaccaggtggcgctgtcgtctatcagctatgtgggctgctccctctccgtgctctgcctggtggccacgctggtcaccttcgccgtgctgtcctccgtgagcaccatccggaaccagcgctaccacatccacgccaacctgtccttcgccgtgctggtggcccaggtcctgctgctcattagtttccgcctcgagccgggcacgaccccctgccaagtgatggccgtgctcctacactacttcttcctgagtgccttcgcatggatgctggtggaggggctgcacctctacagcatggtgatcaaggtctttgggtcggaggacagcaagcaccgttactactatgggatgggatggggttttcctcttctgatctgcatcatttcactgtcatttgccatggacagttacggaacaagcaacaattgctggctgtcgttggcgagtggcgccatctgggcctttgtagcccctgccctgtttgtcatcgtggtcaacattggcatcctcatcgctgtgaccagagtcatctcacagatcagcgccgacaactacaagatccatggagaccccagtgccttcaagttgacagccaaggcagtggccgtgctgctgcccatcctgggtacctcgtgggtctttggcgtgcttgctgtcaacggttgtgctgtggttttccagtacatgtttgccacgctcaactccctgcagggactgttcatattcctctttcattgtctcctgaattcagaggtgagagccgccttcaagcacaaaaccaaggtctggtcgctcacgagcagctctgcccgcacctccaacgcgaagcccttccactcggacctcatgaatgggacccggccaggcatggcctccaccaagctcagcccttgggacaagagcagccactctgcccaccgcgtcgacctgtcagccgtgtgagccgggaggctgccaaccaggccaggctgcgctcagaacacacccccccaaacagaatgaaatgccccacctttgcccatggaccctctccttgctgctgtctggacatgggtgttgtggccccgagacagctgtcctcccctgtgactctggctgtcggagcacactgctcagcccagcagcctgatgcccaggccagcgtgggccctcctgccttgcatccacccgtgggctgagtgacttcctcgggggattcccaggacacagtggcctgactgtgatggtgcccttgagcctcccttcatcactcagcatcagacccagcgaggccaggacactcggggccggtcccgcagcaccaggaggggatgttcagcctctgtgccttggtggggcttggggactcagggccaaagaggtggttcaggtccccacgcaccctcagtcaggcgcaggcagctgggggtgtgtggggaagagcatgcggagtccccagtgtctgaatccactgagtggtgagttccccacagccggcgct

SEQ ID NO: 7703 - protein, 874 aa, Homo sapiens; identical to SEQ ID NO: 1112

SEQ ID NO: 7704 - DNA, 4136 bp, Homo sapiens
agaaaggcaggaagagaagcagtgaaggcagagctcactggcccagctcagcagggcttaagagaggcctctcccctggtgatgtgtgtctgaggatgagggccccctgctttcttgggggcagtgtctaccaggatcctctgctctggaactcagaaaggaaagagggctcttggagtagaaggcaagctcctgggaagtcaaggcagccagagatagctctgggtgccggcacctcggaagcagccacccttcatggagaaggggacagagctgctggtgtccccatcccagagtggacctgggggcgatcagcccctcctcgtgaagcacagggaggacagcgccgtggtactgagtctcatcgacactattgacaccgtcatgggccatgtatcctccaacctgcacggcagcacgccccaggtcaccgtggagggctcctctgccatggcagagttttccgtggccaaaatcctgcccaagaccgtgaattcctcccattaccgcttcccggcccacgggcagagcttcatccagatcccccacgaggccttccacaggcacgcctggagcaccgtcgtgggtctgctgtaccacagcatgcactactacctgaacaacatctggcccgcccacaccaagatcgcggaggccatgcatcaccaggactgcctgctgttcgccaccagccacctgatttccctggaggtgtccccaccacccaccctgtctcagaacctgtcgggctctccactcattacggtccacctcaagcacagattgacacgtaagcagcacagtgaggccaccaacagcagcaaccgagtcttcgtgtactgcgccttcctggacttcagctccggagaaggggtctggtcgaaccacggctgtgcgctcacgagaggaaacctcacctactccgtctgccgctgcactcacctcaccaactttgccatcctcatgcaggtggtcccgctggagcttgcacgcggacaccaggtggcgctgtcgtctatcagctatgtgggctgctccctctccgtgctctgcctggtggccacgctggtcaccttcgccgtgctgtcctccgtgagcaccatccggaaccagcgctaccacatccacgccaacctgtccttcgccgtgctggtggcccaggtcctgctgctcattagtttccgcctcgagccgggcacgaccccctgccaagtgatggccgtgctcctacactacttcttcctgagtgccttcgcatggatgctggtggaggggctgcacctctacagcatggtgatcaaggtctttgggtcggaggacagcaagcaccgttactactatgggatgggatggggttttcctcttctgatctgcatcatttcactgtcatttgccatggacagttacggaacaagcaacaattgctggctgtcgttggcgagtggcgccatctgggcctttgtagcccctgccctgtttgtcatcgtggtcaacattggcatcctcatcgctgtgaccagagtcatctcacagatcagcgccgacaactacaagatccatggagaccccagtgccttcaagttgacagccaaggcagtggccgtgctgctgcccatcctgggtacctcgtgggtctttggcgtgcttgctgtcaacggttgtgctgtggttttccagtacatgtttgccacgctcaactccctgcagggactgttcatattcctctttcattgtctcctgaattcagaggtgagagccgccttcaagcacaaaaccaaggtctggtcgctcacgagcagctctgcccgcacctccaacgcgaagcccttccactcggacctcatgaatgggacccggccaggcatggcctccaccaagctcagcccttgggacaagagcagccactctgcccaccgcgtcgacctgtcagccgtgtgagccgggaggctgccaaccaggccaggctgcgctcagaacacacccccccaaacagaatgaaatgccccacctttgcccatggaccctctccttgctgctgtctggacatgggtgttgtggccccgagacagctgtcctcccctgtgactctggctgtcggagcacactgctcagcccagcagcctgatgcccaggccagcgtgggccctcctgccttgcatccacccgtgggctgagtgacttcctcgggggattcccaggacacagtggcctgactgtgatggtgcccttgagcctcccttcatcactcagcatcagacccagcgaggccaggacactcggggccggtcccgcagcaccaggaggggatgttcagcctctgtgccttggtggggcttggggactcagggccaaagaggtggttcaggtccccacgcaccctcagtcaggcgcaggcagctgggggtgtgtggggaagagcatgcggagtccccagtgtctgaatccactgagtggtgagttccccacagccggcgctagccgtggtgtgtgtctctgtaggtggtgccggcgtgggccaacctgtgctgtgtcatcagttgggggcccctgcccaagccgagctcgagccgtgggcgggagtcgttgactctccaggtgagggcgacccctctgccctgtccttgggggggtcccctctgctcacgtgaagagccgctctgggccttgaggctgcctgatggtgcctgtgcttgggggagcttctcggccatccgctgtgagttttgcctctttggaccccaattcggccttaagatgccctcctccctcgtgtgccagcctccttggttgttcttgggccacaggagctggccgtgtccccgcagtgcctggtgtccaggtggaaagtggagggcattttccagggcactgctttccccagaggcttcctcatggctcacaggcactctacgaagtttctaatgggcagaccacgcggcaggtagcacagtgcgctccgtctggtcaccatgagaccgacctgcgctgagtccccactgacctggagagggagggctggtgacagccgtgtcttctgtgttgagggaaatttatggactcagattcagccccagaggagatgggataattgttatggacccatgtgtgggcatgatcctgtggaacacaggtttgggatcatagatgtgaattaagacaccaccgagatacgggctgtgaggttcatactgtgctgatagcactcgtggtgtctgtgaaatgtgggtaagacattcaaacctggttttgatactggaaactcttcctttaaaactgtgaccatgatttcattcagcccctccacacccctatgtctgccttgtttcagagtgagttttctatggagcctgtggcccttttgcagcccacctggtggcttcttaatgtaactcttcccctggtcgcctggagtggaccactcatctgcaggcctctcctgcatggggagggtaggcagggagcagcatgtctgcaggggtgaacctttgctcttctgtcaggcgaggcccaggctgcaccagccacctgccacatggtgacagtgccacgggccctgcgtatggcccctgcaaccgtgctctggcgggcacacctggctgctgcaggccaaggccgctgttcagtgaagagtcccatgtttagtatggactaaagtcccatgtttagccactgccccaggctcccgtgaccccagaaaccaggtcacatggaccacagtgccagatcctcatcacgccggtgagcacctagaagtgagaacactgtattcctacaatgtacacttggatatttctccttatttagtttctagtgaaacaaatcaagtaaggaactatctttagtttagatggaattatttgtttttaattgttgccgtattcatctatatagctaatatttcaagataagtaatgaacaaaacctgtctaaaccttttgtttccaatgaatgaaagtcatgcactttatttataggctctatgttttggcttctgcagtacttttattatctatacataatttggccaaaaataagaaattggaaagaatgaaatgtttagtttatagtagaagaaagatgatgacactaagttgtgaaaatatgttgtgatttttatgaaataaactcatgtcctg

SEQ ID NO: 7705 - protein, 560 aa, Homo sapiens
MEKGTELLVSPSQSGPGGDQPLLVKHREDSAVVLSLIDTIDTVMGHVSSNLHGSTPQVTVEGSSAMAEFSVAKILPKTVNSSHYRFPAHGQSFIQIPHEAFHRHAWSTVVGLLYHSMHYYLNNIWPAHTKIAEAMHHQDCLLFATSHLISLEVSPPPTLSQNLSGSPLITVHLKHRLTRKQHSEATNSSNRVFVYCAFLDFSSGEGVWSNHGCALTRGNLTYSVCRCTHLTNFAILMQVVPLELARGHQVALSSISYVGCSLSVLCLVATLVTFAVLSSVSTIRNQRYHIHANLSFAVLVAQVLLLISFRLEPGTTPCQVMAVLLHYFFLSAFAWMLVEGLHLYSMVIKVFGSEDSKHRYYYGMGWGFPLLICIISLSFAMDSYGTSNNCWLSLASGAIWAFVAPALFVIVVNIGILIAVTRVISQISADNYKIHGDPSAFKLTAKAVAVLLPILGTSWVFGVLAVNGCAVVFQYMFATLNSLQGLFIFLFHCLLNSEVRAAFKHKTKVWSLTSSSARTSNAKPFHSDLMNGTRPGMASTKLSPWDKSSHSAHRVDLSAV

SEQ ID NO: 7706 - DNA, 2884 bp, Homo sapiens
gtcatggagtgtctgcacgggacgtcctggagagtcggacacgtaagcagcacagtgaggccaccaacagcagcaaccgagtcttcgtgtactgcgccttcctggacttcagctccggagaaggggtctggtcgaaccacggctgtgcgctcacgagaggaaacctcacctactccgtctgccgctgcactcacctcaccaactttgccatcctcatgcaggtggtcccgctggaggtcaacattggcatcctcatcgctgtgaccagagtcatctcacagatcagcgccgacaactacaagatccatggagaccccagtgccttcaagttgacagccaaggcagtggccgtgctgctgcccatcctgggtacctcgtgggtctttggcgtgcttgctgtcaacggttgtgctgtggttttccagtacatgtttgccacgctcaactccctgcagggactgttcatattcctctttcattgtctcctgaattcagaggtgagagccgccttcaagcacaaaaccaaggtctggtcgctcacgagcagctctgcccgcacctccaacgcgaagcccttccactcggacctcatgaatgggacccggccaggcatggcctccaccaagctcagcccttgggacaagagcagccactctgcccaccgcgtcgacctgtcagccgtgtgagccgggaggctgccaaccaggccaggctgcgctcagaacacacccccccaaacagaatgaaatgccccacctttgcccatggaccctctccttgctgctgtctggacatgggtgttgtggccccgagacagctgtcctcccctgtgactctggctgtcggagcacactgctcagcccagcagcctgatgcccaggccagcgtgggccctcctgccttgcatccacccgtgggctgagtgacttcctcgggggattcccaggacacagtggcctgactgtgatggtgcccttgagcctcccttcatcactcagcatcagacccagcgaggccaggacactcggggccggtcccgcagcaccaggaggggatgttcagcctctgtgccttggtggggcttggggactcagggccaaagaggtggttcaggtccccacgcaccctcagtcaggcgcaggcagctgggggtgtgtggggaagagcatgcggagtccccagtgtctgaatccactgagtggtgagttccccacagccggcgctagccgtggtgtgtgtctctgtaggtggtgccggcgtgggccaacctgtgctgtgtcatcagttgggggcccctgcccaagccgagctcgagccgtgggcgggagtcgttgactctccaggtgagggcgacccctctgccctgtccttgggggggtcccctctgctcacgtgaagagccgctctgggccttgaggctgcctgatggtgcctgtgcttgggggagcttctcggccatccgctgtgagttttgcctctttggaccccaattcggccttaagatgccctcctccctcgtgtgccagcctccttggttgttcttgggccacaggagctggccgtgtccccgcagtgcctggtgtccaggtggaaagtggagggcattttccagggcactgctttccccagaggcttcctcatggctcacaggcactctacgaagtttctaatgggcagaccacgcggcaggtagcacagtgcgctccgtctggtcaccatgagaccgacctgcgctgagtccccactgacctggagagggagggctggtgacagccgtgtcttctgtgttgagggaaatttatggactcagattcagccccagaggagatgggataattgttatggacccatgtgtgggcatgatcctgtggaacacaggtttgggatcatagatgtgaattaagacaccaccgagatacgggctgtgaggttcatactgtgctgatagcactcgtggtgtctgtgaaatgtgggtaagacattcaaacctggttttgatactggaaactcttcctttaaaactgtgaccatgatttcattcagcccctccacacccctatgtctgccttgtttcagagtgagttttctatggagcctgtggcccttttgcagcccacctggtggcttcttaatgtaactcttcccctggtcgcctggagtggaccactcatctgcaggcctctcctgcatggggagggtaggcagggagcagcatgtctgcaggggtgaacctttgctcttctgtcaggcgaggcccaggctgcaccagccacctgccacatggtgacagtgccacgggccctgcgtatggcccctgcaaccgtgctctggcgggcacacctggctgctgcaggccaaggccgctgttcagtgaagagtcccatgtttagtatggactaaagtcccatgtttagccactgccccaggctcccgtgaccccagaaaccaggtcacatggaccacagtgccagatcctcatcacgccggtgagcacctagaagtgagaacactgtattcctacaatgtacacttggatatttctccttatttagtttctagtgaaacaaatcaagtaaggaactatctttagtttagatggaattatttgtttttaattgttgccgtattcatctatatagctaatatttcaagataagtaatgaacaaaacctgtctaaaccttttgtttccaatgaatgaaagtcatgcactttatttataggctctatgttttggcttctgcagtacttttattatctatacataatttggccaaaaataagaaattggaaagaatgaaatgtttagtttatagtagaagaaagatgatgacactaagttgtgaaaatatgttgtgatttttatgaaataaactcatgtcctg

SEQ ID NO: 7707 - protein, 156 aa, Homo sapiens
MQVVPLEVNIGILIAVTRVISQISADNYKIHGDPSAFKLTAKAVAVLLPILGTSWVFGVLAVNGCAVVFQYMFATLNSLQGLFIFLFHCLLNSEVRAAFKHKTKVWSLTSSSARTSNAKPFHSDLMNGTRPGMASTKLSPWDKSSHSAHRVDLSAV

SEQ ID NO: 7708 - DNA, 565 bp, Homo sapiens
acatttgcagggattaggaatgttgtatgactgccccaggtggaccctgtagctgagaaagacatcaccttagcaactacttttggatgaaggtacgctggcaggtggaacgaggttgttgaagtaacggctctgcttccctccgcagttgctggctgtcgttggcgagtggcgccatctgggcctttgtagcccctgccctgtttgtcatcgtggtcaacattggcatcctcatcgctgtgaccagagtcatctcacagatcagcgccgacaactacaagatccatggagaccccagtgccttcaagttgacagccaaggcagtggccgtgctgctgcccatcctgggtacctcgtgggtctttggcgtgcttgctgtcaacggttgtgctgtggttttccagtacatgtttgccacgctcaactccctgcagggactgttcatattcctctttcattgtctcctgaattcagaggtacgtccgctctgcttgctggcaggtgcaggtgcagctggcttttcctttccgaaaggtcacaggagcaggaacagcgctgccctgtc

SEQ ID NO: 7709 - protein, 51 aa, Homo sapiens
MFATLNSLQGLFIFLFHCLLNSEVRPLCLLAGAGAAGFSFPKGHRSRNSAA

SEQ ID NO: 7710 - DNA, 1030 bp, Homo sapiens
tttctttgtgcagttagcaccggtggacaccaggagctgctggtcaacattggcatcctcatcgctgtgaccagagtcatctcacagatcagcgccgacaactacaagatccatggagaccccagtgccttcaagttgacagccaaggcagtggccgtgctgctgcccatcctgggtacctcgtgggtctttggcgtgcttgctgtcaacggttgtgctgtggttttccagtacatgtttgccacgctcaactccctgcagggactgttcatattcctctttcattgtctcctgaattcagaggtgagagccgccttcaagcacaaaaccaaggtctggtcgctcacgagcagctctgcccgcacctccaacgcgaagcccttccactcggacctcatgaatgggacccggccaggcatggcctccaccaagctcagcccttgggacaagagcagccactctgcccaccgcgtcgacctgtcagccgtgtgagccgggaggctgccaaccaggccaggctgcgctcagaacacacccccccaaacagaatgaaatgccccacctttgcccatggaccctctccttgctgctgtctggacatgggtgttgtggccccgagacagctgtcctcccctgtgactctggctgtcggagcacactgctcagcccagcagcctgatgcccaggccagcgtgggccctcctgccttgcatccacccgtgggctgagtgacttcctcgggggattcccaggacacagtggcctgactgtgatggtgcccttgagcctcccttcatcactcagcatcagacccagcgaggccaggacactcggggccggtcccgcagcaccaggaggggatgttcagcctctgtgccttggtggggcttggggactcagggccaaagaggtggttcaggtccccacgcaccctcagtcaggcgcaggcagctgggggtgtgtggggaagagcatgcggagtccccagtgtctgaatccactgagtggtgagttccccacagccggcgct

SEQ ID NO: 7711 - protein, 85 aa, Homo sapiens
MFATLNSLQGLFIFLFHCLLNSEVRAAFKHKTKVWSLTSSSARTSNAKPFHSDLMNGTRPGMASTKLSPWDKSSHSAHRVDLSAV

SEQ ID NO: 7712 - DNA, 1245 bp, Homo sapiens
ggctgggccgtaagagatgcaggtcaggacacccccgatggcagtgagttgtgtggctggaatccctcccagagaccccgccccttctccaggcggggcagcccagagcacaccaggacactgctctcccttgcaccttccctgatgtgccagcttccccgttgccgccccccagctgctcatcaccctggggtgaagaaatccctaggagaactccgtagactccgttcttctacacatgggagctctggggctgggtaaaggccctgtcctgggtcacgagagccaagcgagggcgtgaaaccagagctgccctgagatggcagggacacggagcaagtggaggactttggtgccggccacaggaggcaggagtggctatctctcctgtgacctcaaagcatcctctgggggcagaagggccgtggcactgctggcagcctgaggtcaacttacttgaaggcactggggtctccatggatcttgtagttgtcggcgctgatctgtgagatgactctggtcacagcgatgaggatgccaatgttgacctgcacaagaaaccatggaggaaggtgaggggggcctgggctgcacctgcaggagagctgcgtccgcctggccactgccctcaccacaggctacccctgcccagccagggctcctgggacacaggggcatcactgggacaaatctcaccctgttccgtgggcttttaccaacacacacaacatgcaagcttgcctctgagagcacctgcactgagaagacagcagagacgagttctagtcccaggaacacatcaacgactgctcaatgtgccaggccccggcacaggagctggctctcatctcccgccccggcccaggcctgcggctgtgcgagccacagaagctgcggcagaggggcatcatctcctgccagcacccctcctcagtcggatgcaccttagtgccccccagccaacctcactgtgtaacgacgagaagaaagccacactcaactaggagcagcaagcgggagcagcgtggatgacaggtcagtggttttcaaatgcagtgatgattcaactaggacagtgacaaacgcgtgactaatgtgcagttattacttcgagtggggatttcaattgcagatggctgatggtcactgatgtgtgagtgcggcccatgccctcggggcaggctggccttggccatctgcctgggaagcactttcgtgcctccagtggtggctacagcatcacac

SEQ ID NO: 7713 - protein, 128 aa, Homo sapiens [sequence omitted]

SEQ ID NO: 7714 - DNA, 2472 bp, Homo sapiens
gtagatacgcatgtgagcgctggtgggagacgccaggctgggatttccgctcgatctgggaatgagcaatgcaacctaatgacacccggagctcctgaatcacctggggaagatgaagagagacactctctggtgggaacgtctcctagaaacaaggcctaagatggggcgaccacagccccacagctgtgtccagatgcagggagcactcgcctgtgctgtgagggacggccggtgtcatcgttggagcttcctaagactcccagaggctgatgcacctcccagacccgcctccgcccggctccctgggccctgctccaggggcttcattgctccctgccccgggtcacccctcggctcaccgtctctcaggtgtggaatatcctgctccaatcaaagccatgtcacctgcgttgtccagtgaaacgtcagcggacaggcgctgcccgggctccagggagctcctcactgaggctcactccctgtgcctctgccatcagcacagggggacatgcctggctgcctgtgggaccagggaggacgcgcggtgcgggagcagagccagccacactgccgctgctgcactgttcatctgagtggcgcaagaacttgtcagtgcctttaatctgagggatgagtcttcaggagagtttgttgtcaggatttaacacttactcttggaaaagcagtaatgtgtgctggaaatgaaccgggcagaccctgctcccatctccatctgcctcaatctcagtgccctccactccccaccagcagcgcctgttaccaagtcactgcacaacaaccacaaatggagagtggaggagcatcactttccaccccgggatcatgacgagggctctgtaacttcaacaaatgcgcagaagacgcctggcctcgagcttgtgcagcacctccggagcctgccttcccttgtcacccacggcaccatgactttggagggtctcagctcagtcctccctccagaggggctgtcagtgctgggcagaaaatcacccttcaacgaccgggcccagctgcgctctgtcagagagcagagaaagcaggcctccgggaggttctcactccaccaaggagacgtctccacccagcgctcatcctgagcaagggcactgggaggaagaaatgcaattttaaaacctgtgctgcgaatgatgacttctgctgcttccgtctctggagagctctgggcacttaacatccttccacccacatgcccgagtctgtgcagaaacctcacccacgcggaggagactgcatttcccagtagcagattcaagtcctgaacttcctgtaccacaaagtgttacccacactggtgggtgccagcctgagactcaactatcaggaaaaacatgaagaattcagtccatgccctcaaatgcacccatgtggctcccaaacggcaaatctcagcaatgagattctcagctaggaaagtccacactgaactcatgcagaggacaaagtacataggcctggggttcttggcacctgagatctctgagcagttttctgaattttcctatttcctgttgaagacataggaacacgtggcacagaggcacagagacctggaaaccaacaggtgacctcagggaggtttgtgaagcaccctgatgagaagacagttgggcagacgtggctggctattccccaagtccattttccctcctgggaccagagctgactccatttctcaatctgccttgcagtgagcatagtcagcttcctggcactgctggacctgtcttgaaggctcttttggccggaaatggatgggcagggatctgagagcacctgctatcgggtgagtcctgctttactcatgtcagagatttagactaaaacaaacacaaaatgcaacaaagacctaagtgtaagagctaaaagtataaaactcttataaaaaaagtaagtgtaaattttcatggtcttggattaggtagcactctcttagatgtgctatcagaagcacatacaaccacaggaaaaaaaatacataaattgaatttcatcaaaatttaaaacttttgtgcattaaagttcatgatcaaaaaagcgagaagaaaacccagagaatgagtgaaatatttgcaaatcatacatctgggacaagtatccagaatatataaaaattcttagaactcaacaatataaagaaaaataaccaaattaaacagtaggcaaaggattcgaagagacctttgtccaaagaagatacacaaatgaccaatgagtacgtgaaaagatactcagcagctactcattatggaagtaccactttccactcatgctgagggctataataaaaaacaaaacagaaatgacaagtgcagtgaagatgtggagaaactggatttctcatagattgctggtgggaaagtaacatggtgcaaccaatgtagaaacagtttggcagttccttaaaaaattaaacagagctaccatctg

SEQ ID NO: 7715 - protein, 107 aa, Homo sapiens
MHLPDPPPPGSLGPAPGASLLPAPGHPSAHRLSGVEYPAPIKAMSPALSSETSADRRCPGSRELLTEAHSLCLCHQHRGTCLAACGTREDARCGSRASHTAAAALFI

SEQ ID NO: 7716 - DNA, 583 bp, Homo sapiens
atcagcttttatgttcagaaggcagggcacacctggaagctgttgtcgagggatggcctgattgagctcgtgaggccctgggcgtgcgggtgtggaatatcctgctccaatcaaagccatgtcacctgcgttgtccagtgaaacgtcagcggacaggcgctgcccgggctccagggagctcctcactgaggctcactccctgtgcctctgccatcagcacagggggacatgcctggctgcctgtgggaccagggaggacgcgcggtgcgggagcagagccagccacactgccgctgctgcactgttcatctgagtggcgcaagaacttgtcagtgcctttaatctgagggatgagtcttcaggagagtttgttgtcaggatttaacacttactcttggaaaagcagtaatgtgtgctggaaatgaaccgggcagaccctgctcccatctccatctgcctcaatctcagtgccctccactccccaccagcagcgcctgttaccaagtcactgcacaacaaccacaaatggagagtggaggagcatcactttccaccccgggatcatgacgagggctctgtaact

SEQ ID NO: 7717 - protein, 37 aa, Homo sapiens
MPGCLWDQGGRAVREQSQPHCRCCTVHLSGARTCQCL

SEQ ID NO: 7718 - DNA, 855 bp, Homo sapiens
atggcactgtcaccccccgccttgaaagtctcgtcctcccccacgcttggactcgtggcgctgagcagagacgcgggcgctcctggaatcgacgggaagcgccccgctgacaggcctgcggcgggagacccgagcccccagcgccaccccagggcggagtcccacccaccctgtctacacagagattcagctaagagcctgcactcgagtccaaagtcaggccgcgtgagaagccacggcggccgcaggggcccatgcggcctggccaccccggacacgccgagggagctggcggcggtcaggctgaaggagaggggccgtcaccgccccgcgggaggccgcggtcgcacactggcgggcaggggacatgggacacccagctgccgggcagcaaagaggggcaaactcgagagtgggaaagtaggcgatgctgacttagcggctgcgggggagaacggcccagcggagggcgccacgccacggccgaaaaaaatgcgccggccccagagctgccgccgactgttaaggaaggccctttgcacccaagaatggaagcggtgtgggtcgggcccgccaggcacaaacgcgaagtccctggaagcgcagctcgaaaagacaggcggccctccaggctccctccctggcgctccgggctccacgcggccctcggcgcactcggagcagagggatggggaccccgccgaggatccaggccacctgggcaggccgggtgctcaggacgcagcccgggctgtcccatcgaaggtgacagctcgcccacctccctgtggcctcgggcgggccacgctgtcatcccttggaggctccccgccaggggcctggcctgagcgctag

SEQ ID NO: 7719 - protein, 284 aa, Homo sapiens
MALSPPALKVSSSPTLGLVALSRDAGAPGIDGKRPADRPAAGDPSPQRHPRAESHPPCLHRDSAKSLHSSPKSGRVRSHGGRRGPCGLATPDTPRELAAVRLKERGRHRPAGGRGRTLAGRGHGTPSCRAAKRGKLESGKVGDADLAAAGENGPAEGATPRPKKMRRPQSCRRLLRKALCTQEWKRCGSGPPGTNAKSLEAQLEKTGGPPGSLPGAPGSTRPSAHSEQRDGDPAEDPGHLGRPGAQDAARAVPSKVTARPPPCGLGRATLSSLGGSPPGAWPER

SEQ ID NO: 7720 - DNA, 1308 bp, Homo sapiens
atgggcgactggagctttctgggaagactcttagaaaatgcacaggagcactccacggtcatcggcaaggtttggctgaccgtgctgttcatcttccgcatcttggtgctgggggccgcggcggaggacgtgtggggcgatgagcagtcagacttcacctgcaacacccagcagccgggctgcgagaacgtctgctacgacagggccttccccatctcccacatccgcttctgggcgctgcagatcatcttcgtgtccacgcccaccctcatctacctgggccacgtgctgcacatcgtgcgcatggaagagaagaagaaagagagggaggaggaggagcagctgaagagagagagccccagccccaaggagccaccgcaggacaatccctcgtcgcgggacgaccgcggcagggtgcgcatggccggggcgctgctgcggacctacgtcttcaacatcatcttcaagacgctgttcgaggtgggcttcatcgccggccagtactttctgtacggcttcgagctgaagccgctctaccgctgcgaccgctggccctgccccaacacggtggactgcttcatctccaggcccacggagaagaccatcttcatcatcttcatgctggcggtggcctgcgcgtccctgctgctcaacatgctggagatctaccacctgggctggaagaagctcaagcagggcgtgaccagccgcctcggcccggacgcctccgaggccccgctggggacagccgatcccccgcccctgccccccagctcccggccgcccgccgttgccatcgggttcccaccctactatgcgcacaccgctgcgcccctgggacaggcccgcgccgtgggctaccccggggccccgccaccagccgcggacttcaaactgctagccctgaccgaggcgcgcggaaagggccagtccgccaagctctacaacggccaccaccacctgctgatgactgagcagaactgggccaaccaggcggccgagcggcagcccccggcgctcaaggcttacccggcagcgtccacgcctgcagcccccagccccgtcggcagcagctccccgccactcgcgcacgaggctgaggcgggcgcggcgcccctgctgctggatgggagcggcagcagtctggaggggagcgccctggcagggacccccgaggaggaggagcaggccgtgaccaccgcggcccagatgcaccagccgcccttgcccctcggagacccaggtcgggccagcaaggccagcagggccagcagcgggcgggccagaccggaggacttggccatctag

SEQ ID NO: 7721 - protein, 435 aa, Homo sapiens; identical to SEQ ID NO: 1116

SEQ ID NO: 7722 - DNA, 888 bp, Homo sapiens
gggctgcagggatggcgatcagggcggggaggtcgggccctggcgcggggcgcacgcgtgaagcagcaccgcacgtgtgaaaggaattcttttcagagcggccgggagccctgctccggaggaacgcacccgggtcgccgccgcggcagagcggggttaggaatctgaagcaatgggcgactggagctttctgggaagactcttagaaaatgcacaggagcactccacggtcatcggcaaggtttggctgaccgtgctgttcatcttccgcatcttggtgctgggggccgcggcggaggacgtgtggggcgatgagcagtcagacttcacctgcaacacccagcagccgggctgcgagaacgtctgctacgacagggccttccccatctcccacatccgcttctgggcgctgcagatcatcttcgtgtccacgcccaccctcatctacctgggccacgtgctgcacatcgtgcgcatggaagagaagaagaaagagagggaggaggaggagcagctgaagagagagagccccagccccaaggagccaccgcaggacaatccctcgtcgcgggacgaccgcggcagggtgcgcatggccggggcgctgctgcggacctacgtcttcaacatcatcttcaagacgctgttcgaggtgggcttcatcgccggccagtactttctgtacggcttcgagctgaagccgctctaccgctgcgaccgctggccctgccccaacacggtggactgcttcatctccaggcccacggagaagaccatcttcatcatcttcatgctggcggtggcctgcgcgtccctgctgctcaacatgctggagatctaccacctgggctggaagaagctcaagcagggcgtgaccagccgcctcgg

SEQ ID NO: 7723 - protein, 237 aa, Homo sapiens
MGDWSFLGRLLENAQEHSTVIGKVWLTVLFIFRILVLGAAAEDVWGDEQSDFTCNTQQPGCENVCYDRAFPISHIRFWALQIIFVSTPTLIYLGHVLHIVRMEEKKKEREEEEQLKRESPSPKEPPQDNPSSRDDRGRVRMAGALLRTYVFNIIFKTLFEVGFIAGQYFLYGFELKPLYRCDRWPCPNTVDCFISRPTEKTIFIIFMLAVACASLLLNMLEIYHLGWKKLKQGVTSR

SEQ ID NO: 7724 - DNA, 8903 bp, Homo sapiens
gcggatgctgccgcattggccgctgcggcacggacggcgcagcctcgggcgcggcccggcacaggcgccggcggtccccgccagctagcagcccggcgaggcgctggcccacccatggtcctcgggcggcggcccctgcgcccagccctgcgcgtagcctccgtctctcgcccggggccgccgagcccccgacacgggcgagatgctgaacggcgcaggcctggacaaagctcttaagatgtccctgccgcggaggtcgaggatccgctcgtccgtgggacctgttcgttcttctttgggctataagaaggcagaggatgagatgtcccgggccacgtctgttggagaccagctggaggcacccgcccgcaccatttacctcaaccaaccgcatctcaacaaattccgcgacaaccagatcagtacggccaagtacagcgtgttgacatttctacctcgattcttgtatgagcagattagaagagctgctaatgccttctttctcttcattgccttattacagcaaattccagatgtatctccaacaggaagatataccaccctggtgccattgatcattattttaacaattgcaggcatcaaagagattgtagaagattttaagcgacacaaggcagacaatgcagttaacaaaaagaaaacaatagtgttaagaaatggtatgtggcataccattatgtggaaagaggtggcagtgggagacattgtgaaggtcgtcaatgggcagtatcttccagcagatgtggtcctgctgtcatccagtgaacctcaggcaatgtgttatgttgaaacagctaatctggatggggagacgaaccttaaaatacgtcagggtttgagtcacactgctgacatgcaaacacgtgaagttctgatgaagttatctggaactatagagtgtgaagggcccaaccgccacctctatgacttcactggaaacttgaacttagatgggaaaagccttgttgcccttgggcctgaccagatcttattaagaggtacacagcttagaaatactcagtgggtctttggcatagttgtttatactggacacgacaccaaactcatgcagaattcaaccaaagcgcctctcaagagatcaaatgttgagaaggtgactaacgtgcagatcctggtgttgtttggcatcctcttggtcatggccttggtgagctcggcgggggccctgtactggaacaggtctcatggtgaaaagaactggtacatcaagaagatggacaccacctcagataattttggatacaacctactgacgttcatcatcttatacaacaatcttattcccatcagtctgttggtgactcttgaggttgtgaagtatactcaagcccttttcataaactgggacacagatatgtattatataggaaatgacactcctgccatggccaggacatcaaaccttaatgaagagcttgggcaggtgaaatatctcttttctgacaagactggaacgcttacatgcaatatcatgaactttaagaagtgcagcattgccggagtaacctatggtcacttcccagaattggcaagagagccgtcttcagatgacttctgtcggatgcctcctccctgtagtgattcctgtgactttgatgaccccaggctgttgaagaacattgaggatcgccatcccacagccccttgcattcaggagttcctcacccttctggccgtgtgccacacggttgttcctgagaaggatggagataacatcatctaccaggcctcttccccagatgaagctgctttggtgaaaggagctaaaaagctgggctttgtcttcacagccagaacaccattctcagtcatcatagaagcgatgggacaggaacaaacattcggaatccttaatgtcctggaattttctagtgacagaaaaagaatgtctgtaattgttcgaactccttcaggacgacttcggctttactgtaaaggggctgataatgtgatttttgagagactttcaaaagactcaaaatatatggaggaaacattatgccatctggaatactttgccacggaaggcttgcggactctctgtgtggcttatgctgatctctctgagaatgagtatgaggagtggctgaaagtctatcaggaagccagcaccatattgaaggacagagctcaacggttggaagagtgttacgagatcattgagaagaatttgctgctacttggagccacagccatagaagatcgccttcaagcaggagttccagaaaccatcgcaacactgttgaaggcagaaattaaaatatgggtgttgacaggagacaaacaagaaactgcgattaatatagggtattcctgccgattggtatcgcagaatatggcccttatcctattgaaggaggactctttggatgccacaagggcagccattactcagcactgcactgaccttgggaatttgctgggcaaggaaaatgacgtggccctgatcatcgatggccacaccctgaagtacgcgctctccttcgaagtccggaggagtttcctggatttggcactctcgtgcaaagcggtcatatgctgcagagtgtctcctctgcagaagtctgagatagtggatgtggtgaagaagcgggtgaaggccatcaccctcgccatcggagacggcgccaacgatgtcgggatgatccagacagcccacgtgggtgtgggaatcagtgggaatgaaggcatgcaggccaccaacaactcggattacgccatcgcacagttttcctacttagagaagcttctgttggttcatggagcctggagctacaaccgggtgaccaagtgcatcttgtactgcttctataagaacgtggtcctgtatattattgagctttggttcgcctttgttaatggattttctgggcagattttatttgaacgttggtgcatcggcctgtacaatgtgattttcaccgctttgccgcccttcactctgggaatctttgagaggtcttgcactcaggagagcatgctcaggtttccccagctctacaaaatcacccagaatggcgaaggcttcaacacaaaggttttctggggtcactgcatcaacgccttggtccactccctcatcctcttctggtttcccatgaaagctctggagcatgatactgtgttgacaagtggtcatgctaccgactatttatttgttggaaatattgtttacacatatgttgttgttactgtttgtctgaaagctggtttggagaccacagcttggactaaattcagtcatctggctgtctggggaagcatgctgacctggctggtgttttttggcatctactcgaccatctggcccaccattcccattgctccagatatgagaggacaggcaactatggtcctgagctccgcacacttctggttgggattatttctggttcctactgcctgtttgattgaagatgtggcatggagagcagccaagcacacctgcaaaaagacattgctggaggaggtgcaggagctggaaaccaagtctcgagtcctgggaaaagcggtgctgcgggatagcaatggaaagaggctgaacgagcgcgaccgcctgatcaagaggctgggccggaagacgcccccgacgctgttccggggcagctccctgcagcagggcgtcccgcatgggtatgctttttctcaagaagaacacggagctgttagtcaggaagaagtcatccgtgcttatgacaccaccaaaaagaaatccaggaagaaataagacatgaattttcctgactgatcttaggaaagagattcagtttgttgcacccagtgttaacacatctttgtcagagaagactggcgtcagcagccaaaacaccaggaaacacatttctgtggccttagccaagcagtttgttagttacatattccctcgcaaacctggagtgcagaccacaggggaagctatctttgccctcccaactcgtctgcagtgcttagcctaacttttgtttatgtcgttatgaagcattcaactgtgctctgtgaggtgtgaaattaaaaacattatgtttcaccaatatttaaacatcagtactagttgtcctgggagaaagggaaaggagttttatgttgcgtgagaggcccatcctgtgtaattggagcagggcacacttgcttcctgttgagttaactcagaggttaagtccaacgggccacatgcagacttcactgtaggcaggttgctctcctgctttgattcctgttttgtgtgtaaaattggcataaacttcttgattgcagtgaaatcacaaaattctctatcggggtggtcaacctgagaacatttatttgaacctcttagccacatttccagcagggcaaaccaactgatgccctggaagagtcttccgcaccctctccaggtgcactcggcccagtcctgccgccgtgtccaggcgcccctcacccccacacctgctgcatggctggccacaccactcagtgcatggcggccgatgggcagccaacccaaacccgcgcctttccttgttccactgcagactcagatacagatgcgaaaaattccttcttccaccgcccttctcgttctgtaaagaaagaaaagaaacatagcctttctgcatatattctaaacgtctctctgcctctgtctgacatggggccaccccacaggtcagagtggtggtagaaccccttcaggactcccagccgtggtcaggctctgaatactcccttcccaacatccagactgctgggcctttggcatccacttacattagaacccacgtttgtttcagagcacattttggactttcactgttgggaaatgaatgaatttataacatgcctgcacagcgaaggaacacacctgtcgctcttagctctagagtcagaggatgagtaaacccagatgcaagagtataggacattgagtggggagaacaagacgaccacagaagtcctcagaaggagaaggaaggacacggagacactgagaggaggacacagaggaatcgccaccagatctttgcagtagaaactctgaaataggccttgagacccagacaattgtcatgatcagcccagtgtgtatgagagcttaaacaagaccttcacacacagttctaattgaaaagaattccaaacatttcagggaaacacctttttaaaaaatatactgacatggtttcctttctgtatcccatcagtgttagacacaggtacctatcagaatacggcatatcctgaattatctaagacaaggaagtgaagagcggaatcactgactttcccaactgcagagtcccacacttaaatctcaacagaacctagatgtcttcaggcatgaatgtgagcacctggagcccttactaaacaacctgcctggagccctgttctctgctctggttgccaaaccagatttttggatggcctaaatacttgtgggcaactgttactggtgaaaaatgggagtggagagcatgttttggattttcactgtggggaaatgaatgaatttatcacatgactgtgcagcgaaggagcacacctgtcactcttagctctagagtcggaggatgagtcaaccctgtaggaatgattgtgctaaattaggaaataacactttagtgcactttgcttcctaacccttttttgtcagaaatctacaacctactgggcatggaaatgatttaaaatatgatctgcattgactaagaaaactcatcctcacttatgaggtgaccaggatgcagagagggcctgaggggcagcagaacaatgcaattcacaggtgaggctccaaaaagggccatttctttctccccaaggtgcatagaacatttttaaatatcagagtacccagcaagacggaaggactgtcatgcaggaactctaacacaaaatgtgcctatgactaacacgacaaaccaaggtgtatggtttctttgcacacccagaaaggtgatggccaagatacagaggagaaacgaaaactggaattgaatgtgcattaggcatcttaactattcatattttgtctcatttgggaactaagcctatttggaaagagtggattagaaattgaattctttgtcaaacagttagctctgtcttgaacttgaagccttccaaatcagaattatgtatttaagtgtgtgtttgtgtttgtttggggtttttgtttcttacattagagttcatattttctgggatttaaggatacaggtgtattttcctattctcttgagaagtagactaaacaatatttgcagtgatgacagacgcacacagaagaaaacattagaagagatgcctttctatcctctcatgtggttgagcattcttacagccaaatgactaaattggctgtaaattggtttctaggaggagcagctgtcactacgtgtgatgtataatatttagccagggccaactcaggggctgtgtcatttgtcctatctttaaattgaggtcagagtgtcacacacaacccctcccctggggcagggtggactggactaggttgcatacgctggctgtcagctcagcaaaaatgccacatggggcttgtcactccgccagacactcactgactcacgggctggcaggtcacgctcggttagcgctccagggcctgactctggattgagctaaactggcagaatccactcaggccaacccttggtctactgctgtgtacagacagcccagtcctgtgttgagtctctcttctcctggatgaccctgcaaaaggaagagaccagttgtactgtgggcttagttctgggtttccactgcacactgacacgtgccagcaagggtagctgtggaaaacacgtatcaggagagcagagtagtctggatgaatactctgtgctgatcagaacgggctcggtcataatttaggagtggagctgatgtgtctgtcctgcctcagtgcagaatattccaggcttcttgaccagggttatgttcacccatctcccaacacacacatgcacacatgaaaacaaaaacatggtaactcttttggttcggcacaccatacaaaacgtgctttggggcgaggagtgctgtttcttttaacacttgtagaggaatatcctgagaagtgaacctgggctttgggagagctcagctgagaattctgttgacattttctttcccttgacaaggcttcaggttcgtctcactatagggagctggctgtgaaaatcagtaataacttgtcaagaagcagtgaaaaatgcgggggggtggaaagagcctaggtaactaatgtcttataatgcatatgtatgtaaatattacaggatttaaggttgaattttttaaaaagaaagttatagtctgtaatttccatttgttataataatgacctttaatcttgtcatttggaaccataaagcatttttatcaggtacctctgttccaagggatttatgtcttagaccatagctgaattgaatgtttgcaaaacactgctataggataaggtggtctttagttttgaacgtgtgaaaggactgcacacttttcagccagggtttgagttactgcccagggtcatcgtctcaaagtaattcaaggagtgatttaacatcagcatttgaaatgtagtcttcatctcctgggatccataaaaaaatgtgaacagggaaatggtggctaagcagagcctgaaataataacttggcaaagaaatgagtttatcaggtcgagtcaaaacatggcatcccctgttacactcaagaaatgttttcttcatgtaaatgtttatacgggcatatataatcacaatgggaacagttaaaaccccctcccttcaaaaaaagaaaatctatatcagttgggtttggttttggttcttcattggctcaaggcagttaactgtctcagtatagccttcggggagatttaacctcattctagccatttttccatcctgaaggccaagaaggactattagaagggtttttgaggggtttcggaggtgagggcccaagacccccataatgacatcattaggcattcttgaaaggtgttaacagaccagcacgctcgatgtgttgtacccttcatttatttttttttctcagcatcccaagttgtccatcagtacattccccttcaccttacctgatcttcatttaatgcccagtctgtaactaatgttctgtttaaagctctcttaatttgttggctatgagtgatttgtgaatctgggatgtaaccctgagtgaggagaaaagggcattgagccagcataaatctgaatgggcagaagccacaaacaaatgggagcagaaaagaagggcgagctcccccgcgccgcaccccgtgtataatccagtgttaacctctgaggaacacctcggctctcccaactgaggagagacaaaagagggattctttttacacccaggctggcgcattttcaagtgacaatctcgggctctagttgcctttgagatatccactctgctctttctcccaggcctcagaccaagaaaaacatgctctcaagattagcccataggcagttcttgtgacctggctgaagaaagaaaggagacctgtttgttttaaaagtcgggcgcaaagtgtcaggtggctttgatttatgacagaaagaggaagaagaaagttggagtaatagcactatccaaataaccctgcccaggaaacttgggggtcaagagagcttatcaagagccttttataggtaagctcttccgtgtgaaagagaaaaggccggaaagagggagagagcccagagagcaggctgcgaactcacttccaatgggattggagtctgttgtattcttaagagatagcctgatatgtggtttataggtgaatcaataaacaccaacaacaacaaa

SEQ ID NO: 7725 - protein, 1188 aa, Homo sapiens; identical to SEQ ID NO: 1118

SEQ ID NO: 7726 - DNA, 8442 bp, Homo sapiens
gcggatgctgccgcattggccgctgcggcacggacggcgcagcctcgggcgcggcccggcacaggcgccggcggtccccgccagctagcagcccggcgaggcgctggcccacccatggtcctcgggcggcggcccctgcgcccagccctgcgcgtagcctccgtctctcgcccggggccgccgagcccccgacacgggcgagatgctgaacggcgcaggcctggacaaagctcttaagatgtccctgccgcggaggtcgaggatccgctcgtccgtgggacctgttcgttcttctttgggctataagaaggcagaggatgagatgtcccgggccacgtctgttggagaccagctggaggcacccgcccgcaccatttacctcaaccaaccgcatctcaacaaattccgcgacaaccagatcagtacggccaagtacagcgtgttgacatttctacctcgattcttgtatgagcagattagaagagctgctaatgccttctttctcttcattgccttattacagcaaattccagatgtatctccaacaggaagatataccaccctggtgccattgatcattattttaacaattgcaggcatcaaagagattgtagaagattttaagcgacacaaggcagacaatgcagttaacaaaaagaaaacaatagtgttaagaaatggtatgtggcataccattatgtggaaagaggtggcagtgggagacattgtgaaggtcgtcaatgggcagtatcttccagcagatgtggtcctgctgtcatccagtgaacctcaggcaatgtgttatgttgaaacagctaatctggatggggagacgaaccttaaaatacgtcagggtttgagtcacactgctgacatgcaaacacgtgaagttctgatgaagttatctggaactatagagtgtgaagggcccaaccgccacctctatgacttcactggaaacttgaacttagatgggaaaagccttgttgcccttgggcctgaccagatcttattaagaggtacacagcttagaaatactcagtgggtctttggcatagttgtttatactggacacgacaccaaactcatgcagaattcaaccaaagcgcctctcaagagatcaaatgttgagaaggtgactaacgtgcagatcctggtgttgtttggcatcctcttggtcatggccttggtgagctcggcgggggccctgtactggaacaggtctcatggtgaaaagaactggtacatcaagaagatggacaccacctcagataattttggatacaacctactgacgttcatcatcttatacaacaatcttattcccatcagtctgttggtgactcttgaggttgtgaagtatactcaagcccttttcataaactgggacacagatatgtattatataggaaatgacactcctgccatggccaggacatcaaaccttaatgaagagcttgggcaggtgaaatatctcttttctgacaagactggaacgcttacatgcaatatcatgaactttaagaagtgcagcattgccggagtaacctatggtcacttcccagaattggcaagagagccgtcttcagatgacttctgtcggatgcctcctccctgtagtgattcctgtgactttgatgaccccaggctgttgaagaacattgaggatcgccatcccacagccccttgcattcaggagttcctcacccttctggccgtgtgccacacggttgttcctgagaaggatggagataacatcatctaccaggcctcttccccagatgaagctgctttggtgaaaggagctaaaaagctgggctttgtcttcacagccagaacaccattctcagtcatcatagaagcggtgagtaacatgcgtgtgcacatttcagatcacctgcttttgtgaagattgtgtgtgtgaaatggcatgtctattgtaaatatgataggccacaagggcagccattactcagcactgcactgaccttgggaatttgctgggcaaggaaaatgacgtggccctgatcatcgatggccacaccctgaagtacgcgctctccttcgaagtccggaggagtttcctggatttggcactctcgtgcaaagcggtcatatgctgcagagtgtctcctctgcagaagtctgagatagtggatgtggtgaagaagcgggtgaaggccatcaccctcgccatcggagacggcgccaacgatgtcgggatgatccagacagcccacgtgggtgtgggaatcagtgggaatgaaggcatgcaggccaccaacaactcggattacgccatcgcacagttttcctacttagagaagcttctgttggttcatggagcctggagctacaaccgggtgaccaagtgcatcttgtactgcttctataagaacgtggtcctgtatattattgagctttggttcgcctttgttaatggattttctgggcagattttatttgaacgttggtgcatcggcctgtacaatgtgattttcaccgctttgccgcccttcactctgggaatctttgagaggtcttgcactcaggagagcatgctcaggtttccccagctctacaaaatcacccagaatggcgaaggcttcaacacaaaggttttctggggtcactgcatcaacgccttggtccactccctcatcctcttctggtttcccatgaaagctctggagcatgatactgtgttgacaagtggtcatgctaccgactatttatttgttggaaatattgtttacacatatgttgttgttactgtttgtctgaaagctggtttggagaccacagcttggactaaattcagtcatctggctgtctggggaagcatgctgacctggctggtgttttttggcatctactcgaccatctggcccaccattcccattgctccagatatgagaggacaggcaactatggtcctgagctccgcacacttctggttgggattatttctggttcctactgcctgtttgattgaagatgtggcatggagagcagccaagcacacctgcaaaaagacattgctggaggaggtgcaggagctggaaaccaagtctcgagtcctgggaaaagcggtgctgcgggatagcaatggaaagaggctgaacgagcgcgaccgcctgatcaagaggctgggccggaagacgcccccgacgctgttccggggcagctccctgcagcagggcgtcccgcatgggtatgctttttctcaagaagaacacggagctgttagtcaggaagaagtcatccgtgcttatgacaccaccaaaaagaaatccaggaagaaataagacatgaattttcctgactgatcttaggaaagagattcagtttgttgcacccagtgttaacacatctttgtcagagaagactggcgtcagcagccaaaacaccaggaaacacatttctgtggccttagccaagcagtttgttagttacatattccctcgcaaacctggagtgcagaccacaggggaagctatctttgccctcccaactcgtctgcagtgcttagcctaacttttgtttatgtcgttatgaagcattcaactgtgctctgtgaggtgtgaaattaaaaacattatgtttcaccaatatttaaacatcagtactagttgtcctgggagaaagggaaaggagttttatgttgcgtgagaggcccatcctgtgtaattggagcagggcacacttgcttcctgttgagttaactcagaggttaagtccaacgggccacatgcagacttcactgtaggcaggttgctctcctgctttgattcctgttttgtgtgtaaaattggcataaacttcttgattgcagtgaaatcacaaaattctctatcggggtggtcaacctgagaacatttatttgaacctcttagccacatttccagcagggcaaaccaactgatgccctggaagagtcttccgcaccctctccaggtgcactcggcccagtcctgccgccgtgtccaggcgcccctcacccccacacctgctgcatggctggccacaccactcagtgcatggcggccgatgggcagccaacccaaacccgcgcctttccttgttccactgcagactcagatacagatgcgaaaaattccttcttccaccgcccttctcgttctgtaaagaaagaaaagaaacatagcctttctgcatatattctaaacgtctctctgcctctgtctgacatggggccaccccacaggtcagagtggtggtagaaccccttcaggactcccagccgtggtcaggctctgaatactcccttcccaacatccagactgctgggcctttggcatccacttacattagaacccacgtttgtttcagagcacattttggactttcactgttgggaaatgaatgaatttataacatgcctgcacagcgaaggaacacacctgtcgctcttagctctagagtcagaggatgagtaaacccagatgcaagagtataggacattgagtggggagaacaagacgaccacagaagtcctcagaaggagaaggaaggacacggagacactgagaggaggacacagaggaatcgccaccagatctttgcagtagaaactctgaaataggccttgagacccagacaattgtcatgatcagcccagtgtgtatgagagcttaaacaagaccttcacacacagttctaattgaaaagaattccaaacatttcagggaaacacctttttaaaaaatatactgacatggtttcctttctgtatcccatcagtgttagacacaggtacctatcagaatacggcatatcctgaattatctaagacaaggaagtgaagagcggaatcactgactttcccaactgcagagtcccacacttaaatctcaacagaacctagatgtcttcaggcatgaatgtgagcacctggagcccttactaaacaacctgcctggagccctgttctctgctctggttgccaaaccagatttttggatggcctaaatacttgtgggcaactgttactggtgaaaaatgggagtggagagcatgttttggattttcactgtggggaaatgaatgaatttatcacatgactgtgcagcgaaggagcacacctgtcactcttagctctagagtcggaggatgagtcaaccctgtaggaatgattgtgctaaattaggaaataacactttagtgcactttgcttcctaacccttttttgtcagaaatctacaacctactgggcatggaaatgatttaaaatatgatctgcattgactaagaaaactcatcctcacttatgaggtgaccaggatgcagagagggcctgaggggcagcagaacaatgcaattcacaggtgaggctccaaaaagggccatttctttctccccaaggtgcatagaacatttttaaatatcagagtacccagcaagacggaaggactgtcatgcaggaactctaacacaaaatgtgcctatgactaacacgacaaaccaaggtgtatggtttctttgcacacccagaaaggtgatggccaagatacagaggagaaacgaaaactggaattgaatgtgcattaggcatcttaactattcatattttgtctcatttgggaactaagcctatttggaaagagtggattagaaattgaattctttgtcaaacagttagctctgtcttgaacttgaagccttccaaatcagaattatgtatttaagtgtgtgtttgtgtttgtttggggtttttgtttcttacattagagttcatattttctgggatttaaggatacaggtgtattttcctattctcttgagaagtagactaaacaatatttgcagtgatgacagacgcacacagaagaaaacattagaagagatgcctttctatcctctcatgtggttgagcattcttacagccaaatgactaaattggctgtaaattggtttctaggaggagcagctgtcactacgtgtgatgtataatatttagccagggccaactcaggggctgtgtcatttgtcctatctttaaattgaggtcagagtgtcacacacaacccctcccctggggcagggtggactggactaggttgcatacgctggctgtcagctcagcaaaaatgccacatggggcttgtcactccgccagacactcactgactcacgggctggcaggtcacgctcggttagcgctccagggcctgactctggattgagctaaactggcagaatccactcaggccaacccttggtctactgctgtgtacagacagcccagtcctgtgttgagtctctcttctcctggatgaccctgcaaaaggaagagaccagttgtactgtgggcttagttctgggtttccactgcacactgacacgtgccagcaagggtagctgtggaaaacacgtatcaggagagcagagtagtctggatgaatactctgtgctgatcagaacgggctcggtcataatttaggagtggagctgatgtgtctgtcctgcctcagtgcagaatattccaggcttcttgaccagggttatgttcacccatctcccaacacacacatgcacacatgaaaacaaaaacatggtaactcttttggttcggcacaccatacaaaacgtgctttggggcgaggagtgctgtttcttttaacacttgtagaggaatatcctgagaagtgaacctgggctttgggagagctcagctgagaattctgttgacattttctttcccttgacaaggcttcaggttcgtctcactatagggagctggctgtgaaaatcagtaataacttgtcaagaagcagtgaaaaatgcgggggggtggaaagagcctaggtaactaatgtcttataatgcatatgtatgtaaatattacaggatttaaggttgaattttttaaaaagaaagttatagtctgtaatttccatttgttataataatgacctttaatcttgtcatttggaaccataaagcatttttatcaggtacctctgttccaagggatttatgtcttagaccatagctgaattgaatgtttgcaaaacactgctataggataaggtggtctttagttttgaacgtgtgaaaggactgcacacttttcagccagggtttgagttactgcccagggtcatcgtctcaaagtaattcaaggagtgatttaacatcagcatttgaaatgtagtcttcatctcctgggatccataaaaaaatgtgaacagggaaatggtggctaagcagagcctgaaataataacttggcaaagaaatgagtttatcaggtcgagtcaaaacatggcatcccctgttacactcaagaaatgttttcttcatgtaaatgtttatacgggcatatataatcacaatgggaacagttaaaaccccctcccttcaaaaaaagaaaatctatatcagttgggtttggttttggttcttcattggctcaaggcagttaactgtctcagtatagccttcggggagatttaacctcattctagccatttttccatcctgaaggccaagaaggactattagaagggtttttgaggggtttcggaggtgagggcccaagacccccataatgacatcattaggcattcttgaaaggtgttaacagaccagcacgctcgatgtgttgtacccttcatttatttttttttctcagcatcccaagttgtccatcagtacattccccttcaccttacctgatcttcatttaatgcccagtctgtaactaatgttctgtttaaagctctcttaatttgttggctatgagtgatttgtgaatctgggatgtaaccctgagtgaggagaaaagggcattgagccagcataaatctgaatgggcagaagccacaaacaaatgggagcagaaaagaagggcgagctcccccgcgccgcaccccgtgtataatccagtgttaacctctgaggaacacctcggctctcccaactgaggagagacaaaagagggattctttttacacccaggctggcgcattttcaagtgacaatctcgggctctagttgcctttgagatatccactctgctctttctcccaggcctcagaccaagaaaaacatgctctcaagattagcccataggcagttcttgtgacctggctgaagaaagaaaggagacctgtttgttttaaaagtcgggcgcaaagtgtcaggtggctttgatttatgacagaaagaggaagaagaaagttggagtaatagcactatccaaataaccctgcccaggaaacttgggggtcaagagagcttatcaagagccttttataggtaagctcttccgtgtgaaagagaaaaggccggaaagagggagagagcccagagagcaggctgcgaactcacttccaatgggattggagtctgttgtattcttaagagatagcctgatatgtggtttataggtgaatcaataaacaccaacaacaacaaa

SEQ ID NO: 7727 - protein, 568 aa, Homo sapiens
MLNGAGLDKALKMSLPRRSRIRSSVGPVRSSLGYKKAEDEMSRATSVGDQLEAPARTIYLNQPHLNKFRDNQISTAKYSVLTFLPRFLYEQIRRAANAFFLFIALLQQIPDVSPTGRYTTLVPLIIILTIAGIKEIVEDFKRHKADNAVNKKKTIVLRNGMWHTIMWKEVAVGDIVKVVNGQYLPADVVLLSSSEPQAMCYVETANLDGETNLKIRQGLSHTADMQTREVLMKLSGTIECEGPNRHLYDFTGNLNLDGKSLVALGPDQILLRGTQLRNTQWVFGIVVYTGHDTKLMQNSTKAPLKRSNVEKVTNVQILVLFGILLVMALVSSAGALYWNRSHGEKNWYIKKMDTTSDNFGYNLLTFIILYNNLIPISLLVTLEVVKYTQALFINWDTDMYYIGNDTPAMARTSNLNEELGQVKYLFSDKTGTLTCNIMNFKKCSIAGVTYGHFPELAREPSSDDFCRMPPPCSDSCDFDDPRLLKNIEDRHPTAPCIQEFLTLLAVCHTVVPEKDGDNIIYQASSPDEAALVKGAKKLGFVFTARTPFSVIIEAVSNMRVHISDHLLL

SEQ ID NO: 7728 - DNA, 8196 bp, Homo sapiens
cacaggcggcggcgtctccagggggagccaaggacctgttcgttcttctttgggctataagaaggcagaggatgagatgtcccgggccacgtctgttggagaccagctggaggcacccgcccgcaccatttacctcaaccaaccgcatctcaacaaattccgcgacaaccagatcagtacggccaagtacagcgtgttgacatttctacctcgattcttgtatgagcagattagaagagctgctaatgccttctttctcttcattgccttattacagcaaattccagatgtatctccaacaggaagatataccaccctggtgccattgatcattattttaacaattgcaggcatcaaagagattgtagaagattttaagcgacacaaggcagacaatgcagttaacaaaaagaaaacaatagtgttaagaaatggtatgtggcataccattatgtggaaagaggtggcagtgggagacattgtgaaggtcgtcaatgggcagtatcttccagcagatgtggtcctgctgtcatccagtgaacctcaggcaatgtgttatgttgaaacagctaatctggatggggagacgaaccttaaaatacgtcagggtttgagtcacactgctgacatgcaaacacgtgaagttctgatgaagttatctggaactatagagtgtgaagggcccaaccgccacctctatgacttcactggaaacttgaacttagatgggaaaagccttgttgcccttgggcctgaccagatcttattaagaggtacacagcttagaaatactcagtgggtctttggcatagttgtttatactggacacgacaccaaactcatgcagaattcaaccaaagcgcctctcaagagatcaaatgttgagaaggtgactaacgtgcagatcctggtgttgtttggcatcctcttggtcatggccttggtgagctcggcgggggccctgtactggaacaggtctcatggtgaaaagaactggtacatcaagaagatggacaccacctcagataattttggatacaacctactgacgttcatcatcttatacaacaatcttattcccatcagtctgttggtgactcttgaggttgtgaagtatactcaagcccttttcataaactgggacacagatatgtattatataggaaatgacactcctgccatggccaggacatcaaaccttaatgaagagcttgggcaggtgaaatatctcttttctgacaagactggaacgcttacatgcaatatcatgaactttaagaagtgcagcattgccggagtaacctatggtcacttcccagaattggcaagagagccgtcttcagatgacttctgtcggatgcctcctccctgtagtgattcctgtgactttgatgaccccaggctgttgaagaacattgaggatcgccatcccacagccccttgcattcaggagttcctcacccttctggccgtgtgccacacggttgttcctgagaaggatggagataacatcatctaccaggcctcttccccagatgaagctgctttggtgaaaggagctaaaaagctgggctttgtcttcacagccagaacaccattctcagtcatcatagaagcggtgagtaacatgcgtgtgcacatttcagatcacctgcttttgtgaagattgtgtgtgtgaaatggcatgtctattgtaaatatgataggccacaagggcagccattactcagcactgcactgaccttgggaatttgctgggcaaggaaaatgacgtggccctgatcatcgatggccacaccctgaagtacgcgctctccttcgaagtccggaggagtttcctggatttggcactctcgtgcaaagcggtcatatgctgcagagtgtctcctctgcagaagtctgagatagtggatgtggtgaagaagcgggtgaaggccatcaccctcgccatcggagacggcgccaacgatgtcgggatgatccagacagcccacgtgggtgtgggaatcagtgggaatgaaggcatgcaggccaccaacaactcggattacgccatcgcacagttttcctacttagagaagcttctgttggttcatggagcctggagctacaaccgggtgaccaagtgcatcttgtactgcttctataagaacgtggtcctgtatattattgagctttggttcgcctttgttaatggattttctgggcagattttatttgaacgttggtgcatcggcctgtacaatgtgattttcaccgctttgccgcccttcactctgggaatctttgagaggtcttgcactcaggagagcatgctcaggtttccccagctctacaaaatcacccagaatggcgaaggcttcaacacaaaggttttctggggtcactgcatcaacgccttggtccactccctcatcctcttctggtttcccatgaaagctctggagcatgatactgtgttgacaagtggtcatgctaccgactatttatttgttggaaatattgtttacacatatgttgttgttactgtttgtctgaaagctggtttggagaccacagcttggactaaattcagtcatctggctgtctggggaagcatgctgacctggctggtgttttttggcatctactcgaccatctggcccaccattcccattgctccagatatgagaggacaggcaactatggtcctgagctccgcacacttctggttgggattatttctggttcctactgcctgtttgattgaagatgtggcatggagagcagccaagcacacctgcaaaaagacattgctggaggaggtgcaggagctggaaaccaagtctcgagtcctgggaaaagcggtgctgcgggatagcaatggaaagaggctgaacgagcgcgaccgcctgatcaagaggctgggccggaagacgcccccgacgctgttccggggcagctccctgcagcagggcgtcccgcatgggtatgctttttctcaagaagaacacggagctgttagtcaggaagaagtcatccgtgcttatgacaccaccaaaaagaaatccaggaagaaataagacatgaattttcctgactgatcttaggaaagagattcagtttgttgcacccagtgttaacacatctttgtcagagaagactggcgtcagcagccaaaacaccaggaaacacatttctgtggccttagccaagcagtttgttagttacatattccctcgcaaacctggagtgcagaccacaggggaagctatctttgccctcccaactcgtctgcagtgcttagcctaacttttgtttatgtcgttatgaagcattcaactgtgctctgtgaggtgtgaaattaaaaacattatgtttcaccaatatttaaacatcagtactagttgtcctgggagaaagggaaaggagttttatgttgcgtgagaggcccatcctgtgtaattggagcagggcacacttgcttcctgttgagttaactcagaggttaagtccaacgggccacatgcagacttcactgtaggcaggttgctctcctgctttgattcctgttttgtgtgtaaaattggcataaacttcttgattgcagtgaaatcacaaaattctctatcggggtggtcaacctgagaacatttatttgaacctcttagccacatttccagcagggcaaaccaactgatgccctggaagagtcttccgcaccctctccaggtgcactcggcccagtcctgccgccgtgtccaggcgcccctcacccccacacctgctgcatggctggccacaccactcagtgcatggcggccgatgggcagccaacccaaacccgcgcctttccttgttccactgcagactcagatacagatgcgaaaaattccttcttccaccgcccttctcgttctgtaaagaaagaaaagaaacatagcctttctgcatatattctaaacgtctctctgcctctgtctgacatggggccaccccacaggtcagagtggtggtagaaccccttcaggactcccagccgtggtcaggctctgaatactcccttcccaacatccagactgctgggcctttggcatccacttacattagaacccacgtttgtttcagagcacattttggactttcactgttgggaaatgaatgaatttataacatgcctgcacagcgaaggaacacacctgtcgctcttagctctagagtcagaggatgagtaaacccagatgcaagagtataggacattgagtggggagaacaagacgaccacagaagtcctcagaaggagaaggaaggacacggagacactgagaggaggacacagaggaatcgccaccagatctttgcagtagaaactctgaaataggccttgagacccagacaattgtcatgatcagcccagtgtgtatgagagcttaaacaagaccttcacacacagttctaattgaaaagaattccaaacatttcagggaaacacctttttaaaaaatatactgacatggtttcctttctgtatcccatcagtgttagacacaggtacctatcagaatacggcatatcctgaattatctaagacaaggaagtgaagagcggaatcactgactttcccaactgcagagtcccacacttaaatctcaacagaacctagatgtcttcaggcatgaatgtgagcacctggagcccttactaaacaacctgcctggagccctgttctctgctctggttgccaaaccagatttttggatggcctaaatacttgtgggcaactgttactggtgaaaaatgggagtggagagcatgttttggattttcactgtggggaaatgaatgaatttatcacatgactgtgcagcgaaggagcacacctgtcactcttagctctagagtcggaggatgagtcaaccctgtaggaatgattgtgctaaattaggaaataacactttagtgcactttgcttcctaacccttttttgtcagaaatctacaacctactgggcatggaaatgatttaaaatatgatctgcattgactaagaaaactcatcctcacttatgaggtgaccaggatgcagagagggcctgaggggcagcagaacaatgcaattcacaggtgaggctccaaaaagggccatttctttctccccaaggtgcatagaacatttttaaatatcagagtacccagcaagacggaaggactgtcatgcaggaactctaacacaaaatgtgcctatgactaacacgacaaaccaaggtgtatggtttctttgcacacccagaaaggtgatggccaagatacagaggagaaacgaaaactggaattgaatgtgcattaggcatcttaactattcatattttgtctcatttgggaactaagcctatttggaaagagtggattagaaattgaattctttgtcaaacagttagctctgtcttgaacttgaagccttccaaatcagaattatgtatttaagtgtgtgtttgtgtttgtttggggtttttgtttcttacattagagttcatattttctgggatttaaggatacaggtgtattttcctattctcttgagaagtagactaaacaatatttgcagtgatgacagacgcacacagaagaaaacattagaagagatgcctttctatcctctcatgtggttgagcattcttacagccaaatgactaaattggctgtaaattggtttctaggaggagcagctgtcactacgtgtgatgtataatatttagccagggccaactcaggggctgtgtcatttgtcctatctttaaattgaggtcagagtgtcacacacaacccctcccctggggcagggtggactggactaggttgcatacgctggctgtcagctcagcaaaaatgccacatggggcttgtcactccgccagacactcactgactcacgggctggcaggtcacgctcggttagcgctccagggcctgactctggattgagctaaactggcagaatccactcaggccaacccttggtctactgctgtgtacagacagcccagtcctgtgttgagtctctcttctcctggatgaccctgcaaaaggaagagaccagttgtactgtgggcttagttctgggtttccactgcacactgacacgtgccagcaagggtagctgtggaaaacacgtatcaggagagcagagtagtctggatgaatactctgtgctgatcagaacgggctcggtcataatttaggagtggagctgatgtgtctgtcctgcctcagtgcagaatattccaggcttcttgaccagggttatgttcacccatctcccaacacacacatgcacacatgaaaacaaaaacatggtaactcttttggttcggcacaccatacaaaacgtgctttggggcgaggagtgctgtttcttttaacacttgtagaggaatatcctgagaagtgaacctgggctttgggagagctcagctgagaattctgttgacattttctttcccttgacaaggcttcaggttcgtctcactatagggagctggctgtgaaaatcagtaataacttgtcaagaagcagtgaaaaatgcgggggggtggaaagagcctaggtaactaatgtcttataatgcatatgtatgtaaatattacaggatttaaggttgaattttttaaaaagaaagttatagtctgtaatttccatttgttataataatgacctttaatcttgtcatttggaaccataaagcatttttatcaggtacctctgttccaagggatttatgtcttagaccatagctgaattgaatgtttgcaaaacactgctataggataaggtggtctttagttttgaacgtgtgaaaggactgcacacttttcagccagggtttgagttactgcccagggtcatcgtctcaaagtaattcaaggagtgatttaacatcagcatttgaaatgtagtcttcatctcctgggatccataaaaaaatgtgaacagggaaatggtggctaagcagagcctgaaataataacttggcaaagaaatgagtttatcaggtcgagtcaaaacatggcatcccctgttacactcaagaaatgttttcttcatgtaaatgtttatacgggcatatataatcacaatgggaacagttaaaaccccctcccttcaaaaaaagaaaatctatatcagttgggtttggttttggttcttcattggctcaaggcagttaactgtctcagtatagccttcggggagatttaacctcattctagccatttttccatcctgaaggccaagaaggactattagaagggtttttgaggggtttcggaggtgagggcccaagacccccataatgacatcattaggcattcttgaaaggtgttaacagaccagcacgctcgatgtgttgtacccttcatttatttttttttctcagcatcccaagttgtccatcagtacattccccttcaccttacctgatcttcatttaatgcccagtctgtaactaatgttctgtttaaagctctcttaatttgttggctatgagtgatttgtgaatctgggatgtaaccctgagtgaggagaaaagggcattgagccagcataaatctgaatgggcagaagccacaaacaaatgggagcagaaaagaagggcgagctcccccgcgccgcaccccgtgtataatccagtgttaacctctgaggaacacctcggctctcccaactgaggagagacaaaagagggattctttttacacccaggctggcgcattttcaagtgacaatctcgggctctagttgcctttgagatatccactctgctctttctcccaggcctcagaccaagaaaaacatgctctcaagattagcccataggcagttcttgtgacctggctgaagaaagaaaggagacctgtttgttttaaaagtcgggcgcaaagtgtcaggtggctttgatttatgacagaaagaggaagaagaaagttggagtaatagcactatccaaataaccctgcccaggaaacttgggggtcaagagagcttatcaagagccttttataggtaagctcttccgtgtgaaagagaaaaggccggaaagagggagagagcccagagagcaggctgcgaactcacttccaatgggattggagtctgttgtattcttaagagatagcctgatatgtggtttataggtgaatcaataaacaccaacaacaacaaa

SEQ ID NO: 7729 - protein, 528 aa, Homo sapiens
MSRATSVGDQLEAPARTIYLNQPHLNKFRDNQISTAKYSVLTFLPRFLYEQIRRAANAFFLFIALLQQIPDVSPTGRYTTLVPLIIILTIAGIKEIVEDFKRHKADNAVNKKKTIVLRNGMWHTIMWKEVAVGDIVKVVNGQYLPADVVLLSSSEPQAMCYVETANLDGETNLKIRQGLSHTADMQTREVLMKLSGTIECEGPNRHLYDFTGNLNLDGKSLVALGPDQILLRGTQLRNTQWVFGIVVYTGHDTKLMQNSTKAPLKRSNVEKVTNVQILVLFGILLVMALVSSAGALYWNRSHGEKNWYIKKMDTTSDNFGYNLLTFIILYNNLIPISLLVTLEVVKYTQALFINWDTDMYYIGNDTPAMARTSNLNEELGQVKYLFSDKTGTLTCNIMNFKKCSIAGVTYGHFPELAREPSSDDFCRMPPPCSDSCDFDDPRLLKNIEDRHPTAPCIQEFLTLLAVCHTVVPEKDGDNIIYQASSPDEAALVKGAKKLGFVFTARTPFSVIIEAVSNMRVHISDHLLL

SEQ ID NO: 7730 - DNA, 724 bp, Homo sapiens
ccagatcttattaagaggtacacagcttagaaatactcagtgggtctttggcatagttgtttatactggacacgacaccaaactcatgcagaattcaaccaaagcgcctctcaagagatcaaatgttgagaaggtgactaacgtgcagatcctggtgttgtttggcatcctcttggtcatggccttggtgagctcggcgggggccctgtactggaacaggtctcatggtgaaaagaactggtacatcaagaagatgggtaagtgtcggggtgggttgcttgttccagtggaagaaaaccatttttgagatgttcttgcagccatggttgaagtgtggtgtccctgctgtccttctgttccctttggttactgtacataatgccagcctttcaaggagaattgagattaggatcatgtgatgaaatgaagatgggcacatttgggacttgtcttatactcaaatggttatttttaaactctgtgttaaagtattttcttagtggttgccctaggaattacaatgtatttcccaatttatccaaatctacttttgattaatactaacaattctagtcaaacacagaaatgtcactccagcgtacctccatttcctctcctgcttggtgctgtcattgttatattccatttatctgtgttgtcaactccaaaatagtgttataataatttgtgtctcttaaagaagctaaaggaaaaaagaaaaaaa

SEQ ID NO: 7731 - protein, 73 aa, Homo sapiens
MQNSTKAPLKRSNVEKVTNVQILVLFGILLVMALVSSAGALYWNRSHGEKNWYIKKMGKCRGGLLVPVEENHF

SEQ ID NO: 7732 - DNA, 348 bp, Homo sapiens
tatggaagatggactggaacaaggacccagccagttaaggaggcttagaatgctgggagcctaacctctgcctgtggtatcacctctgcctgtgataacagacaaaaccaggaagtgtatttactaaaaagaataaacagtgctcggtgaatggtgagaggaccagagaggaaatgggaataagtaataggcatgtggccagcagaaaaaggagccaatctctaagaaagcaacaagtaaggaatgctcccctcgatggcagtgggaaggcctgctgggatgtgggggatcaggaagcttctctaggccctggaacactgagagctgctctctagggacactgctgtg

SEQ ID NO: 7733 - protein, 53 aa, Homo sapiens
MGISNRHVASRKRSQSLRKQQVRNAPLDGSGKACWDVGDQEASLGPGTLRAAL

SEQ ID NO: 7734 - DNA, 2422 bp, Homo sapiens
gatgtggccagtggtgtggatgtgaatattcatccctgtggaggaaaatagtggggtctctgagatttgattctgaaaccttccttgtatccctcctgagacatctttgctgcaagatcgaggctgtcctctggtgagaaggtggtgaggcttcccgtcatattccagctctgaacagcaacatggggtgcaaagtcctgctcaacattgggcagcagatgctgcggcggaaggtggtggactgtagccgggagggcagctctgcagttgggaggggcaccgtccggaggagaccaggcctctacacaccccccactctacttatcatccctgctcacacacccttgtccaaggctttatgcatcggatttatttttccaaatcaagaggacagtgatagatgcattttccccaggctgtctcagaaaggtcgctaaatgtatactgttgtcagaattgctgagatctccccccacttttggtttttgcagcagtaaaaactctttccactgtgacttattttctctctcaggcagccagccacctggtcccttgtgctgactctagcacagtggccaggatccaatacgagtccaggggtgaccgcaggatggtgggggcagcgggcttctccacctaccccagccaccaaggccctgacgcactgcctcctgcaccttcagcacatccctgtgcacagctggaagggtgcatggcccgctcacctttgttcagatgggtggaaacgctgatgataccagctcctccctgccgtgcccctgccacggagcaggcattgtgaactggctggtgtttgcagtcccacgtggcatggcctccagcccaacccacagtggagactggagacagggcaatgagtctggtggggggcacgtggacatgccccataggggccccacccagacttaacaggcaaggtcctgggcattgcgcgacgcaggactcaatgctaaagcaagcctgcctggctctgtgccagggcccctcttctgattcacacatcccatttttacacagacccttccttcttaataaaggctgacagttctgttggcagccaagaacccacaccatgaagacagggagtgaggggcctttgtgcccaactccagcacagctgcgttctggggtgtgtgagaggcatgttcgtgtctgtgcgctggtggtctcgtgagacagttccgaggacggggaaattgcagggtggtgggggcgtgaggcttatatgtggaactgatgcagagttcgcctgcagacggatctggatatacactatgtataattgttacgtgtaatttaaaatatatctgtttgccatcgtcatgagaagattatatgtaaggctctgaagggagagggagatgtacattctgccaggctcctggggaccttatccgagtcatgaaattgattactgttgatccagtggtgcaagaagctacactccatgtgtcatcacgcttatgactcctaatgtatttttaaggcaaaaaatgtcagccgactccatcttcacccctcgattcctcgagtccagcctttctgtgccagtgcttcactgagccacaacgctctcgccatcgggacccggctgggcctggagtctcggggcacagttgccatggagccctcctgggtcattctacaaatgtgctgagtgccagctgaaaaccccacaggagatggagtaccttggccaagcttaaagagaagattttctcagggtatttattagtgtgtccagcagggtcaggaagcaggatggaaagatgcactcagactgttaatttattaacaaggcaaatgattttgtgtttcttgatgacagactattaagtttgggacttattttcccatttgagaagttataatatatatttaagatgataagtttcctgcttaagttgtgcctttcagcttcaatgagtttaaggagcactaagggtaatgataccaatgagggttggtttattatcaaacctgaatagctgtggtttctccagtaaatattttcttctactgaacatggagccattattaagagttgtgtgttttttattatgtacatttgtatatttttttgcttgtttgatgttctatttttctaatagttttcttttagtttcttaaagttgtgatactagatttagattctgatgctaactgcaaatcaggttggtctctgctgggtctctcctgcttttattttactttaaggacaagtgtagttgtcgtccaccacctttcaaaaaatgtgaaactgccctgcctcccctttttgctgacaacactgtgtacattgaccacttcctaccatactttatgttgtaaaatcaaactcttttgtggtacattatctcatgcttctgcaaattcgaataaattctatggcttccatgtg

SEQ ID NO: 7735 - protein, 84 aa, Homo sapiens
MGCKVLLNIGQQMLRRKVVDCSREGSSAVGRGTVRRRPGLYTPPTLLIIPAHTPLSKALCIGFIFPNQEDSDRCIFPRLSQKGR

SEQ ID NO: 7736 - DNA, 7347 bp, Homo sapiens
gcactgctgatgaaacctggcgccggaacccgccagccctcggcgcccattcagtccgcgcaggcaggtgtgagcagcgggtcaactacctggcaggcgcgcacgcggccgcgggctcccgctaaccgcagcctccactcctctccccgcgcgccgcgcccccgccccgccccgccccgcccggtctcgccggccgagcgtccgttggtccttgagcgcgtccgacagtctgtctgttcgcgatcctgccggagccccgccgccgccggcttggattctgaaaccttccttgtatccctcctgagacatctttgctgcaagatcgaggctgtcctctggtgagaaggtggtgaggcttcccgtcatattccagctctgaacagcaacatggggtgcaaagtcctgctcaacattgggcagcagatgctgcggcggaaggtggtggactgtagccgggaggagacgcggctgtctcgctgcctgaacacttttgatctggtggccctcggggtgggcagcacactgggtgctggtgtctacgtcctggctggagctgtggcccgtgagaatgcaggccctgccattgtcatctccttcctgatcgctgcgctggcctcagtgctggctggcctgtgctatggcgagtttggtgctcgggtccccaagacgggctcagcttacctctacagctatgtcaccgttggagagctctgggccttcatcaccggctggaacttaatcctctcctacatcatcggtacttcaagcgtagcgagggcctggagcgccaccttcgacgagctgataggcagacccatcggggagttctcacggacacacatgactctgaacgcccccggcgtgctggctgaaaaccccgacatattcgcagtgatcataattctcatcttgacaggacttttaactcttggtgtgaaagagtcggccatggtcaacaaaatattcacttgtattaacgtcctggtcctgggcttcataatggtgtcaggatttgtgaaaggatcggttaaaaactggcagctcacggaggaggattttgggaacacatcaggccgtctctgtttgaacaatgacacaaaagaagggaagcccggtgttggtggattcatgcccttcgggttctctggtgtcctgtcgggggcagcgacttgcttctatgccttcgtgggctttgactgcatcgccaccacaggtgaagaggtgaagaacccacagaaggccatccccgtggggatcgtggcgtccctcttgatctgcttcatcgcctactttggggtgtcggctgccctcacgctcatgatgccctacttctgcctggacaataacagccccctgcccgacgcctttaagcacgtgggctgggaaggtgccaagtacgcagtggccgtgggctccctctgcgctctttccgccagtcttctaggttccatgtttcccatgcctcgggttatctatgccatggctgaggatggactgctatttaaattcttagccaacgtcaatgataggaccaaaacaccaataatcgccacattagcctcgggtgccgttgctgctgtgatggccttcctctttgacctgaaggacttggtggacctcatgtccattggcactctcctggcttactcgttggtggctgcctgtgtgttggtcttacggtaccagccagagcagcctaacctggtataccagatggccagtacttccgacgagttagatccagcagaccaaaatgaattggcaagcaccaatgattcccagctgggctttttaccagaggcagagatgttctctttgaaaaccatactctcacccaaaaacatggagccttccaaaatctctgggctaattgtgaacatttcaaccagcctcatagctgttctcatcatcaccttctgcattgtgaccgtgcttggaagggaggctctcaccaaaggggcgctgtgggcagtctttctgctcgcagggtctgccctcctctgtgccgtggtcacgggcgtcatctggaggcagcccgagagcaagaccaagctctcatttaaggttcccttcctgccagtgctccccatcctgagcatcttcgtgaacgtctatctcatgatgcagctggaccagggcacctgggtccggtttgctgtgtggatgctgataggcttcatcatctactttggctatggcctgtggcacagcgaggaggcgtccctggatgccgaccaagcaaggactcctgacggcaacttggaccagtgcaagtgacgcacagccccgccccccggaggtggcagcagccccgagggacgcccccagaggaccgggaggcaccccaccctccccaccagtgcaacagaaaccacctgcgtccacaccctcactgcagccaaaggtgcaattacttgacctgcagccccagcccaccctcggctctgcagccggttctccgggccctggtcacctccagacagctgcctggccggggccactaggctgcggctggccactgtgtctcctcacttctctgaacaaagcagttcctcccctaccagctcagccccgagctgccgcagcctcaggcagaacggaggtcaccttctctccttatcttgggaaccaggccttcctcccggggactgttctgggattgaaattgtgcatactccaaactttcgcagccatcttcccgctcagccccagacacccagcaatcaagccagatgagtaccacaaaacagtgtgtccccagcagctccccaccccagagccaaatgacagtagtgcacttaaaaaggaaaatcaggcctgttgtccttctccggttgcattcagatgggtcattagggccggaccctgcctgccccttggcttctcagggctttgctctgacaccatgacagctgcccggggctgagggcagctggctccactcaaatgaggaagaagggatcactcccattagggcctgctttgcttatgcatgtgtgtgcacatgcatgtaaaccagggaccttcagctcacggcctccaggcctgggccagttcttgctgctcctgccgtctcccccgactggctgtgtcctgagtaactggaacatgagacagtatctgcaggactggccccatggtggccgagtcagaagtctgtttcctgtgagtcgccaccgttcactcagtcttgccctcccatgctttggagccagtctggtggctcctgtaaggttctcaaggctggtggcagctcagtctggggtcaggacatgtcggggtcatgcgtttctggccctgacataagctgtctggcctctctgtgacatgatgaaattgaaatcaatccacagtccatgaaattgtgacactccaccagattaagttagggcataacattaacttggaaatggccatgtcatcacccctgcggctgtcctatagctgagatgcgtgggtcgcaggggaggtgatttctaggcatattgctgtcccttttgtgtatctgtcatccggatgcttcggaccccacgcctctgcaagtgggagagacccgagcatcctccccacccccatagctccagtgcacgccacccccgtcttgcctgggtcggggcctgcggccagcaccatttcacacacactccttgtagatgggagccagaggaaacctgaacgtgggtggagcgttccactgagtctacttcaggagacagaaggcccatgctgatgggggaggaggagggatgtgggcattttggacaccaggggaaatggaaatgctgctttcaaaacttagtttcctttccatttcttcctagtctggcctttgacacaaatctggtagaaagaagcctgataaattgagggcacttgtaccctccctgtgcccccagaaggttcttggagagaagtgcaagaatttgtgaacacggcggtggagggcgggtggatggccatgggctgagcctccgtatcaggcctgctcaccttgctgggagctttattctgatctcattttgaatgttccagagggagcatcataagagcccagagctccgatttccaaagagtgatattgacatttatggagattggtgttgtaacatattttgataaatactaacttattttgttggggttttggttgtctcttgtcttaggacctggtagttatttgcttgatttttttttccgttattttctacataggcaaagagaattcgagggatagacagtctccaagaaaagtgaagtggtgggagagaattgcttttttcttttttttcttttctctagtttttctttctggctgagatttccgtgcaagacagcacccaatagactatttagagttgacatttgacattttaatgggcgccatggctcattttgtagattgagaaggtgcgtctcccctgctccaagtctcatcatgacagcgtgctgacagctgggagtctgtggccttcctcacgcagaggccttaaagctggacacagaagcacgcctaggctgggcagggatgggacccatgccccctccttagaggacgggcttcctggttaggaaaggacacgtgggggtgccttgcataatagttcactggtcaccgtgcttttatgagtagtgtttttgtgcacttgccaggggttttctctctgtgtgagaggggagtgatttaagcaatggtgtctggagtaagccttacaattttaatagactttttcttatcatatccctcatttctttccctgaaataaaaatacacacaagcaaaaaaaaaatgatagtttcacatctcttagttcccttgcccaaacaagaatattcttagttccactggccaggattttcctacatagtcagaacttacacattactagaggcacacccaccaaggagtattgtgtctacttttatctgtgcaccagccacaaatacccacattggaaagacccatttgtgatgggtaaacatcccttcctgtctcccacaacccctgtgactgccctgcatgtgttcatgacctccgaaggcccaaattcatgaagcagcaaacccagcagatctccacccccctgcctcaggacctctgctgaagagggggatgaagtgggtctccagggaggcagtgggggccttgttggcagctggctcgggagccggcttacaggagggcagctctgcagttgggaggggcaccgtccggaggagaccaggcctctacacaccccccactctacttatcatccctgctcacacacccttgtccaaggctttatgcatcggatttatttttccaaatcaagaggacagtgatagatgcattttccccaggctgtctcagaaaggtcgctaaatgtatactgttgtcagaattgctgagatctccccccacttttggtttttgcagcagtaaaaactctttccactgtgacttattttctctctcaggcagccagccacctggtcccttgtgctgactctagcacagtggccaggatccaatacgagtccaggggtgaccgcaggatggtgggggcagcgggcttctccacctaccccagccaccaaggccctgacgcactgcctcctgcaccttcagcacatccctgtgcacagctggaagggtgcatggcccgctcacctttgttcagatgggtggaaacgctgatgataccagctcctccctgccgtgcccctgccacggagcaggcattgtgaactggctggtgtttgcagtcccacgtggcatggcctccagcccaacccacagtggagactggagacagggcaatgagtctggtggggggcacgtggacatgccccataggggccccacccagacttaacaggcaaggtcctgggcattgcgcgacgcaggactcaatgctaaagcaagcctgcctggctctgtgccagggcccctcttctgattcacacatcccatttttacacagacccttccttcttaataaaggctgacagttctgttggcagccaagaacccacaccatgaagacagggagtgaggggcctttgtgcccaactccagcacagctgcgttctggggtgtgtgagaggcatgttcgtgtctgtgcgctggtggtctcgtgagacagttccgaggacggggaaattgcagggtggtgggggcgtgaggcttatatgtggaactgatgcagagttcgcctgcagacggatctggatatacactatgtataattgttacgtgtaatttaaaatatatctgtttgccatcgtcatgagaagattatatgtaaggctctgaagggagagggagatgtacattctgccaggctcctggggaccttatccgagtcatgaaattgattactgttgatccagtggtgcaagaagctacactccatgtgtcatcacgcttatgactcctaatgtatttttaaggcaaaaaatgtcagccgactccatcttcacccctcgattcctcgagtccagcctttctgtgccagtgcttcactgagccacaacgctctcgccatcgggacccggctgggcctggagtctcggggcacagttgccatggagccctcctgggtcattctacaaatgtgctgagtgccagctgaaaaccccacaggagatggagtaccttggccaagcttaaagagaagattttctcagggtatttattagtgtgtccagcagggtcaggaagcaggatggaaagatgcactcagactgttaatttattaacaaggcaaatgattttgtgtttcttgatgacagactattaagtttgggacttattttcccatttgagaagttataatatatatttaagatgataagtttcctgcttaagttgtgcctttcagcttcaatgagtttaaggagcactaagggtaatgataccaatgagggttggtttattatcaaacctgaatagctgtggtttctccagtaaatattttcttctactgaacatggagccattattaagagttgtgtgttttttattatgtacatttgtatatttttttgcttgtttgatgttctatttttctaatagttttcttttagtttcttaaagttgtgatactagatttagattctgatgctaactgcaaatcaggttggtctctgctgggtctctcctgcttttattttactttaaggacaagtgtagttgtcgtccaccacctttcaaaaaatgtgaaactgccctgcctcccctttttgctgacaacactgtgtacattgaccacttcctaccatactttatgttgtaaaatcaaactcttttgtggtacattatctcatgcttctgcaaattcgaataaattctatggcttccatgtg

SEQ ID NO: 7737 - protein, 629 aa, Homo sapiens; identical to SEQ ID NO: 1121

SEQ ID NO: 7738 - DNA, 2050 bp, Homo sapiens
gatgtggccagtggtgtggatgtgaatattcatccctgtggaggaaaatagtggggtctctgagatttgattctgaaaccttccttgtatccctcctgagacatctttgctgcaagatcgaggctgtcctctggtgagaaggtggtgaggcttcccgtcatattccagctctgaacagcaacatggggtgcaaagtcctgctcaacattgggcagcagatgctgcggcggaaggtggtggactgtagccgggagggcagctctgcagttgggaggggcaccgtccggaggagaccaggcctctacacaccccccactctacttatcatccctgctcacacacccttgtccaaggctttatgcatcggatttatttttccaaatcaagaggacagtgatagatgcattttccccaggctgtctcagaaaggtcgctaaatgtatactgttgtcagaattgctgagatctccccccacttttggtttttgcagcagtaaaaactctttccactgtgacttattttctctctcaggcagccagccacctggtcccttgtgctgactctagcacagtggccaggatccaatacgagtccaggggtgaccgcaggatggtgggggcagcgggcttctccacctaccccagccaccaaggccctgacgcactgcctcctgcaccttcagcacatccctgtgcacagctggaagggtgcatggcccgctcacctttgttcagatgggtggaaacgctgatgataccagctcctccctgccgtgcccctgccacggagcaggcattgtgaactggctggtgtttgcagtcccacgtggcatggcctccagcccaacccacagtggagactggagacagggcaatgagtctggtggggggcacgtggacatgccccataggggccccacccagacttaacaggcaaggtcctgggcattgcgcgacgcaggactcaatgctaaagcaagcctgcctggctctgtgccagggcccctcttctgattcacacatcccatttttacacagacccttccttcttaataaaggctgacagttctgttggcagccaagaacccacaccatgaagacagggagtgaggggcctttgtgcccaactccagcacagctgcgttctggggtgtgtgagaggcatgttcgtgtctgtgcgctggtggtctcgtgagacagttccgaggacggggaaattgcagggtggtgggggcgtgaggcttatatgtggaactgatgcagagttcgcctgcagacggatctggatatacactatgtataattgttacgtgtaatttaaaatatatctgtttgccatcgtcatgagaagattatatgtaaggctctgaagggagagggagatgtacattctgccaggctcctggggaccttatccgagtcatgaaattgattactgttgatccagtggtgcaagaagctacactccatgtgtcatcacgcttatgactcctaatgtatttttaaggcaaaaaatgtcagccgactccatcttcacccctcgattcctcgagtccagcctttctgtgccagtgcttcactgagccacaacgctctcgccatcgggacccggctgggcctggagtctcggggcacagttgccatggagccctcctgggtcattctacaaatgtgctgagtgccagctgaaaaccccacaggagatggagtaccttggccaagcttaaagagaagattttctcagggtatttattagtgtgtccagcagggtcaggaagcaggatggaaagatgcactcagactgttaatttattaacaaggcaaatgattttgtgtttcttgatgacagactattaagtttgggacttattttcccatttgagaagttataatatatatttaagatgataagtttcctgcttaagttgtgcctttcagcttcaatgagtttaaggagcactaagggtaatgataccaatgagggttggtttattatcaaacctgaatagctgtggtttctccagtaaatattttcttctactgaacatgg

SEQ ID NO: 7739 - protein, 84 aa, Homo sapiens; identical to SEQ ID NO: 7735

SEQ ID NO: 7740 - DNA, 938 bp, Homo sapiens
ggagggggccctggcgccgcgtggggccgcggcagggcggcgcgggagtggcgagggcccccgcgccgggaacgctgccatcctctgggaagggccaggaccagggccgggcgggccccggagtgggcgagcggggctggtgcccatgcgactgtcgcctccacggagtccattttggctccctgaaaccgcggcgtggtgcatgatgcaacaccgagattctgaaaccttccttgtatccctcctgagacatctttgctgcaagatcgaggctgtcctctggtgagaaggtggtgaggcttcccgtcatattccagctctgaacagcaacatggggtgcaaagtcctgctcaacattgggcagcagatgctgcggcggaaggtggtggactgtagccgggaggagacgcggctgtctcgctgcctgaacacttttgatctggtggccctcggggtgggcagcacactgggtgctggtgtctacgtcctggctggagctgtggcccgtgagaatgcaggccctgccattgtcatctccttcctgatcgctgcgctggcctcagtgctggctggcctgtgctatggcgagtttggtgctcgggtccccaagacgggctcagcttacctctacagctatgtcaccgttggagagctctgggccttcatcaccggctggaacttaatcctctcctacatcatcggtaggtcccaggggtccggagctcgtgccctctaccacttttctgtttgttcccacctccaaagtgtgggtggatgccccacagggaggtcattcttgttaacacgagaggcacagaattaataggatgtttctgattcatttagaggtatttagtttcttttagtaggtttttaaattactagagtaaatgcatcactgatagagaaaaattgggaaaataaagaaaagcatgaag

SEQ ID NO: 7741 - protein, 46 aa, Homo sapiens
MRLSPPRSPFWLPETAAWCMMQHRDSETFLVSLLRHLCCKIEAVLW

SEQ ID NO: 7742 - DNA, 2147 bp, Homo sapiens
caggctgctggcctccttccccttcacctagctttactggctcctctcgccaaatctggggggtctcttcagcctctgtctccttgctgcccatggcctccctttgctcccctgccgccttctagtgggccgcctggtggtggacttgtcctgtgggatggagaccctccatacatggggttcaaaggtcctggggtattcctggatcttcaggacatctgcctaccctcaggtttcccaggcctcgggtggggaggcatcagatccctggccaacctgctatccaccccagggtttagacctctcttcccgtgagggaacagagtagtagcttcatttgtggcagattatctgccttgtgataaactttagtggcctccctttctgttttgccataatctgcctcctcccccactcccatacccatctacaaagcagccttgaaaataaccacccctgtggttcagtgtgggtcatgatctgtcaatccaggcttagtacatttccaaatggaattaccagaaggatgggcatcaaactgggaaaatgatttggtggcttgctagccgtgttcctttttctcccaaggcattcgttcagatgtgcagtgttggcagacccaggggatgccatttacctggcccactggtcgagatttggtcatcccaggaacttgggcttcagaaaagatgtttctgggctttggaccagattctggctggtctgtggtttgcccctcctgccacacccagtggctttcattgggcttttttcctctagttattgtcaggaacagtggggaatggcaggtattgcatttggtgaacacactggataactggaatcagagccgtgtgactgagggaagaggccttcacagcttcaatgcagaatgggatgattatctgccctgaaacgaaggatgcttctttgaggggagttgggaccaatactgggaacagcaccgctcctggcttctctggctttgcttctctctgaagtaatttagacttcgtgaaccttacatactggctccatctgtatattgggagagcctgtccctctcagcctcacagtagtgaagttaggaagcatggagtccacagtgttctttgaaagaatcaaggcaccaagtccatgcatttacatttctctcttgagatcagtccttttgttagcagcctgcaattctgaccacggcaaccaaaaatttctgaccgtggcaaccaaaaatcaagcgcgaggaaacctgggggtttatttggaggtgggagaggatgtcccttcttctggtaggactatgtctggctacattgtctttccatttttttctgattgtccccttgcccccctcccttttctgggggcacagagggcatggcaattttgtttcctagctttccatattcctactgcagtgctttcttcagaatacttgttcagatcggattcttggctgtgagggcaaccagctgctttcctgtttctttaaaagtggatcccacactgccgtgtcctgcacagtgagttctgcattgtagaaaccatctagcagtggtgactcagggagtggcctctgctcggtatggggcctctgcaacatgaggttatggggcttctacgctgtggggtcaaaggagacatcatgatccctactggcagaaagagcagagccccagagtgggttccacttacggggtcagtgtcttttctgagatattcctcagaaccacatttaaattctttttcatattgtttgcataataattgccttctagtgcctactttataggactgagaggatttaaatgagataatccatgttatggatttaacacagcctctggcacaagtctaaatgttgcatgtaagtgttaactattatactggaaagaaggctcagttccttgatttaggtgtgggagaaaaatatatatatattttgagataggccctggccaacatggtgaaactcatgtctacgaaaaatacaaaagttagcctggtgttggtggcgcatgcctatagttgcagctactcgggaggctgagacacaggaatcacttgaacccgggaggcggaggttgcagggagccgagatcacaccactgcactccagcctgggtaacagagtgagatactgtctc

SEQ ID NO: 7743 - protein, 122 aa, Homo sapiens
MESTVFFERIKAPSPCIYISLLRSVLLLAACNSDHGNQKFLTVATKNQARGNLGVYLEVGEDVPSSGRTMSGYIVFPFFSDCPLAPLPFLGAQRAWQFCFLAFHIPTAVLSSEYLFRSDSWL

SEQ ID NO: 7744 - DNA, 439 bp, Homo sapiens
tgtagaccggagctcgagaactactttttaattagggcttgggattagccattgccatagaatggagtgaataacagagaagagaaactgtgactaatttaagagtgataatcatacaattgcaatttggagaagattgacctgaaagaactgcagaggaagcatgctctttgtgtaagaaatccttaaattccacacaaaatctatatagtcttcctggacatgatgcataaggaaatcctaagactgcatgccgagtttaaccaattaaactggaataaactggaatgaatttgcatttgggaagtaaaacactatccaaggggcataagaacagctgggctcctactgaaggagacacatatggtgttcattgtggggttttgcttcttattccctttgagtaagaataaaatgatcttattttttgctcttcaaa

SEQ ID NO: 7745 - protein, 39 aa, Homo sapiens
MNLHLGSKTLSKGHKNSWAPTEGDTYGVHCGVLLLIPFE

SEQ ID NO: 7746 - DNA, 7119 bp, Homo sapiens
aggtgccgcttcctgtccccttctccgcgctgcctcacggtgcctgcacgggacgccgctcgatccccgagccccctcgccgtccccgacagcccccccggcgccatgcaatcccggcttctactcctcggggcacccggaggccacggcggcccggcctcgcggcgcatgcggctgctcctgcggcaggtggtgcagcgcaggccgggtggcgacaggcagcggccggaggtcagactgttgcacgccggctcgggggccgacacaggttttcagactctctggctcaatctgtagttcagcatctaagatggataatgcagaaggatcttttggggcaagatgtttttctaataggacctcctgggcctcttcgacgctctattgctatgcagtacttggagctgaccaaacgggaggtcgaatacattgccctgtcaagggacaccactgaaactgatctcaaacagcgacgagagatccgtgcaggcacagccttttacattgatcagtgtgcagttcgtgcagccacagaaggcagaactctcattttggaaggtttggaaaaggcagagaggaatgttttgcctgttttgaacaacttgctggaaaacagagagatgcagcttgaagatggacgcttcctgatgtctgctgagcgttacgacaaacttctccgagatcataccaaaaaagagttggattcttggaaaattgtccgagttagtgaaaatttccgagtgattgccttgggcttgccagtgccaaggtattctgggaatccattagacccccctcttcgttctcgatttcaagccagggatatttattatttacccttcaaggaccaacttaagttgttatattcaattggagccaatgtttctgctgagaaagtttctcagctcttgtcctttgccacaactctgtgttcccaagaatcttctactcttggacttccagactttcctttagatagtttagcagctgcggttcaaatcttggattcctttcctatgatgccaatcaaacatgcaatccagtggctttatccatatagtattttactaggtcatgaagggaagatggctgtggaaggtgttttaaagcgctttgaacttcaagattcaggaagctctctacttcctaaagagattgtaaaagtagagaagatgatggaaaaccatgtgtcccaagcttctgtgaccatccggattgcagataaagaggtgaccattaaggtgccagccgggaccaggctattaagtcaaccttgtgcgtcagaccgtttcatacagactttgagccataagcagctacaggctgaaatgatgcagtctcacatggttaaagatatatgtttaattggaggaaagggttgtggaaaaacagtgatcgctaagaactttgccgataccttaggatacaacatagaacctattatgctctatcaggatatgacagcgcgtgatctgctacagcagagatacacccttccaaatggagacactgcctggcggtcctcaccccttgtgaatgctgctctggaaggcaagctggtcctgctggatggcattcaccgggtgaatgcgggcacgcttgctgtattgcaaaggttaatccatgatcgagagctaagcctctatgatggttctaggctgctgagagaagacaggtatatgcgtttaaaggaggagctgcaactgtctgatgaacagctacagaagagatccatttttcctatccatccctccttcagaatcattgccttggcagaaccccctgttattggaagcacagcacaccagtggctgggaccagaattcttaaccatgttctttttccattacatgaaaccacttgtgaaaagtgaagaaatccaagtgattaaggaaaaggtcccaaatgtacctcaggaagctctggataagttattatcatttacacacaaactcagagaaacacaggatccaacggcacaatcattagcggcatcactttctaccagacaactgttgcgaatttctcgtcggctgtcacagtatcctaatgaaaatcttcacagtgctgttactaaagcctgcctttccaggtttttacccagtcttgctaggtcagcattagaaaaaaatctggcagatgctacaatagaaataaatactgatgacaatttggagccagaactgaaggattacaaatgtgaagtaacatctggaactctgaggattggtgctgttagtgcaccgatctataatgcacatgagaaaatgaaagtgcctgatgttcttttctatgacaacattcagcatgtgatagtgatggaagatatgctgaaagactttctccttggagaacacttattattggttggcaaccagggtgtaggaaaaaacaagattgttgacagattccttcacctgctcaacagaccccgagaatatattcagctacacagggataccacagtacaaactcttacgcttcagccttcggttaaagacggacttattgtatatgaagactcacctttggttaaagcagtaaagttgggtcatattctggtagtagatgaggctgacaaagctccaacaaatgtcacgtgtattttaaaaactctagtagaaaatggagaaatgattctagcagatggaagacgcattgttgcaaattctgctaatgtgaatggaagagaaaatgttgtagtgattcatcctgattttaggatgattgttctggcaaatagacctggatttcctttcctaggcaatgatttcttcggtaccttaggtgatatttttagctgccatgcagttgataaccccaaaccccactcggagctcgagatgctcagacagtatggaccaaatgtgcctgagcccatccttcagaagcttgtggctgcctttggagagctgaggagtttggctgaccaagggattattaactatccttattctaccagagaagttgtcaacatagtcaaacatttacagaaatttccgactgaaggtctctccagtgtagttcgaaatgtgtttgactttgattcctacaacaatgacatgagggagatattgattaacactttacacaaatacgggatacctatcggagcaaagcctaccagtgtgcagctggcaaaggagttgactctgccagaacaaacgttcatgggctactggacaattggtcaggcaagaagtgggatgcaaaaactcttgtgtccagtggaaactcatcatatagacataaagggtccagcacttataaatatacaggagtatccaatagaaagacatgaagaaagatccctaaactttactgaagaatgtgcctcatggagaataccattggatgaaattaatataatctgtgacattgctacatcacatgaaaatgagcaaaatactctctatgtagttacatgcaatcccgcttccctgtactttatgaatatgactgggaaaagtggcttctttgtggacttttttgatatcttcccaagaacagccaatggcgtttggcacccttttgtgacagtggcaccgctgggaagtcctctcaaaggtcaagtggttctccatgagcagcagagtaatgttatcctgttgttagatactactggccgggcccttcatcgtctcatcctcccttccgagaagtttacatctaagaaacctttctggtggaacaaagaagaagctgaaacttataaaatgtgtaaagaattttcacacaaaaactggctggtgttctacaaagaaaaagggaacagcctgactgtgctggatgttctagaagggcgaactcacaccatctcacttcccatcaacctcaagacagttttccttgtagcagaggacaaatggcttctggtggagagcaaaacaaatcagaaatatcttttaactaagcctgcacacatcgaatctgagggtagtggggtttgccagttgtatgtgctgaaagaggagccgcccagcacagggtttggagttacacaagaaacagagttcagcatacctcataaaatttccagtgatcaactatcatctgaacatctaagttcagctgtggaacaaaagattgcctctcccaacagaattctctcagatgagaaaaattatgctacaatagttgttggttttccagatctcatgtcacccagtgaagtttattcttggaagagaccatcatctttgcataaacgaagtggcactgatacatcattctatagaggaaagaagaaaagggggactccaaaacaaagcaattgtgtgactcttttagatacgaatcaggtagtgaggattttacccccaggagaagtccctctaaaagatatctacccaaaagatgttactcctccacaaacatctggttatatagaagtcactgatcttcaatcaaagaaactccgatatatccctattcccagatcagaatctctctcgccgtataccacatggctgtcgaccatttcagacacagatgcactgctggctgagtgggacaaaagcggtgttgttactgttgatatgggaggtcacatcaggctttgggaaactggacttgaacgtctgcagcgatcactcatggaatggagaaacatgattggacaagatgacagaaatatgcagataacaatcaacagagacagtggtgaagatgtaagctcccccaaacacgggaaggaggacccagacaacatgcctcacgtgggcggcaacacttgggctggcggaacagggggaagagacacggcaggcctgggtggcaaaggaggcccttaccggctggatgcaggccatacggtgtaccaggtctctcaggctgagaaagatgcagttcccgaagaggtcaagagagctgctagagagatgggccagagagcattccagcagaggctaaaggagatccaaatgagtgaatacgatgctgcaacctatgaaaggttttcaggtgctgttcggcgacaggtgcactccctccgaatcatcctggataatttacaggctaaaggtaaagaaagacaatggctaagacatcaagctactggagaattagatgatgccaagatcattgatgggctgactggagaaaaagccatctacaaacgtcggggtgagctggagccacaacttggcagcccacaacagaaacccaagcgtctgcgcctggtggtagatgtgtctggtagcatgtaccgtttcaacaggatggatggccggcttgagcgcacaatggaggctgtgtgtatggtcatggaagccttcgagaactatgaggagaagttccagtatgacatcgttggacactctggagatggctacaacattggtctggttccaatgaacaaaatccccaaggacaataagcaaagactagaaattctgaagacaatgcatgcccactctcagttctgcatgagtggggaccacacgttagaagggacagaacatgccatcaaggaaattgtcaaagaagaagctgatgagtactttgtcatagtcttgagtgatgcaaatctgtcacgatatggaatacatcctgctaagtttgctcaaatcctcacaagagaccctcaagtaaatgcttttgccatttttattggctctttaggtgatcaagcaaccaggcttcagagaactttaccagctggtcggtctttcgttgccatggataccaaggatatccctcagattttacaacagatcttcacctccaccatgttgtcgagtgtctaagaagtgcccttcatcaccctgatgacaccaggatttgaaataagacaggaataaagagtattctgaaaaaaagaagatatggatgaagtgaacccatgcagtgactggatgattccggcattcctgggtcttcctacacttgctccgtaatgagaattcagagaagcagccagaaggagacttaaacatggaaagatactccactgatgagtttagaagtgattagggcaagctagttgacctgcactttatcaaaggttggggttaaaggaaggtggttttgagaactatgtgtttggtctatttccaaaaacctgagggggagaaaatactttgcttttgccttaacacatcatctggtcacgttagaaaagtgaccccatcaaactgagcctttgatgtcacattctgacacaagatgcaagtctgtgcaaaacccaccaaaatgctcctatccaacaattatttttattttctccctgctctgtattgaccagaaaacaatgattttataatatttaacccaccaaaaagtccctccaacagcaatatcttatgaaagtctggctgttctcaataatttcattttcttggccaaagccaaaaggaatcaaaaaatccttggagtgcttgcctttccacgtgacttttaaaaggctcttaaagagcaaatgtcctcttctccttgctgctagagtgggaggagaaagatgtcttgccttaaaagtttactgtttcttctgttcttctagcatctctcaaaaaattcacagtactccattttggggtccaaactgtaatgctcaaaataataaatgcttacacgaaaattatttattgagaatattcatataaaaattacctaaagcaaagtaaaaaaagtaaaatcaaggtggtatatttgaagtgaatggtgattggaaatttttagctgtaacaaaaagaaagaaaacaactttttttaaagcctcattctcttttctttcaaaatgtaccttattcccacacactcttgggctgacctttattttatcaataagctcaatattactttgtttaaaataagatgcttcagcaaaagtcattctctctttaaccatataatttaaaaactcctcttcacgattgatagcaaaatcagaaacgttagggcaccagtgagttgaaaaaactggtcttaagttggaaaaactattattaataatattatcctatccatccatatctattgaaattgtacaggtccataatttcattttaattaattataggaaagaagaaaagataatacccatttgttctatcacccctctccctatcattaactatcaaataaataaataaaagcaatctgatttccaacgtggtacta

SEQ ID NO: 7747 - protein, 1809 aa, Homo sapiens
MQKDLLGQDVFLIGPPGPLRRSIAMQYLELTKREVEYIALSRDTTETDLKQRREIRAGTAFYIDQCAVRAATEGRTLILEGLEKAERNVLPVLNNLLENREMQLEDGRFLMSAERYDKLLRDHTKKELDSWKIVRVSENFRVIALGLPVPRYSGNPLDPPLRSRFQARDIYYLPFKDQLKLLYSIGANVSAEKVSQLLSFATTLCSQESSTLGLPDFPLDSLAAAVQILDSFPMMPIKHAIQWLYPYSILLGHEGKMAVEGVLKRFELQDSGSSLLPKEIVKVEKMMENHVSQASVTIRIADKEVTIKVPAGTRLLSQPCASDRFIQTLSHKQLQAEMMQSHMVKDICLIGGKGCGKTVIAKNFADTLGYNIEPIMLYQDMTARDLLQQRYTLPNGDTAWRSSPLVNAALEGKLVLLDGIHRVNAGTLAVLQRLIHDRELSLYDGSRLLREDRYMRLKEELQLSDEQLQKRSIFPIHPSFRIIALAEPPVIGSTAHQWLGPEFLTMFFFHYMKPLVKSEEIQVIKEKVPNVPQEALDKLLSFTHKLRETQDPTAQSLAASLSTRQLLRISRRLSQYPNENLHSAVTKACLSRFLPSLARSALEKNLADATIEINTDDNLEPELKDYKCEVTSGTLRIGAVSAPIYNAHEKMKVPDVLFYDNIQHVIVMEDMLKDFLLGEHLLLVGNQGVGKNKIVDRFLHLLNRPREYIQLHRDTTVQTLTLQPSVKDGLIVYEDSPLVKAVKLGHILVVDEADKAPTNVTCILKTLVENGEMILADGRRIVANSANVNGRENVVVIHPDFRMIVLANRPGFPFLGNDFFGTLGDIFSCHAVDNPKPHSELEMLRQYGPNVPEPILQKLVAAFGELRSLADQGIINYPYSTREVVNIVKHLQKFPTEGLSSVVRNVFDFDSYNNDMREILINTLHKYGIPIGAKPTSVQLAKELTLPEQTFMGYWTIGQARSGMQKLLCPVETHHIDIKGPALINIQEYPIERHEERSLNFTEECASWRIPLDEINIICDIATSHENEQNTLYVVTCNPASLYFMNMTGKSGFFVDFFDIFPRTANGVWHPFVTVAPLGSPLKGQVVLHEQQSNVILLLDTTGRALHRLILPSEKFTSKKPFWWNKEEAETYKMCKEFSHKNWLVFYKEKGNSLTVLDVLEGRTHTISLPINLKTVFLVAEDKWLLVESKTNQKYLLTKPAHIESEGSGVCQLYVLKEEPPSTGFGVTQETEFSIPHKISSDQLSSEHLSSAVEQKIASPNRILSDEKNYATIVVGFPDLMSPSEVYSWKRPSSLHKRSGTDTSFYRGKKKRGTPKQSNCVTLLDTNQVVRILPPGEVPLKDIYPKDVTPPQTSGYIEVTDLQSKKLRYIPIPRSESLSPYTTWLSTISDTDALLAEWDKSGVVTVDMGGHIRLWETGLERLQRSLMEWRNMIGQDDRNMQITINRDSGEDVSSPKHGKEDPDNMPHVGGNTWAGGTGGRDTAGLGGKGGPYRLDAGHTVYQVSQAEKDAVPEEVKRAAREMGQRAFQQRLKEIQMSEYDAATYERFSGAVRRQVHSLRIILDNLQAKGKERQWLRHQATGELDDAKIIDGLTGEKAIYKRRGELEPQLGSPQQKPKRLRLVVDVSGSMYRFNRMDGRLERTMEAVCMVMEAFENYEEKFQYDIVGHSGDGYNIGLVPMNKIPKDNKQRLEILKTMHAHSQFCMSGDHTLEGTEHAIKEIVKEEADEYFVIVLSDANLSRYGIHPAKFAQILTRDPQVNAFAIFIGSLGDQATRLQRTLPAGRSFVAMDTKDIPQILQQIFTSTMLSSV

SEQ ID NO: 7748 - DNA, 688 bp, Homo sapiens
tcaggttcctttttttttttttttttgaggaattaacagtctttattgggctcagaccaggagtccgtgggtcttgaggacctctgtgtatttgtcaattttcttctccacgttcttctcggcctgtttccgtagcctcatgagctgtttcttcttccggtagtggatcttggctttctctttcctcttctcctccagggtggctgtcactgcctggtacttccagccaacctcatgagccaggcgccccagataggcaaactttcttgtaggcttcagacgcacgaccttgagggcagcaggaaccaccatccgctttttcttgtcgtagggcggtgggatgccgtcagacaccttgagacggtccaaagcggcctggcctcgcttggtcttgtggggcagcatacctcgcaccgtccgccagaagacgcggctgggagcccggaagtggtagggacctctggaagggctggtgttcatccgcttgcggaggaaagccaggtagttcaacttgtttctgtagaaattgccagaaatgttgatgccttcgcagcatacgaccaccaccttccggcccagcagtacctgtttagccacgatggccgccaggcggcccaggagatggcctctaccatcaagcaccaggacctgcacctccgccatcttcggcagccgcttgggaaagctt

SEQ ID NO: 7749 - protein, 150 aa, Homo sapiens
MSQAPQIGKLSCRLQTHDLEGSRNHHPLFLVVGRWDAVRHLETVQSGLASLGLVGQHTSHRPPEDAAGSPEVVGTSGRAGVHPLAEESQVVQLVSVEIARNVDAFAAYDHHLPAQQYLFSHDGRQAAQEMASTIKHQDLHLRHLRQPLGK

SEQ ID NO: 7750 - DNA, 590 bp, Homo sapiens
ggctgccgaagatggcggaggtgcaggtcctggtgcttgatggtagaggccatctcctgggccgcctggcggccatcgtggctaaacagttgaactacctggctttcctccgcaagcggatgaacaccagcccttccagaggtccctaccacttccgggctcccagccgcgtcttctggcggacggtgcgaggtatgctgccccacaagaccaagcgaggccaggccgctttggaccgtctcaaggtgtctgacggcatcccaccgccctacgacaagaaaaagcggatggtggttcctgctgccctcaaggtcgtgcgtctgaagcctacaagaaagtttgcctatctggggcgcctggctcatgaggttggctggaagtaccaggcagtgacagccaccctggaggagaagaggaaagagaaagccaagatccactaccggaagaagaaacagctcatgaggctacggaaacaggccgagaagaacgtggagaagaaaattgacaaatacacagaggtcctcaagacccacggactcctggtctgagcccaataaagactgttaattcctcaaaaaaaaaaaaaaaaa

SEQ ID NO: 7751 - protein, 178 aa, Homo sapiens
MAEVQVLVLDGRGHLLGRLAAIVAKQLNYLAFLRKRMNTSPSRGPYHFRAPSRVFWRTVRGMLPHKTKRGQAALDRLKVSDGIPPPYDKKKRMVVPAALKVVRLKPTRKFAYLGRLAHEVGWKYQAVTATLEEKRKEKAKIHYRKKKQLMRLRKQAEKNVEKKIDKYTEVLKTHGLLV

SEQ ID NO: 7752 - DNA, 605 bp, Homo sapiens
ccaagcggctgccgaagatggcggaggtgcaggtcctggtgcttgatggtagaggccatctcctgggccgcctggcggccatcgtggctaaacaggtactgctgggccggaaggtggtggtcgtatgctgcgaaggcatcaacatttctggcaatttctacagaaacaagttgaactacctggctttcctccgcaagcggatgaacaccagcccttccagaggtccctaccacttccgggctcccagccgcgtcttctggcggacggtgcgaggtatgctgccccacaagaccaagcgaggccaggccgctttggaccgtctcaaggtcgtgcgtctgaagcctacaagaaagtttgcctatctggggcgcctggctcatgaggttggctggaagtaccaggcagtgacagccaccctggaggagaagaggaaagagaaagccaagatccactaccggaagaagaaacagctcatgaggctacggaaacaggccgagaagaacgtggagaagaaaattgacaaatacacagaggtcctcaagacccacggactcctggtctgagcccaataaagactgttaattcctcaaaaaaaaaaaaaaaaa

SEQ ID NO: 7753 - protein, 181 aa, Homo sapiens
MAEVQVLVLDGRGHLLGRLAAIVAKQVLLGRKVVVVCCEGINISGNFYRNKLNYLAFLRKRMNTSPSRGPYHFRAPSRVFWRTVRGMLPHKTKRGQAALDRLKVVRLKPTRKFAYLGRLAHEVGWKYQAVTATLEEKRKEKAKIHYRKKKQLMRLRKQAEKNVEKKIDKYTEVLKTHGLLV

SEQ ID NO: 7754 - DNA, 1295 bp, Homo sapiens
tttttttttttttttgaggaattaacagtctttattgggctcagaccaggagtccgtgggtcttgaggacctctgtgtatttgtcaattttcttctccacgttcttctcggcctgtttccgtagcctcatgagctgtttcttcttccggtagtggatcttggctttctctttcctcttctcctccagggtggctgtcactgcctggtacttccagccaacctcatgagccaggcgccccagataggcaaactttcttgtaggcttcagacgcacgaccttgagggcagcaggaaccaccatccgctttttcttgtcgtagggcggtgggatgccgtcagacaccttgagacggtccaaagcggcctggcctcgcttggtcttgtggggcagcatacctcgcaccgtccgccagaagacgcggctgggagcccggaagtggtagggacctctggaagggctggtgttcatccgcttgcggaggaaagccaggtagttcaacttgtttctgtagaaattgccagaaatgttgatgccttcgcagcatacgaccaccaccttccggcccagcagttcctatttagtcaaccatcttctgctacccttgctcctgctgacaaccactgatatgatttttttactcgatatttttttactcttgtagaggttatataattggaatgatacattatgtagccttttatgcctggcattcttcgcttagcataatgcactttacaaacctatgttttctttaattttcaatcaattcatttattcagtgaatatttactgagcatctactatgtactaggtatgtagcacacttaccaggttctaggctttaggaatacaagagtaaacaaagcagacaaaaaatacctatcttcatggagagagaagatgtaggaatgggcaacaaataattattataagtttgttagaaggtaataaatgaaaaaatagagaaaaaactagttagcatttgtggggtgggatgtgcaattttaaatgagatggtcaaattaggtcaaattgagaaactgaacttagaggaaagattgaagagaagaagaaataaaccataactgtatgggtagcttattctctgctaccatttatattttgcggctattgtgaatggttgattttcttatattttctaattctttgttaatagtatagaaaggtgcaatggatttttgcatttatctttgtcttatatttgctttgttttgatttttttaatgtacacaaccagcttatgcaaaccaaaattgttttttaatcattccaa

SEQ ID NO: 7755 - protein, 133 aa, Homo sapiens
MSQAPQIGKLSCRLQTHDLEGSRNHHPLFLVVGRWDAVRHLETVQSGLASLGLVGQHTSHRPPEDAAGSPEVVGTSGRAGVHPLAEESQVVQLVSVEIARNVDAFAAYDHHLPAQQFLFSQPSSATLAPADNH

SEQ ID NO: 7756 - DNA, 573 bp, Homo sapiens
ggctgccgaagatggcggaggtgcaggtcctggtgcttgatggtagaggccatctcctgggccgcctggcggccatcgtggctaaacagttgaactacctggctttcctccgcaagcggatgaacaccagcccttccagaggtccctaccacttccgggctcccagccgcgtcttctggcggacggtgcgaggtatgctgccccacaagaccaagcgaggccaggccgctttggaccgtctcaaggtgtctgacggcatcccaccgccctacgacaagaaaaagcggatggtggttcctgctgccctcaaggtcgtgcgtctgaagcctacaagaaagtttgcctatctggggcgcctggctcatgaggttggctggaagtaccaggcagtgacagccaccctggaggagaagaggaaagagaaagccaagatccactaccggaagaagaaacagctcatgaggctacggaaacaggccgagaagaacgtggagaagaaaattgacaaatacacagaggtcctcaagacccacggactcctggtctgagcccaataaagactgttaattcctc

SEQ ID NO: 7757 - protein, 178 aa, Homo sapiens; identical to SEQ ID NO: 7751

SEQ ID NO: 7758 - DNA, 588 bp, Homo sapiens
ccaagcggctgccgaagatggcggaggtgcaggtcctggtgcttgatggtagaggccatctcctgggccgcctggcggccatcgtggctaaacaggtactgctgggccggaaggtggtggtcgtatgctgcgaaggcatcaacatttctggcaatttctacagaaacaagttgaactacctggctttcctccgcaagcggatgaacaccagcccttccagaggtccctaccacttccgggctcccagccgcgtcttctggcggacggtgcgaggtatgctgccccacaagaccaagcgaggccaggccgctttggaccgtctcaaggtcgtgcgtctgaagcctacaagaaagtttgcctatctggggcgcctggctcatgaggttggctggaagtaccaggcagtgacagccaccctggaggagaagaggaaagagaaagccaagatccactaccggaagaagaaacagctcatgaggctacggaaacaggccgagaagaacgtggagaagaaaattgacaaatacacagaggtcctcaagacccacggactcctggtctgagcccaataaagactgttaattcctc

SEQ ID NO: 7759 - protein, 181 aa, Homo sapiens; identical to SEQ ID NO: 7753

SEQ ID NO: 7760 - DNA, 8636 bp, Homo sapiens
aatgtgcacgtccaaccatgagttgcctgttgatttcccttcgcctgggaagaaaagcaaactggaattaaactgcttggagagaagtccttgctcgcggggagaggatgggatggtagcggaggctactggcttggcgtagagaaatcagagagtgtgttctacgaacagaggcgaagatttatctctctacttcccccctcccaatagactcacacagcaaatgctgatcaggctgtggctttcttgatttcgggggagagccttttccgaggaagagagggaggagcctggtggggagaggaaactacaaatcgggacactagttctttacgctgcatttcctcccctccctttggctgctcggaaaggagagagaggaaaaaaaaaatacgcttggctggtagatgcagtccgccgccgccgctgcctcagccagcaatgcaagattagatctctaaatgcagcaaaacactgcctgaaaacagaccggcccgcgcagcaagcagacatttcacggtgcgctggggaagcttcaaaatatatctgtgactctgtcttcgttgctcttcatccccatcaatttcatcacgggaggcgagcagcaagtaagaatttcactttcggatctgcctagagacacacctccctgctccctcccccactcgatgtgaagagtattccggagtctccgggcgggagtagatttgcagcaccctagcgggagcgaggaaaacctactgattctttagctcattatcatctctcccagacgagatttccttcttatcgcctgcctcatcgctcaagtttgagcctcccgaagtccgggcgggagagacgaaacccctggctcacccccagccgcaggaagccaccgccttgctccaagcccctgcagctctgctgcaccgcagcttctcacccagtgcggatgctgtagatcaacaggttcagggaacttgagcagaataaggagagaccaccgggtgccgcagctcgggtgcagagggaaaaaaggacccatagacttgtggctcgcgtcgcgcgcgcacgctgcgccagggccccaggctggcgcgcactccctctctggctcctccagtccgattgctcctgcccccaccttacaggtctgggatgtacctttccatctgttgctgctttcttctatgggcccctgccctcactctcaagaacctcaactactccgtgccggaggagcaaggggccggcacggtgatcgggaacatcggcagggatgctcgactgcagcctgggcttccgcctgcagagcgcggcggcggagggcgcagcaagtcgggtagctaccgggtgctggagaactccgcaccgcacctgctggacgtggacgcagacagcgggctcctctacaccaagcagcgcatcgaccgcgagtccctgtgccgccacaatgccaagtgccagctgtccctcgaggtgttcgccaacgacaaggagatctgcatgatcaaggtagagatccaggacatcaacgacaacgcgccctccttctcctcggaccagatcgaaatggacatctcggagaacgctgctccgggcacccgcttccccctcaccagcgcacatgaccccgacgccggcgagaatgggctccgcacctacctgctcacgcgcgacgatcacggcctctttggactggacgttaagtcccgcggcgacggcaccaagttcccagaactggtcatccagaaggctctggaccgcgagcaacagaatcaccatacgctcgtgctgactgccctggacggtggcgagcctccacgttccgccaccgtacagatcaacgtgaaggtgattgactccaacgacaacagcccggtcttcgaggcgccatcctacttggtggaactgcccgagaacgctccgctgggtacagtggtcatcgatctgaacgccaccgacgccgatgaaggtcccaatggtgaagtgctctactctttcagcagctacgtgcctgaccgcgtgcgggagctcttctccatcgaccccaagaccggcctaatccgtgtgaagggcaatctggactatgaggaaaacgggatgctggagattgacgtgcaggcccgagacctggggcctaaccctatcccagcccactgcaaagtcacggtcaagctcatcgaccgcaacgacaatgcgccgtccatcggtttcgtctccgtgcgccagggggcgctgagcgaggccgcccctcccggcaccgtcatcgccctggtgcgggtcactgaccgggactctggcaagaacggacagctgcagtgtcgggtcctaggcggaggagggacgggcggcggcgggggcctgggcgggcccgggggttccgtccccttcaagcttgaggagaactacgacaacttctacacggtggtgactgaccgcccgctggaccgcgagacacaagacgagtacaacgtgaccatcgtggcgcgggacgggggctctcctcccctcaactccaccaagtcgttcgcgatcaagattctagacgagaacgacaacccgcctcggttcaccaaagggctctacgtgcttcaggtgcacgagaacaacatcccgggagagtacctgggctctgtgctcgcccaggatcccgacctgggccagaacggcaccgtatcctactctatcctgccctcgcacatcggcgacgtgtctatctacacctatgtgtctgtgaatcccacgaacggggccatctacgccctgcgctcctttaacttcgagcagaccaaggcttttgagttcaaggtgcttgctaaggactcgggggcgcccgcgcacttggagagcaacgccacggtgagggtgacagtgctagacgtgaatgacaacgcgccagtgatcgtgctccccacgctgcagaacgacaccgcggagctgcaggtgccgcgcaacgctggcctgggctatctggtgagcactgtgcgcgccctagacagcgacttcggcgagagcgggcgtctcacctacgagatcgtggacggcaacgacgaccacctgtttgagatcgacccgtccagcggcgagatccgcacgctgcaccctttctgggaggacgtgacgcccgtggtggagctggtggtgaaggtgaccgaccacggcaagcctaccctgtccgcagtggccaagctcatcatccgctcggtgagcggatcccttcccgagggggtaccacgggtgaatggcgagcagcaccactgggacatgtcgctgccgctcatcgtgactctgagcactatctccatcatcctcctagcggccatgatcaccatcgccgtcaagtgcaagcgcgagaacaaggagatccgcacttacaactgccgcatcgccgagtacagccacccgcagctgggtgggggcaagggcaagaagaagaagatcaacaaaaatgatatcatgctggtgcagagcgaagtggaggagaggaacgccatgaacgtcatgaacgtggtgagcagcccctccctggccacctcccccatgtacttcgactaccagacccgcctgcccctcagctcgccccggtcggaggtgatgtatctcaaaccggcctccaacaacctgactgtccctcaggggcacgcgggctgccacaccagcttcaccggacaagggactaatgcaagcgagacccctgccactcggatgtccataattcagacagacaattttcccgcagagcccaattacatgggcagcaggcagcagtttgttcaaagtagctccacgtttaaggacccagaaagagccagcctgagagacagtgggcacggggacagtgatcaggctgacagtgaccaagacactaacaaaggctcctgctgtgacatgtctgttagggaggcactcaagatgaaaactacttcaactaaaagccaaccacttgaacaagaaccagaagagtgtgttaattgcacagatgaatgccgagtgcttggtcattctgacaggtgctggatgccacagttccctgcagccaatcaggctgaaaatgcagattaccgcacaaatctctttgtacctacagttgaagctaatgttgagactgagacttacgaaactgtgaatcccactgggaaaaagactttttgtacatttggaaaagacaagcgagagcacactattctcattgccaacgttaaaccttatttaaaagccaaacgtgccctgagccctctcctccaagaggtcccctcagcatcaagcagcccaaccaaggcgtgcatcgagccttgcacctcaacaaaaggctccctggatggctgtgaagcaaaaccaggagccctggctgaagcaagcagtcagtacttgcccactgacagtcaatatctgtcacctagtaagcaaccaagagaccctcccttcatggcttccgatcagatggcaagggtctttgcagatgtgcattccagagccagccgggattccagtgagatgggtgctgttcttgagcagcttgaccaccccaacagggatctgggcagagagtctgtggatgcagaggaagttgtgagagaaattgataagcttttgcaagactgccggggaaacgaccctgtggctgtgagaaagtgaaaaaagaaaaaaaaaaaggcattggcattttcttgtctcttctgttgatttaaaaatgatccctcctggtgataacccattttacagggatgaagaaagaccaatgctgctttaaggcttttagtgaacatctgaagtgcccacaagtatgttctttccactgctgatttctttttcagagataacaatggtttcgttttgaccaaacttgtattaggacagaattaatgatgcttaaagagaaaagaaaaaaagagagaagaaaaaggagagatgaaaaaggaggatgaggagaagaattaccttttgacaatctgttaggaaggtatgcagtgtgagaactgaagtatttctgatcactctcagactgtcctccgtgatttatgctgacttaactgtttacctataaaccccatacaaagcagggtcataatttgtgatctgtggtggatttctagcagtcatcacaggcttctactgaaagtcctgaaaagaccttgcagtagtccaagctacaccaaacattaacacatatttgtggtaaacatttctgtataaagttacctgacacacatataaacacaaggaacattccatatcattagtcgaaaacaaaaacaaaaaaaaaacctttggtcatttgtaagacatctcatgtcatataaaagttaaatgtaaaaagatacagtccattttgtcctgcacacacgtagactaattcacgtcattaaagaagaagaaaacttaaagatttaaaatgcctatttagcattttagtgtccaacaaagatttaaacaatgatgaatatgttttaaatttgacatagaaaagttctaaaaaatagttaccattgagtggtaagattcagagaaaattaacttgattaatatgttttattcatttgtggacactaaaatagctcaggaaagtgaaaatgtcttagacatacgcaagtcacatgaccatttaaatgtgcaaatgtaagaagattcaatgtgtttacatcaaatgacatattttattgatttattgcagattcagtgcatatgagccaaattgttgagtgtgtaagagctatattgtgtattttattaaattaatatatagttgtgttgcaaaaatatttgggcttatattgtaaatggcaagtgttgccttggtagctgtcgaactctatgagttttgttttttcctgcttccttttccccatggagtgtgggaagcagtgcctcagagcaaagtctcttgtttaatgtatagtctaccaagtactacagtacataatctgttcaaaatgtgtttgagtgagctgatggagctaactgaaaggtcaaaaattacatccatcagtcatggttatgtgcaagtccttgtagaagcttttattaaagtcatgctaaatcacaagaattgacatttgtaccaatatctgaaacttcttcatgttttttcaataacatacagcttctgcctgtgtagatattatgccatcagttggttctcaaaagtattttaagtgcttcagatgtgtgttcccattatattttgaaaacatgaaaaatgctttaatgcatgtatgtaccagcagtggttacttgcattgtgtagtgtttttcaagaggtctgggtcttaacaaaatgttttcctttatctcagtgctcttctgcctctttttgttggtgtcctttgagaacaatacaccttctattccttcatttggttacacctttccttgtgacatttagcgagtttcaaacttacttccatatgaggctaagaaacctcaaatttcaggaattgggaaaaataaaattagcacttgcagaagtagcagcagatgggaaaatgccttgattgacattttctttcagcatttaaaatttttggcattttacagcttcatgacaaacagttttgtgcccataccttagaaaatgtggtgctgagttaaataaaggctgtttgagcactggagcagaaaaatgcattatttgcaaactggtggataattttgtgccttctcttctggccaccaagccagtgtagaaacagcaaaaatgtcataaaaattcttatatttaaaacaaaaacaaaagcaaaaacaaacattgaattaaattaagttttgtaattttaaactttaaaaacttctactgaaaatatttccgccaaatgccatcaatattttagactgtacctcgtttgcaaaactgctttgagagggaagagtggacaactcccatcagccttattctcttgagaactatattttggttcctagtaacagcctttccaaagctctactcttggtttttattactcataaatgtttaaattagaaaagaagggaccttgtacatgtgaaacctaattgactctctatattttggacaatttatgtatctgaaatgtgttgtctctgttatatgatgttatttttgccaggagactacaggttgatttagcttgatagctgaaatttgatggaaaactgatttccatttagtcttaccaagtgttgcttctctcttactagacagatatccacttagtaaaatctaaagcagtatgtaaatgaaaccagcaaagagagtagggtttattttataaacattcttaatgctaagtaaccagttgttcaatttattatatgtgtctgaggacattaaaacaccataaggttgtaataattggttgtgccaatgtgtgagggatttacctttaggctctctgtcaccagtgatttactagtgttagctgtttaacacattatctgtatttagtagtgattatttatttacaagttggtggtaattcagcagtcaggactctaagcttttatagttgaattgaggaaatctcgcttttattcatttagctggcaactgcctttattgcagacctctggtgcttggctttcaaggaagcctatgagatgccaaaatcacacctttagagagcaccttgctctaataggtgatgcatgagcaaacagtgagatttgaaggggttttaacataatttagaatgtgaaaaaaatatcaattcatatctttcaagtactaacccctcaaaaaagcccacacatacaaaatatgtgatgtgataccactttgtcttttaggtctttaagtaactgaagttaagcacagaaaaaaaaatcacttcatggaaatttcagtaagaaacccaaacttctaaaaattgcttgcagatgagctaaaaaaaaaaaaaaaaaaaaaaagcaacaaaataaccttttcatcagagttaaaagtagtgagaatctgttagttatacgtataccaaagtaaacattaaagagacatatcatgcaatttcaaagaattctttcatgctatttcttaacctgacatttctaactttattgcaggcaatatacaaagattggctcactactccataggttaattgaattcctggttgagaaactaacttgttttgttttccaaaattagctgaaatcttgtaaaacatgacttccctttaaaggatctagatattgttcaatttaaaatatggcaccataaaaaagtcatgtagtaatagagcatatgcttttttagaaccaggttaaaagctgtttgttatctaatagagtaaaagttactgaggtcaacagatagacaggtctggcataatatatgcccagtcataatagtctaattatattcttttgacaacagacagcattcatcagagcactaattcgaatgagagttttggctatcaagatgtgttgattctaaatattattgaatgagacctgattaaagtctgactttcctggccccagtgttttgcaggttggctatttccattatcagcccatcactccataaagttcttagctgcaccaagtgattggtgaacaaggacaacaacaaaagcagcatacattgtatggatttatctcaacgctattgtttaatggctgtgtttaatgtgatctatctggaaaatgaggactccgaataaaaagctattactaat

SEQ ID NO: 7761 - protein, 1159 aa, Homo sapiens; identical to SEQ ID NO: 1129

SEQ ID NO: 7762 - DNA, 5963 bp, Homo sapiens
tttaacttcgagcagaccaaggcttttgagttcaaggtgcttgctaaggactcgggggcgcccgcgcacttggagagcaacgccacggtgagggtgacagtgctagacgtgaatgacaacgcgccagtgatcgtgctccccacgctgcagaacgacaccgcggagctgcaggtgccgcgcaacgctggcctgggctatctggtgagcactgtgcgcgccctagacagcgacttcggcgagagcgggcgtctcacctacgagatcgtggacggcaacgacgaccacctgtttgagatcgacccgtccagcggcgagatccgcacgctgcaccctttctgggaggacgtgacgcccgtggtggagctggtggtgaaggtgaccgaccacggcaagcctaccctgtccgcagtggccaagctcatcatccgctcggtgagcggatcccttcccgagggggtaccacgggtgaatggcgagcagcaccactgggacatgtcgctgccgctcatcgtgactctgagcactatctccatcatcctcctagcggccatgatcaccatcgccgtcaagtgcaagcgcgagaacaaggagatccgcacttacaactgccgcatcgccgagtacagccacccgcagctgggtgggggcaagggcaagaagaagaagatcaacaaaaatgatatcatgctggtgcagagcgaagtggaggagaggaacgccatgaacgtcatgaacgtggtgagcagcccctccctggccacctcccccatgtacttcgactaccagacccgcctgcccctcagctcgccccggtcggaggtgatgtatctcaaaccggcctccaacaacctgactgtccctcaggggcacgcgggctgccacaccagcttcaccggacaagggactaatgcaagcgagacccctgccactcggatgtccataattcagacagacaattttcccgcagagcccaattacatgggcagcaggcagcagtttgttcaaagtagctccacgtttaaggacccagaaagagccagcctgagagacagtgggcacggggacagtgatcaggctgacagtgaccaagacactaacaaaggctcctgctgtgacatgtctgttagggaggcactcaagatgaaaactacttcaactaaaagccaaccacttgaacaagcattcccgactttgctttcctttgctatcctcaccctacacaccatcacaagtagacttcagtctgttgatctgcttcctccagaaccagaagagtgtgttaattgcacagatgaatgccgagtgcttggtcattctgacaggtgctggatgccacagttccctgcagccaatcaggctgaaaatgcagattaccgcacaaatctctttgtacctacagttgaagctaatgttgagactgagacttacgaaactgtgaatcccactgggaaaaagactttttgtacatttggaaaagacaagcgagagcacactattctcattgccaacgttaaaccttatttaaaagccaaacgtgccctgagccctctcctccaagaggtcccctcagcatcaagcagcccaaccaaggcgtgcatcgagccttgcacctcaacaaaaggctccctggatggctgtgaagcaaaaccaggagccctggctgaagcaagcagtcagtacttgcccactgacagtcaatatctgtcacctagtaagcaaccaagagaccctcccttcatggcttccgatcagatggcaagggtctttgcagatgtgcattccagagccagccgggattccagtgagatgggtgctgttcttgagcagcttgaccaccccaacagggatctgggcagagagtctgtggatgcagaggaagttgtgagagaaattgataagcttttgcaagactgccggggaaacgaccctgtggctgtgagaaagtgaaaaaagaaaaaaaaaaaggcattggcattttcttgtctcttctgttgatttaaaaatgatccctcctggtgataacccattttacagggatgaagaaagaccaatgctgctttaaggcttttagtgaacatctgaagtgcccacaagtatgttctttccactgctgatttctttttcagagataacaatggtttcgttttgaccaaacttgtattaggacagaattaatgatgcttaaagagaaaagaaaaaaagagagaagaaaaaggagagatgaaaaaggaggatgaggagaagaattaccttttgacaatctgttaggaaggtatgcagtgtgagaactgaagtatttctgatcactctcagactgtcctccgtgatttatgctgacttaactgtttacctataaaccccatacaaagcagggtcataatttgtgatctgtggtggatttctagcagtcatcacaggcttctactgaaagtcctgaaaagaccttgcagtagtccaagctacaccaaacattaacacatatttgtggtaaacatttctgtataaagttacctgacacacatataaacacaaggaacattccatatcattagtcgaaaacaaaaacaaaaaaaaaacctttggtcatttgtaagacatctcatgtcatataaaagttaaatgtaaaaagatacagtccattttgtcctgcacacacgtagactaattcacgtcattaaagaagaagaaaacttaaagatttaaaatgcctatttagcattttagtgtccaacaaagatttaaacaatgatgaatatgttttaaatttgacatagaaaagttctaaaaaatagttaccattgagtggtaagattcagagaaaattaacttgattaatatgttttattcatttgtggacactaaaatagctcaggaaagtgaaaatgtcttagacatacgcaagtcacatgaccatttaaatgtgcaaatgtaagaagattcaatgtgtttacatcaaatgacatattttattgatttattgcagattcagtgcatatgagccaaattgttgagtgtgtaagagctatattgtgtattttattaaattaatatatagttgtgttgcaaaaatatttgggcttatattgtaaatggcaagtgttgccttggtagctgtcgaactctatgagttttgttttttcctgcttccttttccccatggagtgtgggaagcagtgcctcagagcaaagtctcttgtttaatgtatagtctaccaagtactacagtacataatctgttcaaaatgtgtttgagtgagctgatggagctaactgaaaggtcaaaaattacatccatcagtcatggttatgtgcaagtccttgtagaagcttttattaaagtcatgctaaatcacaagaattgacatttgtaccaatatctgaaacttcttcatgttttttcaataacatacagcttctgcctgtgtagatattatgccatcagttggttctcaaaagtattttaagtgcttcagatgtgtgttcccattatattttgaaaacatgaaaaatgctttaatgcatgtatgtaccagcagtggttacttgcattgtgtagtgtttttcaagaggtctgggtcttaacaaaatgttttcctttatctcagtgctcttctgcctctttttgttggtgtcctttgagaacaatacaccttctattccttcatttggttacacctttccttgtgacatttagcgagtttcaaacttacttccatatgaggctaagaaacctcaaatttcaggaattgggaaaaataaaattagcacttgcagaagtagcagcagatgggaaaatgccttgattgacattttctttcagcatttaaaatttttggcattttacagcttcatgacaaacagttttgtgcccataccttagaaaatgtggtgctgagttaaataaaggctgtttgagcactggagcagaaaaatgcattatttgcaaactggtggataattttgtgccttctcttctggccaccaagccagtgtagaaacagcaaaaatgtcataaaaattcttatatttaaaacaaaaacaaaagcaaaaacaaacattgaattaaattaagttttgtaattttaaactttaaaaacttctactgaaaatatttccgccaaatgccatcaatattttagactgtacctcgtttgcaaaactgctttgagagggaagagtggacaactcccatcagccttattctcttgagaactatattttggttcctagtaacagcctttccaaagctctactcttggtttttattactcataaatgtttaaattagaaaagaagggaccttgtacatgtgaaacctaattgactctctatattttggacaatttatgtatctgaaatgtgttgtctctgttatatgatgttatttttgccaggagactacaggttgatttagcttgatagctgaaatttgatggaaaactgatttccatttagtcttaccaagtgttgcttctctcttactagacagatatccacttagtaaaatctaaagcagtatgtaaatgaaaccagcaaagagagtagggtttattttataaacattcttaatgctaagtaaccagttgttcaatttattatatgtgtctgaggacattaaaacaccataaggttgtaataattggttgtgccaatgtgtgagggatttacctttaggctctctgtcaccagtgatttactagtgttagctgtttaacacattatctgtatttagtagtgattatttatttacaagttggtggtaattcagcagtcaggactctaagcttttatagttgaattgaggaaatctcgcttttattcatttagctggcaactgcctttattgcagacctctggtgcttggctttcaaggaagcctatgagatgccaaaatcacacctttagagagcaccttgctctaataggtgatgcatgagcaaacagtgagatttgaaggggttttaacataatttagaatgtgaaaaaaatatcaattcatatctttcaagtactaacccctcaaaaaagcccacacatacaaaatatgtgatgtgataccactttgtcttttaggtctttaagtaactgaagttaagcacagaaaaaaaaatcacttcatggaaatttcagtaagaaacccaaacttctaaaaattgcttgcagatgagctaaaaaaaaaaaaaaaaaaaaaaagcaacaaaataaccttttcatcagagttaaaagtagtgagaatctgttagttatacgtataccaaagtaaacattaaagagacatatcatgcaatttcaaagaattctttcatgctatttcttaacctgacatttctaactttattgcaggcaatatacaaagattggctcactactccataggttaattgaattcctggttgagaaactaacttgttttgttttccaaaattagctgaaatcttgtaaaacatgacttccctttaaaggatctagatattgttcaatttaaaatatggcaccataaaaaagtcatgtagtaatagagcatatgcttttttagaaccaggttaaaagctgtttgttatctaatagagtaaaagttactgaggtcaacagatagacaggtctggcataatatatgcccagtcataatagtctaattatattcttttgacaacagacagcattcatcagagcactaattcgaatgagagttttggctatcaagatgtgttgattctaaatattattgaatgagacctgattaaagtctgactttcctggccccagtgttttgcaggttggctatttccattatcagcccatcactccataaagttcttagctgcaccaagtgattggtgaacaaggacaacaacaaaagcagcatacattgtatggatttatctcaacgctattgtttaatggctgtgtttaatgtgatctatctggaaaatgaggactccgaataaaaagctattactaat

SEQ ID NO: 7763 - protein, 484 aa, Homo sapiens
MSLPLIVTLSTISIILLAAMITIAVKCKRENKEIRTYNCRIAEYSHPQLGGGKGKKKKINKNDIMLVQSEVEERNAMNVMNVVSSPSLATSPMYFDYQTRLPLSSPRSEVMYLKPASNNLTVPQGHAGCHTSFTGQGTNASETPATRMSIIQTDNFPAEPNYMGSRQQFVQSSSTFKDPERASLRDSGHGDSDQADSDQDTNKGSCCDMSVREALKMKTTSTKSQPLEQAFPTLLSFAILTLHTITSRLQSVDLLPPEPEECVNCTDECRVLGHSDRCWMPQFPAANQAENADYRTNLFVPTVEANVETETYETVNPTGKKTFCTFGKDKREHTILIANVKPYLKAKRALSPLLQEVPSASSSPTKACIEPCTSTKGSLDGCEAKPGALAEASSQYLPTDSQYLSPSKQPRDPPFMASDQMARVFADVHSRASRDSSEMGAVLEQLDHPNRDLGRESVDAEEVVREIDKLLQDCRGNDPVAVRK

SEQ ID NO: 7764 - DNA, 3029 bp, Homo sapiens
acccaccctgcgccccagccctctacagcgcgggcgaagggcatcggcggggaagcggctgtggttgccagatctggcagtacagagccaaggtggcagggccgcgctaggacacggatggtcccagggggagggcaacaggaaaaacaagcactgacacaactgccccatttccccatgtcccctaaaagcaggttttcttgggctgaccagggcattttcactgtggtgtccgactggggcaactcgatctgcccgcggggactcaaaaaagcttgagctgcattttttctttgcgtccgggcggaccaaaaggcgaggtgaagggaacgagtgtttataagaaagtaaacttttgtgcagaatgggctggggacacctctgagttttgctgcccgcaacgtgacctttttagcgcggtcctggacgcgttccctcgcagccaacccgtcagtctcctcaggccttatcctgccctctctgaggtggccgcctgtgggcgctgcaaacgccacacttttgctctacgaagaacctcctcgcgactttccaaggtatctttcagatgaaggcattgaagcttgcacaagctctccagacaaagtcaatgtaaatgacatcatcctgattgctctcaatacagatctgagaacaattggcaagaaattcctccccagtgacatcaatagtggaaaggtagaaaagctcgaaggtccatgtgttttgcaaattcaaaaaattcgcaatgttgctgcaccaaaggataatgaagaatctcaggctgcaccaaggatgctgcgattacagatgactgatggtcatataagttgcacagcagtagaatttagttatatgtcaaaaataagcctgaacacaccacctggaactaaagttaagctctcaggcattgttgacataaaaaatggattcctgctcttgaatgactctaacaccacagttcttggtggtgaagtggaacaccttattgagaaatgggagttacagagaagcttatcaaaacacaatagaagcaatattggaactgaaggtggaccaccgccttttgtgccttttggacagaagtgtgtatctcatgtccaagtggatagcagagaacttgatcgaagaaaaacattgcaagttacaatgcctgtcaaacctacaaatgataatgatgaatttgaaaagcaaaggacggctgctattgctgaagttgcaaagagcaaggaaaccaagacatttggaggaggtggtggtggtgctagaagtaatctcaatatgaatgctgctggtaaccgaaatagggaagttttacagaaagaaaagtcaaccaaatcagagggaaaacatgaaggtgtctatagagaactggttgatgagaaagctctgaagcacataacggaaatgggcttcagtaaggaagcatcgaggcaagctcttatggataatggcaacaacttagaagcagcactgaacgtacttcttacaagcaataaacagaaacctgttatgggtcctcctctgagaggtagaggaaaaggcagggggcgaataagatctgaagatgaagaggacctgggaaatgcaaggccatcagcaccaagcacattatttgatttcttggaatctaaaatgggaactttgaatgtggaagaacctaaatcacagccacagcagcttcatcagggacaatacagatcatcaaatactgagcaaaatggagtaaaagataataatcatctgagacatcctcctcgaaatgataccaggcagccaagaaatgaaaaaccgcctcgttttcaaagagactcccaaaattcaaagtcagttttagaaggcagtggattacctagaaatagaggttctgaaagaccaagtacttcttcagtatctgaagtatgggctgaagacagaatcaaatgtgatagaccgtattctagatatgacagaactaaagatacttcatatcctttaggttctcagcatagtgatggtgcttttaaaaaaagagataactctatgcaaagcagatcaggaaaaggtccctcctttgcagaggcaaaagaaaatccacttcctcaaggatctgtagattataataatcaaaaacgtggaaaaagagaaagccaaacatctattcctgattatttttatgacaggaaatcacaaacaataaataatgaagctttcagtggtataaaaattgaaaaacattttaatgtaaatactgattatcagaatccagttcgaagtaatagtttcattggtgttccaaatggagaagtagaaatgccactgaaaggaagacgaataggacctattaagccagcaggacctgtcacagctgtaccctgtgatgataaaatattttacaatagtgggcccaaacgaagatctgggccaattaagccagaaaaaatactagaatcatctattcctatggagtatgcaaaaatgtggaaacctggagatgaatgttttgcactttattgggaagacaacaagttttaccgggcagaagttgaagccctccattcttcgggtatgacagcagttgttaaattcattgactacggaaactatgaagaggtgctactgagcaatatcaagcccattcaaacagaggcatgggaggaagaaggcacctacgatcaaactctggagttccgtaggggaggtgatggccagccaagacgatccactcggccaacccaacagttttaccaaccaccccgggctcggaactaataggaaaagtagactctttgtgaagaaacgagccagtgactgaaacaccctggtggaaacctgttgacagaccttccactttctcttcagaataagtagctgtggtggatattattatttgaagaaagaaaaaacagattttagggtggaaaaaacagtcaactcacacaaagaatggaaaaaaatactgagttaaattaagcaaataccttttacaagtgaaaggaagaatttttcttctgccgtcaataaaaccattgtgctattattgttttactgtg

SEQ ID NO: 7765 - protein, 651 aa, Homo sapiens
MLRLQMTDGHISCTAVEFSYMSKISLNTPPGTKVKLSGIVDIKNGFLLLNDSNTTVLGGEVEHLIEKWELQRSLSKHNRSNIGTEGGPPPFVPFGQKCVSHVQVDSRELDRRKTLQVTMPVKPTNDNDEFEKQRTAAIAEVAKSKETKTFGGGGGGARSNLNMNAAGNRNREVLQKEKSTKSEGKHEGVYRELVDEKALKHITEMGFSKEASRQALMDNGNNLEAALNVLLTSNKQKPVMGPPLRGRGKGRGRIRSEDEEDLGNARPSAPSTLFDFLESKMGTLNVEEPKSQPQQLHQGQYRSSNTEQNGVKDNNHLRHPPRNDTRQPRNEKPPRFQRDSQNSKSVLEGSGLPRNRGSERPSTSSVSEVWAEDRIKCDRPYSRYDRTKDTSYPLGSQHSDGAFKKRDNSMQSRSGKGPSFAEAKENPLPQGSVDYNNQKRGKRESQTSIPDYFYDRKSQTINNEAFSGIKIEKHFNVNTDYQNPVRSNSFIGVPNGEVEMPLKGRRIGPIKPAGPVTAVPCDDKIFYNSGPKRRSGPIKPEKILESSIPMEYAKMWKPGDECFALYWEDNKFYRAEVEALHSSGMTAVVKFIDYGNYEEVLLSNIKPIQTEAWEEEGTYDQTLEFRRGGDGQPRRSTRPTQQFYQPPRARN

SEQ ID NO: 7766 - DNA, 2292 bp, Homo sapiens
atcggcggggaagcggctgtggttgccagatctggcagtacagagccaaggtggcagggccgcgctaggacacggatggtcccagggggagggcaacaggaaaaacaagcactgacacaactgccccatttccccatgtcccctaaaagcaggttttcttgggctgaccagggcattttcactgtggtgtccgactggggcaactcgatctgcccgcggggactcaaaaaagcttgagctgcattttttctttgcgtccgggcggaccaaaaggcgaggtgaagggaacgagtgtttataagaaagtaaacttttgtgcagaatgggctggggacacctctgagttttgctgcccgcaacgtgacctttttagcgcggtcctggacgcgttccctcgcagccaacccgtcagtctcctcaggccttatcctgccctctctgaggtggccgcctgtgggcgctgcaaacgccacacttttgctctacgaagaacctcctcgcgactttccaaggtatctttcagatgaaggcattgaagcttgcacaagctctccagacaaagtcaatgtaaatgacatcatcctgattgctctcaatctcgaaggtccatgtgttttgcaaattcaaaaaattcgcaatgttgctgcaccaaaggataatgaagaatctcaggctgcaccaaggatgctgcgattacagatgactgatggtcatataagttgcacagcagtagaatttagttatatgtcaaaaataagcctgaacacaccacctggaactaaagttaagctctcaggcattgttgacataaaaaatggattcctgctcttgaatgactctaacaccacagttcttggtggtgaagtggaacaccttattgagaaatgggagttacagagaagcttatcaaaacacaatagaagcaatattggaactgaaggtggaccaccgccttttgtgccttttggacagtttggaagaagaaatagccaagataaaagaaagtgtgaagtcctatggtgtgatccatgttgatgaagtgtgtatctcatgtccaagtggatagcagagaacttgatcgaagaaaaacattgcaagttacaatgcctgtcaaacctacaaatgataatgatgaatttgaaaagcaaaggacggctgctattgctgaagttgcaaagagcaaggaaaccaagacatttggaggaggtggtggtggtgctagaagtaatctcaatatgaatgctgctggtaaccgaaatagggaagttttacagaaagaaaagtcaaccaaatcagagggaaaacatgaaggtgtctatagagaactgtgttacttgtgaggtcagagaatactcaaggcacaaccccacatatcatacagattcttccttgcctcttgtaaaaaatcagcaagagaatgttgtattagaatgacatttttacataagtatgggatgtaatttttagttaaaagacagtaagtagttaaaagtttatgccttgccttatctgtgggctatcagccagcttttctctttattccttccaggttgatgagaaagctctgaagcacataacggaaatgggcttcagtaaggaagcatcgaggcaagctcttatggataatggcaacaacttagaagcagcactgaacgtacttcttacaagcaataaacagaaacctgttatgggtcctcctctgagaggtagaggaaaaggcagggggcgaataagatctgaagatgaagaggacctgggaaatgcaaggccatcagcaccaagcacattatttgatttcttggaatctaaaatgggaactttgaatgtggaagaacctaaatcacagccacagcagcttcatcagggacaatacagatcatcaaatactgagcaaaatggagtaaaagataataatcatctgagacatcctcctcgaaatgataccaggcagccaagaaatgaaaaaccgcctcgttttcaaagagactcccaaaattcaaagtcagttttagaaggcagtggattacctagaaatagaggttctgaaagaccaagtacttcttcagtatctgaagtatgggctgaagacagaatcaaatgtgatagaccgtattctagatatgacagaactaaagatacttcatatcctttaggttctcagcatagtgatggtgcttttaaaaaaagagataactctatgcaaagcagatcaggaaaaggtccctcctttgcagaggcaaaagaaaatccacttcctcaaggatctgtagattataataatcaaaaacgtgg

SEQ ID NO: 7767 - protein, 264 aa, Homo sapiens
MPCLICGLSASFSLYSFQVDEKALKHITEMGFSKEASRQALMDNGNNLEAALNVLLTSNKQKPVMGPPLRGRGKGRGRIRSEDEEDLGNARPSAPSTLFDFLESKMGTLNVEEPKSQPQQLHQGQYRSSNTEQNGVKDNNHLRHPPRNDTRQPRNEKPPRFQRDSQNSKSVLEGSGLPRNRGSERPSTSSVSEVWAEDRIKCDRPYSRYDRTKDTSYPLGSQHSDGAFKKRDNSMQSRSGKGPSFAEAKENPLPQGSVDYNNQK

SEQ ID NO: 7768 - DNA, 2896 bp, Homo sapiens
gaagaacctcctcgcgactttccaaggtgtgcaactcagaaaagcgccccccaaaacaagtaaaagccttcggggaagaggcaaagtccctgaaccgtcctgactccagccaccagccggtgtttggtggatcaggtcccggagctccgcagcctgggagccccacaccaggccggcccctacggccgctcagaaaacgcggcgagcggaacccgcacgcggaagcgccggccgcactgagcatgcccagttgcagagccgaccagaggagttttttcttttcttttctttttttttttttaagggggggggtctcaagtaggaggcctccccatcacccccaccccagccccccaccacccccggcctaagcagctaccatggcccaggtggccggcgcggcgttgtcccaggcgggttggtatctttcagatgaaggcattgaagcttgcacaagctctccagacaaagtcaatgtaaatgacatcatcctgattgctctcaatacagatctgagaacaattggcaagaaattcctccccagtgacatcaatagtggaaaggtagaaaagctcgaaggtccatgtgttttgcaaattcaaaaaattcgcaatgttgctgcaccaaaggataatgaagaatctcaggctgcaccaaggatgctgcgattacagatgactgatggtcatataagttgcacagcagtagaatttagttatatgtcaaaaataagcctgaacacaccacctggaactaaagttaagctctcaggcattgttgacataaaaaatggattcctgctcttgaatgactctaacaccacagttcttggtggtgaagtggaacaccttattgagaaatgggagttacagagaagcttatcaaaacacaatagaagcaatattggaactgaaggtggaccaccgccttttgtgccttttggacagaagtgtgtatctcatgtccaagtggatagcagagaacttgatcgaagaaaaacattgcaagttacaatgcctgtcaaacctacaaatgataatgatgaatttgaaaagcaaaggacggctgctattgctgaagttgcaaagagcaaggaaaccaagacatttggaggaggtggtggtggtgctagaagtaatctcaatatgaatgctgctggtaaccgaaatagggaagttttacagaaagaaaagtcaaccaaatcagagggaaaacatgaaggtgtctatagagaactggttgatgagaaagctctgaagcacataacggaaatgggcttcagtaaggaagcatcgaggcaagctcttatggataatggcaacaacttagaagcagcactgaacgtacttcttacaagcaataaacagaaacctgttatgggtcctcctctgagaggtagaggaaaaggcagggggcgaataagatctgaagatgaagaggacctgggaaatgcaaggccatcagcaccaagcacattatttgatttcttggaatctaaaatgggaactttgaatgtggaagaacctaaatcacagccacagcagcttcatcagggacaatacagatcatcaaatactgagcaaaatggagtaaaagataataatcatctgagacatcctcctcgaaatgataccaggcagccaagaaatgaaaaaccgcctcgttttcaaagagactcccaaaattcaaagtcagttttagaaggcagtggattacctagaaatagaggttctgaaagaccaagtacttcttcagtatctgaagtatgggctgaagacagaatcaaatgtgatagaccgtattctagatatgacagaactaaagatacttcatatcctttaggttctcagcatagtgatggtgcttttaaaaaaagagataactctatgcaaagcagatcaggaaaaggtccctcctttgcagaggcaaaagaaaatccacttcctcaaggatctgtagattataataatcaaaaacgtggaaaaagagaaagccaaacatctattcctgattatttttatgacaggaaatcacaaacaataaataatgaagctttcagtggtataaaaattgaaaaacattttaatgtaaatactgattatcagaatccagttcgaagtaatagtttcattggtgttccaaatggagaagtagaaatgccactgaaaggaagacgaataggacctattaagccagcaggacctgtcacagctgtaccctgtgatgataaaatattttacaatagtgggcccaaacgaagatctgggccaattaagccagaaaaaatactagaatcatctattcctatggagtatgcaaaaatgtggaaacctggagatgaatgttttgcactttattgggaagacaacaagttttaccgggcagaagttgaagccctccattcttcgggtatgacagcagttgttaaattcattgactacggaaactatgaagaggtgctactgagcaatatcaagcccattcaaacagaggcatgggaggaagaaggcacctacgatcaaactctggagttccgtaggggaggtgatggccagccaagacgatccactcggccaacccaacagttttaccaaccaccccgggctcggaactaataggaaaagtagactctttgtgaagaaacgagccagtgactgaaacaccctggtggaaacctgttgacagaccttccactttctcttcagaataagtagctgtggtggatattattatttgaagaaagaaaaaacagattttagggtggaaaaaacagtcaactcacacaaagaatggaaaaaaatactgagttaaattaagcaaataccttttacaagtgaaaggaagaatttttcttctgccgtcaataaaaccattgtgctattattgttttactgtg

SEQ ID NO: 7769 - protein, 744 aa, Homo sapiens
MAQVAGAALSQAGWYLSDEGIEACTSSPDKVNVNDIILIALNTDLRTIGKKFLPSDINSGKVEKLEGPCVLQIQKIRNVAAPKDNEESQAAPRMLRLQMTDGHISCTAVEFSYMSKISLNTPPGTKVKLSGIVDIKNGFLLLNDSNTTVLGGEVEHLIEKWELQRSLSKHNRSNIGTEGGPPPFVPFGQKCVSHVQVDSRELDRRKTLQVTMPVKPTNDNDEFEKQRTAAIAEVAKSKETKTFGGGGGGARSNLNMNAAGNRNREVLQKEKSTKSEGKHEGVYRELVDEKALKHITEMGFSKEASRQALMDNGNNLEAALNVLLTSNKQKPVMGPPLRGRGKGRGRIRSEDEEDLGNARPSAPSTLFDFLESKMGTLNVEEPKSQPQQLHQGQYRSSNTEQNGVKDNNHLRHPPRNDTRQPRNEKPPRFQRDSQNSKSVLEGSGLPRNRGSERPSTSSVSEVWAEDRIKCDRPYSRYDRTKDTSYPLGSQHSDGAFKKRDNSMQSRSGKGPSFAEAKENPLPQGSVDYNNQKRGKRESQTSIPDYFYDRKSQTINNEAFSGIKIEKHFNVNTDYQNPVRSNSFIGVPNGEVEMPLKGRRIGPIKPAGPVTAVPCDDKIFYNSGPKRRSGPIKPEKILESSIPMEYAKMWKPGDECFALYWEDNKFYRAEVEALHSSGMTAVVKFIDYGNYEEVLLSNIKPIQTEAWEEEGTYDQTLEFRRGGDGQPRRSTRPTQQFYQPPRARN

SEQ ID NO: 7770 - DNA, 2497 bp, Homo sapiens
tattatacaccccattttacaggtatctttcagatgaaggcattgaagcttgcacaagctctccagacaaagtcaatgtaaatgacatcatcctgattgctctcaatacagatctgagaacaattggcaagaaattcctccccagtgacatcaatagtggaaaggtagaaaagctcgaaggtccatgtgttttgcaaattcaaaaaattcgcaatgttgctgcaccaaaggataatgaagaatctcaggctgcaccaaggatgctgcgattacagatgactgatggtcatataagttgcacagcagtagaatttagttatatgtcaaaaataagcctgaacacaccacctggaactaaagttaagctctcaggcattgttgacataaaaaatggattcctgctcttgaatgactctaacaccacagttcttggtggtgaagtggaacaccttattgagaaatgggagttacagagaagcttatcaaaacacaatagaagcaatattggaactgaaggtggaccaccgccttttgtgccttttggacagaagtgtgtatctcatgtccaagtggatagcagagaacttgatcgaagaaaaacattgcaagttacaatgcctgtcaaacctacaaatgataatgatgaatttgaaaagcaaaggacggctgctattgctgaagttgcaaagagcaaggaaaccaagacatttggaggaggtggtggtggtgctagaagtaatctcaatatgaatgctgctggtaaccgaaatagggaagttttacagaaagaaaagtcaaccaaatcagagggaaaacatgaaggtgtctatagagaactggttgatgagaaagctctgaagcacataacggaaatgggcttcagtaaggaagcatcgaggcaagctcttatggataatggcaacaacttagaagcagcactgaacgtacttcttacaagcaataaacagaaacctgttatgggtcctcctctgagaggtagaggaaaaggcagggggcgaataagatctgaagatgaagaggacctgggaaatgcaaggccatcagcaccaagcacattatttgatttcttggaatctaaaatgggaactttgaatgtggaagaacctaaatcacagccacagcagcttcatcagggacaatacagatcatcaaatactgagcaaaatggagtaaaagataataatcatctgagacatcctcctcgaaatgataccaggcagccaagaaatgaaaaaccgcctcgttttcaaagagactcccaaaattcaaagtcagttttagaaggcagtggattacctagaaatagaggttctgaaagaccaagtacttcttcagtatctgaagtatgggctgaagacagaatcaaatgtgatagaccgtattctagatatgacagaactaaagatacttcatatcctttaggttctcagcatagtgatggtgcttttaaaaaaagagataactctatgcaaagcagatcaggaaaaggtccctcctttgcagaggcaaaagaaaatccacttcctcaaggatctgtagattataataatcaaaaacgtggaaaaagagaaagccaaacatctattcctgattatttttatgacaggaaatcacaaacaataaataatgaagctttcagtggtataaaaattgaaaaacattttaatgtaaatactgattatcagaatccagttcgaagtaatagtttcattggtgttccaaatggagaagtagaaatgccactgaaaggaagacgaataggacctattaagccagcaggacctgtcacagctgtaccctgtgatgataaaatattttacaatagtgggcccaaacgaagatctgggccaattaagccagaaaaaatactagaatcatctattcctatggagtatgcaaaaatgtggaaacctggagatgaatgttttgcactttattgggaagacaacaagttttaccgggcagaagttgaagccctccattcttcgggtatgacagcagttgttaaattcattgactacggaaactatgaagaggtgctactgagcaatatcaagcccattcaaacagaggcatgggaggaagaaggcacctacgatcaaactctggagttccgtaggggaggtgatggccagccaagacgatccactcggccaacccaacagttttaccaaccaccccgggctcggaactaataggaaaagtagactctttgtgaagaaacgagccagtgactgaaacaccctggtggaaacctgttgacagaccttccactttctcttcagaataagtagctgtggtggatattattatttgaagaaagaaaaaacagattttagggtggaaaaaacagtcaactcacacaaagaatggaaaaaaatactgagttaaattaagcaaataccttttacaagtgaaaggaagaatttttcttctgccgtcaataaaaccattgtgctattattgttttactgtg

SEQ ID NO: 7771 - protein, 651 aa, Homo sapiens; identical to SEQ ID NO: 7765

SEQ ID NO: 7772 - DNA, 2560 bp, Homo sapiens
cctcatttttctcttgccatcgccatgaaagaagtgcctttcacctcccaccatgattctgaggcctccccagccatgtggaactgtatctttcagatgaaggcattgaagcttgcacaagctctccagacaaagtcaatgtaaatgacatcatcctgattgctctcaatacagatctgagaacaattggcaagaaattcctccccagtgacatcaatagtggaaaggtagaaaagctcgaaggtccatgtgttttgcaaattcaaaaaattcgcaatgttgctgcaccaaaggataatgaagaatctcaggctgcaccaaggatgctgcgattacagatgactgatggtcatataagttgcacagcagtagaatttagttatatgtcaaaaataagcctgaacacaccacctggaactaaagttaagctctcaggcattgttgacataaaaaatggattcctgctcttgaatgactctaacaccacagttcttggtggtgaagtggaacaccttattgagaaatgggagttacagagaagcttatcaaaacacaatagaagcaatattggaactgaaggtggaccaccgccttttgtgccttttggacagaagtgtgtatctcatgtccaagtggatagcagagaacttgatcgaagaaaaacattgcaagttacaatgcctgtcaaacctacaaatgataatgatgaatttgaaaagcaaaggacggctgctattgctgaagttgcaaagagcaaggaaaccaagacatttggaggaggtggtggtggtgctagaagtaatctcaatatgaatgctgctggtaaccgaaatagggaagttttacagaaagaaaagtcaaccaaatcagagggaaaacatgaaggtgtctatagagaactggttgatgagaaagctctgaagcacataacggaaatgggcttcagtaaggaagcatcgaggcaagctcttatggataatggcaacaacttagaagcagcactgaacgtacttcttacaagcaataaacagaaacctgttatgggtcctcctctgagaggtagaggaaaaggcagggggcgaataagatctgaagatgaagaggacctgggaaatgcaaggccatcagcaccaagcacattatttgatttcttggaatctaaaatgggaactttgaatgtggaagaacctaaatcacagccacagcagcttcatcagggacaatacagatcatcaaatactgagcaaaatggagtaaaagataataatcatctgagacatcctcctcgaaatgataccaggcagccaagaaatgaaaaaccgcctcgttttcaaagagactcccaaaattcaaagtcagttttagaaggcagtggattacctagaaatagaggttctgaaagaccaagtacttcttcagtatctgaagtatgggctgaagacagaatcaaatgtgatagaccgtattctagatatgacagaactaaagatacttcatatcctttaggttctcagcatagtgatggtgcttttaaaaaaagagataactctatgcaaagcagatcaggaaaaggtccctcctttgcagaggcaaaagaaaatccacttcctcaaggatctgtagattataataatcaaaaacgtggaaaaagagaaagccaaacatctattcctgattatttttatgacaggaaatcacaaacaataaataatgaagctttcagtggtataaaaattgaaaaacattttaatgtaaatactgattatcagaatccagttcgaagtaatagtttcattggtgttccaaatggagaagtagaaatgccactgaaaggaagacgaataggacctattaagccagcaggacctgtcacagctgtaccctgtgatgataaaatattttacaatagtgggcccaaacgaagatctgggccaattaagccagaaaaaatactagaatcatctattcctatggagtatgcaaaaatgtggaaacctggagatgaatgttttgcactttattgggaagacaacaagttttaccgggcagaagttgaagccctccattcttcgggtatgacagcagttgttaaattcattgactacggaaactatgaagaggtgctactgagcaatatcaagcccattcaaacagaggcatgggaggaagaaggcacctacgatcaaactctggagttccgtaggggaggtgatggccagccaagacgatccactcggccaacccaacagttttaccaaccaccccgggctcggaactaataggaaaagtagactctttgtgaagaaacgagccagtgactgaaacaccctggtggaaacctgttgacagaccttccactttctcttcagaataagtagctgtggtggatattattatttgaagaaagaaaaaacagattttagggtggaaaaaacagtcaactcacacaaagaatggaaaaaaatactgagttaaattaagcaaataccttttacaagtgaaaggaagaatttttcttctgccgtcaataaaaccattgtgctattattgttttactgtg

SEQ ID NO: 7773 - protein, 651 aa, Homo sapiens; identical to SEQ ID NO: 7765

SEQ ID NO: 7774 - DNA, 2512 bp, Homo sapiens
tatatgccaagtgacttctgaacacgacgtgaagacagtatctttcagatgaaggcattgaagcttgcacaagctctccagacaaagtcaatgtaaatgacatcatcctgattgctctcaatacagatctgagaacaattggcaagaaattcctccccagtgacatcaatagtggaaaggtagaaaagctcgaaggtccatgtgttttgcaaattcaaaaaattcgcaatgttgctgcaccaaaggataatgaagaatctcaggctgcaccaaggatgctgcgattacagatgactgatggtcatataagttgcacagcagtagaatttagttatatgtcaaaaataagcctgaacacaccacctggaactaaagttaagctctcaggcattgttgacataaaaaatggattcctgctcttgaatgactctaacaccacagttcttggtggtgaagtggaacaccttattgagaaatgggagttacagagaagcttatcaaaacacaatagaagcaatattggaactgaaggtggaccaccgccttttgtgccttttggacagaagtgtgtatctcatgtccaagtggatagcagagaacttgatcgaagaaaaacattgcaagttacaatgcctgtcaaacctacaaatgataatgatgaatttgaaaagcaaaggacggctgctattgctgaagttgcaaagagcaaggaaaccaagacatttggaggaggtggtggtggtgctagaagtaatctcaatatgaatgctgctggtaaccgaaatagggaagttttacagaaagaaaagtcaaccaaatcagagggaaaacatgaaggtgtctatagagaactggttgatgagaaagctctgaagcacataacggaaatgggcttcagtaaggaagcatcgaggcaagctcttatggataatggcaacaacttagaagcagcactgaacgtacttcttacaagcaataaacagaaacctgttatgggtcctcctctgagaggtagaggaaaaggcagggggcgaataagatctgaagatgaagaggacctgggaaatgcaaggccatcagcaccaagcacattatttgatttcttggaatctaaaatgggaactttgaatgtggaagaacctaaatcacagccacagcagcttcatcagggacaatacagatcatcaaatactgagcaaaatggagtaaaagataataatcatctgagacatcctcctcgaaatgataccaggcagccaagaaatgaaaaaccgcctcgttttcaaagagactcccaaaattcaaagtcagttttagaaggcagtggattacctagaaatagaggttctgaaagaccaagtacttcttcagtatctgaagtatgggctgaagacagaatcaaatgtgatagaccgtattctagatatgacagaactaaagatacttcatatcctttaggttctcagcatagtgatggtgcttttaaaaaaagagataactctatgcaaagcagatcaggaaaaggtccctcctttgcagaggcaaaagaaaatccacttcctcaaggatctgtagattataataatcaaaaacgtggaaaaagagaaagccaaacatctattcctgattatttttatgacaggaaatcacaaacaataaataatgaagctttcagtggtataaaaattgaaaaacattttaatgtaaatactgattatcagaatccagttcgaagtaatagtttcattggtgttccaaatggagaagtagaaatgccactgaaaggaagacgaataggacctattaagccagcaggacctgtcacagctgtaccctgtgatgataaaatattttacaatagtgggcccaaacgaagatctgggccaattaagccagaaaaaatactagaatcatctattcctatggagtatgcaaaaatgtggaaacctggagatgaatgttttgcactttattgggaagacaacaagttttaccgggcagaagttgaagccctccattcttcgggtatgacagcagttgttaaattcattgactacggaaactatgaagaggtgctactgagcaatatcaagcccattcaaacagaggcatgggaggaagaaggcacctacgatcaaactctggagttccgtaggggaggtgatggccagccaagacgatccactcggccaacccaacagttttaccaaccaccccgggctcggaactaataggaaaagtagactctttgtgaagaaacgagccagtgactgaaacaccctggtggaaacctgttgacagaccttccactttctcttcagaataagtagctgtggtggatattattatttgaagaaagaaaaaacagattttagggtggaaaaaacagtcaactcacacaaagaatggaaaaaaatactgagttaaattaagcaaataccttttacaagtgaaaggaagaatttttcttctgccgtcaataaaaccattgtgctattattgttttactgtg

SEQ ID NO: 7775 - protein, 651 aa, Homo sapiens; identical to SEQ ID NO: 7765

SEQ ID NO: 7776 - DNA, 3127 bp, Homo sapiens
gacgtcaggtcggaggagtagcacctgccaggagcacgtcccgccggcaggtcgcaggagccctgggagccgccgccatgggaatgtccaaatcacacagtttctttggttatcccctgagcatcttcttcatcgtggtcaatgagttttgcgaaagattttcctactatggaatgcgagcaatcctgattctgtacttcacaaatttcatcagctgggatgataacctgtccaccgccatctaccatacgtttgtggctctgtgctacctgacgccaattctcggagctcttatcgccgactcgtggctgggaaagttcaagaccattgtgtcgctctccattgtctacacaattggacaagcagtcacctcagtaagctccattaatgacctcacagaccacaaccatgatggcacccccgacagccttcctgtgcacgtggtgctgtccttgatcggcctggccctgatagctctcgggactggaggaatcaaaccctgtgtgtctgcgtttggtggagatcagtttgaagagggccaggagaaacaaagaaacagatttttttccatcttttacttggctattaatgctggaagtttgctttccacaatcatcacacccatgctcagagttcaacaatgtggaattcacagtaaacaagcttgttacccactggcctttggggttcctgctgctctcatggctgtagccctgattgtgtttgtccttggcagtgggatgtacaagaagttcaagccacagggcaacatcatgggtaaagtggccaagtgcatcggttttgccatcaaaaatagatttaggcatcggagtaaggcatttcccaagagggagcactggctggactgggctaaagagaaatacgatgagcggctcatctcccaaattaagatggttacgagggtgatgttcctgtatattccactcccaatgttctgggccttgtttgaccagcagggctccaggtggacactgcaggcaacaactatgtccgggaaaatcggagctcttgaaattcagcccgatcagatgcagaccgtgaacgccatcctgatcgtgatcatggtcccgatcttcgatgctgtgctgtaccctctcattgcaaaatgtggcttcaatttcacctccttgaagaagatggcagttggcatggtcctggcctccatggcctttgtggtggctgccatcgtgcaggtggaaatcgataaaactcttccagtcttccccaaaggaaacgaagtccaaattaaagttttgaatataggaaacaataccatgaatatatctcttcctggagagatggtgacacttggcccaatgtctcaaacaaatgcatttatgacttttgatgtaaacaaactgacaaggataaacatttcttctcctggatcaccagtcactgctgtaactgacgacttcaagcagggccaacgccacacgcttctagtgtgggcccccaatcactaccaggtggtaaaggatggtcttaaccagaagccagaaaaaggggaaaatggaatcagatttgtaaatacttttaacgagctcatcaccatcacaatgagtgggaaagtttatgcaaacatcagcagctacaatgccagcacataccagttttttccttctggcataaaaggcttcacaataagctcaacagagattccgccacaatgtcaacctaatttcaatactttctaccttgaatttggtagtgcttatacctatatagtccaaaggaagaatgacagctgccctgaagtgaaggtgtttgaagatatttcagccaacacagttaacatggctctgcaaatcccgcagtattttcttctcacctgtggcgaagtggtcttctctgtcacgggattggaattctcatattctcaggctccttccaacatgaagtcggtgcttcaggcaggatggctgctgaccgtggctgttggcaacatcattgtgctcatcgtggcaggggcaggccagttcagcaaacagtgggccgagtacattctatttgccgcgttgcttctggtcgtctgtgtaatttttgccatcatggctcggttctatacttacatcaacccagcggagatcgaagctcaatttgatgaggatgaaaagaaaaacagactggaaaagagtaacccatatttcatgtcaggggccaattcacagaaacagatgtgaaggtcaggaggcaagtggaggatggactgggcccgcagatgccctgacctctgcccccaggtagcaggacactccattggatggcccctgatgaggaagacttcagaattgggaactaaaccatgaatgctattttcttttttctttttcttttctttttttttttttttttttttttgagacagagttttgctcttgttgtccaggctggagtgcaatggcacgatctcagctcactgcaacctccgcctcccaggttcaagtaattctcctgcctcagcctcccgagtggctgggattagcggcatgcaccaccacgcccagctatttttgtatttttagtagagatggggtttcaccatgttggccaggatggtctcgatctcttgacctggtgatctgcccacctcggcctgccaaagtgctgggattacaggcttgagctaccgcgcccggccgtgaacgctattttctaagcagccagcagtgaatctaaaactctggaagaagtcttctgtttgaaaggcttatttaagccacacgtacacacactgtcttagagtactgtgagcccaccccacattggtcatcttccctatcacacaaatgatgttattttggactagcttaattttgaaatggtaacaaagtttcctattccatactgttcatttctaatactcttacgaaaactattctaaaggaggcaggagccaaggccaaaagtgaacgtacaggtttgaaatggctgtgataaggaccagctggtattaactgataactttacctttgggtttttgttattttgtttttctagtccctacctgtgtttaaattatggataactcgaaagacagctcaggtgaaggccagtaatgatttttttgaagtttcaatggtgtgaaataaatttctgttcttaa

SEQ ID NO: 7777 - protein, 708 aa, Homo sapiens; identical to SEQ ID NO: 1132

SEQ ID NO: 7778 - DNA, 2341 bp, Homo sapiens
gacgtcaggtcggaggagtagcacctgccaggagcacgtcccgccggcaggtcgcaggagccctgggagccgccgccatgggaatgtccaaatcacacagtttctttggttatcccctgagcatcttcttcatcgtggtcaatgagttttgcgaaagattttcctactatggaatgcgagcaatcctgattctgtacttcacaaatttcatcagctgggatgataacctgtccaccgccatctaccatacgtttgtggctctgtgctacctgacgccaattctcggagctcttatcgccgactcgtggctgggaaagttcaagaccattgtgtcgctctccattgtctacacaattggacaagcagtcacctcagtaagctccattaatgacctcacagaccacaaccatgatggcacccccgacagccttcctgtgcacgtggtgctgtccttgatcggcctggccctgatagctctcgggactggaggaatcaaaccctgtgtgtctgcgtttggtggagatcagtttgaagagggccaggagaaacaaagaaacagatttttttccatcttttacttggctattaatgctggaagtttgctttccacaatcatcacacccatgctcagagttcaacaatgtggaattcacagtaaacaagcttgttacccactggcctttggggttcctgctgctctcatggctgtagccctgattgtgtttgtccttggcagtgggatgtacaagaagttcaagccacagggcaacatcatgggtaaagtggccaagtgcatcggttttgccatcaaaaatagatttaggcatcggagtaaggcatttcccaagagggagcactggctggactgggctaaagagaaatacgatgagcggctcatctcccaaattaagatggttacgagggtgatgttcctgtatattccactcccaatgttctgggccttgtttgaccagcagggctccaggtggacactgcaggcaacaactatgtccgggaaaatcggagctcttgaaattcagcccgatcagatgcagaccgtgaacgccatcctgatcgtgatcatggtcccgatcttcgatgctgtgctgtaccctctcattgcaaaatgtggcttcaatttcacctccttgaagaagatggcagttggcatggtcctggcctccatggcctttgtggtggctgccatcgtgcaggtggaaatcgataaaactcttccagtcttccccaaaggaaacgaagtccaaattaaagttttgaatataggaaacaataccatgaatatatctcttcctggagagatggtgacacttggcccaatgtctcaaacaaatgcatttatgacttttgatgtaaacaaactgacaaggataaacatttcttctcctggatcaccagtcactgctgtaactgacgacttcaagcagggccaacgccacacgcttctagtgtgggcccccaatcactaccaggtggtaaaggatggtcttaaccagaagccagaaaaaggggaaaatggaatcagatttgtaaatacttttaacgagctcatcaccatcacaatgagtgggaaagtttatgcaaacatcagcagctacaatgccagcacataccagttttttccttctggcataaaaggcttcacaataagctcaacagagattccgccacaatgtcaacctaatttcaatactttctaccttgaatttggtagtgcttatacctatatagtccaaaggaagaatgacagctgccctgaagtgaaggtgtttgaagatatttcagccaacacagttaacatggctctgcaaatcccgcagtattttcttctcacctgtggcgaagtggtcttctctgtcacgggattggaattctcatattctcaggctccttccaacatgaagtcggtgcttcaggcaggatggctgctgaccgtggctgttggcaacatcattgtgctcatcgtggcaggggcaggccagttcagcaaacagtgggccgagtacattctatttgccgcgttgcttctggtcgtctgtgtaatttttgccatcatggctcggttctatacttacatcaacccagcggagatcgaagctcaatttgatgaggatgaaaagaaaaacagactggaaaagagtaacccatatttcatgtcaggggccaattcacagaaacagatgtgaaggtcaggaggcaagtggaggatggactgggcccgcagatgccctgacctctgcccccaggtagcaggacactccattggatggcccctgatgaggaagacttcagaattgggaactaaaccatgaatgctattttc

SEQ ID NO: 7779 - protein, 708 aa, Homo sapiens; identical to SEQ ID NO: 1132

SEQ ID NO: 7780 - DNA, 5481 bp, Homo sapiens
gcttggagccgccgcacccgggacggtgcgtagcgctggaagtccggccttccgagagctagctgtccgccgcggcccccgcacgccgggcagccgtccctcgccgcctcgggcgcgccaccatggggccccggctcagcgtctggctgctgctgctgcccgccgcccttctgctccacgaggagcacagccgggccgctgcgaagggtggctgtgctggctctggctgtggcaaatgtgactgccatggagtgaagggacaaaagggtgaaagaggcctcccggggttacaaggtgtcattgggtttcctggaatgcaaggacctgaggggccacagggaccaccaggacaaaagggtgatactggagaaccaggactacctggaacaaaagggacaagaggacctccgggagcatctggctaccctggaaacccaggacttcccggaattcctggccaagacggcccgccaggccccccaggtattccaggatgcaatggcacaaagggggagagagggccgctcgggcctcctggcttgcctggtttcgctggaaatcccggaccaccaggcttaccagggatgaagggtgatccaggtgagatacttggccatgtgcccgggatgctgttgaaaggtgaaagaggatttcccggaatcccagggactccaggcccaccaggactgccagggcttcaaggtcctgttgggcctccaggatttaccggaccaccaggtcccccaggccctcccggccctccaggtgaaaagggacaaatgggcttaagttttcaaggaccaaaaggtgacaagggtgaccaaggggtcagtgggcctccaggagtaccaggacaagctcaagttcaagaaaaaggagacttcgccaccaagggagaaaagggccaaaaaggtgaacctggatttcaggggatgccaggggtcggagagaaaggtgaacccggaaaaccaggacccagaggcaaacccggaaaagatggtgacaaaggggaaaaagggagtcccggttttcctggtgaacccgggtacccaggactcataggccgccagggcccgcagggagaaaagggtgaagcaggtcctcctggcccacctggaattgttataggcacaggacctttgggagaaaaaggagagaggggctaccctggaactccggggccaagaggagagccaggcccaaaaggtttcccaggactaccaggccaacccggacctccaggcctccctgtacctgggcaggctggtgcccctggcttccctggtgaaagaggagaaaaaggtgaccgaggatttcctggtacatctctgccaggaccaagtggaagagatgggctcccgggtcctcctggttcccctgggccccctgggcagcctggctacacaaatggaattgtggaatgtcagcccggacctccaggtgaccagggtcctcctggaattccagggcagccaggatttataggcgaaattggagagaaaggtcaaaaaggagagagttgcctcatctgtgatatagacggatatcgggggcctcccgggccacagggacccccgggagaaataggtttcccagggcagccaggggccaaggactccctggcataacgggacagtcggggctccctggccttcctggacagcagggggctcctgggattcctgggtttccaggttccaagggagaaatgggcgtcatggggacccccgggcagccgggctcaccaggaccagtgggtgctcctggattaccgggtgaaaaaggggaccatggctttccgggctcctcaggacccaggggagaccctggcttgaaaggtgataagggggatgtcggtctccctggcaagcctggctccatggataaggtggacatgggcagcatgaagggccagaaaggagaccaaggagagaaaggacaaattggaccaattggtgagaagggatcccgaggagaccctgggaccccaggagtgcctggaaaggacgggcaggcaggacagcctgggcagccaggacctaaaggtgatccaggtataagtggaaccccaggtgctccaggacttccgggaccaaaaggatctgttggtggaatgggcttgccaggaacacctggagagaaaggtgtgcctggcatccctggcccacaaggttcacctggcttacctggagacaaaggtgcaaaaggagagaaagggcaggcaggcccacctggcataggcatcccagggctgcgaggtgaaaagggagatcaagggatagcgggtttcccaggaagccctggagagaagggagaaaaaggaagcattgggatcccaggaatgccagggtccccaggccttaaagggtctcccgggagtgttggctatccaggaagtcctgggctacctggagaaaaaggtgacaaaggcctcccaggattggatggcatccctggtgtcaaaggagaagcaggtcttcctgggactcctggccccacaggcccagctggccagaaaggggagccaggcagtgatggaatcccggggtcagcaggagagaagggtgaaccaggtctaccaggaagaggattcccagggtttccaggggccaaaggagacaaaggttcaaagggtgaggtgggtttcccaggattagccgggagcccaggaattcctggatccaaaggagagcaaggattcatgggtcctccggggccccagggacagccggggttaccgggatccccaggccatgccacggaggggcccaaaggagaccgcggacctcagggccagcctggcctgccaggacttccgggacccatggggcctccagggcttcctgggattgatggagttaaaggtgacaaaggaaatccaggctggccaggagcacccggtgtcccagggcccaagggagaccctggattccagggcatgcctggtattggtggctctccaggaatcacaggctctaagggtgatatggggcctccaggagttccaggatttcaaggtccaaaaggtcttcctggcctccagggaattaaaggtgatcaaggcgatcaaggcgtcccgggagctaaaggtctcccgggtcctcctggccccccaggtccttacgacatcatcaaaggggagcccgggctccctggtcctgagggccccccagggctgaaagggcttcagggactgccaggcccgaaaggccagcaaggtgttacaggattggtgggtatacctggacctccaggtattcctgggtttgacggtgcccctggccagaaaggagagatgggacctgccgggcctactggtccaagaggatttccaggtccaccaggccccgatgggttgccaggatccatggggcccccaggcaccccatctgttgatcacggcttccttgtgaccaggcatagtcaaacaatagatgacccacagtgtccttctgggaccaaaattctttaccacgggtactctttgctctacgtgcaaggcaatgaacgggcccatggccaggacttgggcacggccggcagctgcctgcgcaagttcagcacaatgcccttcctgttctgcaatattaacaacgtgtgcaactttgcatcacgaaatgactactcgtactggctgtccacccctgagcccatgcccatgtcaatggcacccatcacgggggaaaacataagaccatttattagtaggtgtgctgtgtgtgaggcgcctgccatggtgatggccgtgcacagccagaccattcagatcccaccgtgccccagcgggtggtcctcgctgtggatcggctactcttttgtgatgcacaccagcgctggtgcagaaggctctggccaagccctggcgtcccccggctcctgcctggaggagtttagaagtgcgccattcatcgagtgtcacggccgtgggacctgcaattactacgcaaacgcttacagcttttggctcgccaccatagagaggagcgagatgttcaagaagcctacgccgtccaccttgaaggcaggggagctgcgcacgcacgtcagccgctgccaagtctgtatgagaagaacataatgaagcctgactcagctaatgtcacaacatggtgctacttcttcttctttttgttaacagcaacgaaccctagaaatatatcctgtgtacctcactgtccaatatgaaaaccgtaaagtgccttataggaatttgcgtaactaacacaccctgcttcattgacctctacttgctgaaggagaaaaagacagcgataagctttcaatagtggcataccaaatggcacttttgatgaaataaaatatcaatattttctgcaatccaatgcactgatgtgtgaagtgagaactccatcagaaaaccaaagggtgctaggaggtgtgggtgccttccatactgtttgcccattttcattcttgtattataattaattttctacccccagagataaatgtttgtttatatcactgtctagctgtttcaaaatttaggtcccttggtctgtacaaataatagcaatgtaaaaatggttttttgaacctccaaatggaattacagactcagtagccatatcttccaaccccccagtataaatttctgtctttctgctatgtgtggtactttgcagctgcttttgcagaaatcacaattttcctgtggaataaagatggtccaaaaatagtcaaaaattaaatatatatatatattagtaatttatatagatgtcagcaattaggcagatcaaggtttagtttaacttccactgttaaaataaagcttacatagttttcttcctttgaaagactgtgctgtcctttaacataggtttttaaagactaggatattgaatgtgaaacatccgttttcattgttcacttctaaaccaaaaattatgtgttgccaaaaccaaacccaggttcatgaatatggtgtctattatagtgaaacatgtactttgagcttattgtttttattctgtattaaatattttcagggttttaaacactaatcacaaactgaatgacttgacttcaaaagcaacaaccttaaaggccgtcatttcattagtattcctcattctgcatcctggcttgaaaaacagctctgttgaatcacagtatcagtattttcacacgtaagcacattcgggccatttccgtggtttctcatgagctgtgttcacagacctcagcagggcatcgcatggaccgcaggagggcagattcggaccactaggcctgaaatgacatttcactaaaagtctccaaaacatttctaagactactaaggccttttatgtaatttctttaaatgtgtatttcttaagaattcaaatttgtaataaaactatttgtataaaaattaagcttttattaatttgttgctagtattgccacagacgcattaaaagaaacttactgcacaagctgctaataaatttgtaagctttgcataccttagat

SEQ ID NO: 7781 - protein, 789 aa, Homo sapiens
MGVMGTPGQPGSPGPVGAPGLPGEKGDHGFPGSSGPRGDPGLKGDKGDVGLPGKPGSMDKVDMGSMKGQKGDQGEKGQIGPIGEKGSRGDPGTPGVPGKDGQAGQPGQPGPKGDPGISGTPGAPGLPGPKGSVGGMGLPGTPGEKGVPGIPGPQGSPGLPGDKGAKGEKGQAGPPGIGIPGLRGEKGDQGIAGFPGSPGEKGEKGSIGIPGMPGSPGLKGSPGSVGYPGSPGLPGEKGDKGLPGLDGIPGVKGEAGLPGTPGPTGPAGQKGEPGSDGIPGSAGEKGEPGLPGRGFPGFPGAKGDKGSKGEVGFPGLAGSPGIPGSKGEQGFMGPPGPQGQPGLPGSPGHATEGPKGDRGPQGQPGLPGLPGPMGPPGLPGIDGVKGDKGNPGWPGAPGVPGPKGDPGFQGMPGIGGSPGITGSKGDMGPPGVPGFQGPKGLPGLQGIKGDQGDQGVPGAKGLPGPPGPPGPYDIIKGEPGLPGPEGPPGLKGLQGLPGPKGQQGVTGLVGIPGPPGIPGFDGAPGQKGEMGPAGPTGPRGFPGPPGPDGLPGSMGPPGTPSVDHGFLVTRHSQTIDDPQCPSGTKILYHGYSLLYVQGNERAHGQDLGTAGSCLRKFSTMPFLFCNINNVCNFASRNDYSYWLSTPEPMPMSMAPITGENIRPFISRCAVCEAPAMVMAVHSQTIQIPPCPSGWSSLWIGYSFVMHTSAGAEGSGQALASPGSCLEEFRSAPFIECHGRGTCNYYANAYSFWLATIERSEMFKKPTPSTLKAGELRTHVSRCQVCMRRT

SEQ ID NO: 7782 - DNA, 6535 bp, Homo sapiens
gcttggagccgccgcacccgggacggtgcgtagcgctggaagtccggccttccgagagctagctgtccgccgcggcccccgcacgccgggcagccgtccctcgccgcctcgggcgcgccaccatggggccccggctcagcgtctggctgctgctgctgcccgccgcccttctgctccacgaggagcacagccgggccgctgcgaagggtggctgtgctggctctggctgtggcaaatgtgactgccatggagtgaagggacaaaagggtgaaagaggcctcccggggttacaaggtgtcattgggtttcctggaatgcaaggacctgaggggccacagggaccaccaggacaaaagggtgatactggagaaccaggactacctggaacaaaagggacaagaggacctccgggagcatctggctaccctggaaacccaggacttcccggaattcctggccaagacggcccgccaggccccccaggtattccaggatgcaatggcacaaagggggagagagggccgctcgggcctcctggcttgcctggtttcgctggaaatcccggaccaccaggcttaccagggatgaagggtgatccaggtgagatacttggccatgtgcccgggatgctgttgaaaggtgaaagaggatttcccggaatcccagggactccaggcccaccaggactgccagggcttcaaggtcctgttgggcctccaggatttaccggaccaccaggtcccccaggccctcccggccctccaggtgaaaagggacaaatgggcttaagttttcaaggaccaaaaggtgacaagggtgaccaaggggtcagtgggcctccaggagtaccaggacaagctcaagttcaagaaaaaggagacttcgccaccaagggagaaaagggccaaaaaggtgaacctggatttcaggggatgccaggggtcggagagaaaggtgaacccggaaaaccaggacccagaggcaaacccggaaaagatggtgacaaaggggaaaaagggagtcccggttttcctggtgaacccgggtacccaggactcataggccgccagggcccgcagggagaaaagggtgaagcaggtcctcctggcccacctggaattgttataggcacaggacctttgggagaaaaaggagagaggggctaccctggaactccggggccaagaggagagccaggcccaaaaggtttcccaggactaccaggccaacccggacctccaggcctccctgtacctgggcaggctggtgcccctggcttccctggtgaaagaggagaaaaaggtgaccgaggatttcctggtacatctctgccaggaccaagtggaagagatgggctcccgggtcctcctggttcccctgggccccctgggcagcctggctacacaaatggaattgtggaatgtcagcccggacctccaggtgaccagggtcctcctggaattccagggcagccaggatttataggcgaaattggagagaaaggtcaaaaaggagagagttgcctcatctgtgatatagacggatatcgggggcctcccgggccacagggacccccgggagaaataggtttcccagggcagccaggggccaagggcgacagaggtttgcctggcagagatggtgttgcaggagtgccaggccctcaaggtacaccagggctgataggccagccaggagccaagggggagcctggtgagttttatttcgacttgcggctcaaaggtgacaaaggagacccaggctttccaggacagcccggcatgacagggagagcgggttctcctggaagagatggccatccgggtcttcctggccccaagggctcgccgggttctgtaggattgaaaggagagcgtggcccccctggaggagttggattcccaggcagtcgtggtgacaccggcccccctgggcctccaggatatggtcctgctggtcccattggtgacaaaggacaagcaggctttcctggaggccctggatccccaggcctgccaggtccaaagggtgaaccaggaaaaattgttcctttaccaggcccccctggagcagaaggactgccggggtccccaggcttcccaggtccccaaggagaccgaggctttcccggaaccccaggaaggccaggcctgccaggagagaagggcgctgtgggccagccaggcattggatttccagggccccccggccccaaaggtgttgacggcttacctggagacatggggccaccggggactccaggtcgcccgggatttaatggcttacctgggaacccaggtgtgcagggccagaagggagagcctggagttggtctaccgggactcaaaggtttgccaggtcttcccggcattcctggcacacccggggagaaggggagcattggggtaccaggcgttcctggagaacatggagcgatcggaccccctgggcttcaggggatcagaggtgaaccgggacctcctggattgccaggctccgtggggtctccaggagttccaggaataggcccccctggagctaggggtccccctggaggacagggaccaccggggttgtcaggccctcctggaataaaaggagagaagggtttccccggattccctggactggacatgccgggccctaaaggagataaaggggctcaaggactccctggcataacgggacagtcggggctccctggccttcctggacagcagggggctcctgggattcctgggtttccaggttccaagggagaaatgggcgtcatggggacccccgggcagccgggctcaccaggaccagtgggtgctcctggattaccgggtgaaaaaggggaccatggctttccgggctcctcaggacccaggggagaccctggcttgaaaggtgataagggggatgtcggtctccctggcaagcctggctccatggataaggtggacatgggcagcatgaagggccagaaaggagaccaaggagagaaaggacaaattggaccaattggtgagaagggatcccgaggagaccctgggaccccaggagtgcctggaaaggacgggcaggcaggacagcctgggcagccaggacctaaaggtgatccaggtataagtggaaccccaggtgctccaggacttccgggaccaaaaggatctgttggtggaatgggcttgccaggaacacctggagagaaaggtgtgcctggcatccctggcccacaaggttcacctggcttacctggagacaaaggtgcaaaaggagagaaagggcaggcaggcccacctggcataggcatcccagggctgcgaggtgaaaagggagatcaagggatagcgggtttcccaggaagccctggagagaagggagaaaaaggaagcattgggatcccaggaatgccagggtccccaggccttaaagggtctcccgggagtgttggctatccaggaagtcctgggctacctggagaaaaaggtgacaaaggcctcccaggattggatggcatccctggtgtcaaaggagaagcaggtcttcctgggactcctggccccacaggcccagctggccagaaaggggagccaggcagtgatggaatcccggggtcagcaggagagaagggtgaaccaggtctaccaggaagaggattcccagggtttccaggggccaaaggagacaaaggttcaaagggtgaggtgggtttcccaggattagccgggagcccaggaattcctggatccaaaggagagcaaggattcatgggtcctccggggccccagggacagccggggttaccgggatccccaggccatgccacggaggggcccaaaggagaccgcggacctcagggccagcctggcctgccaggacttccgggacccatggggcctccagggcttcctgggattgatggagttaaaggtgacaaaggaaatccaggctggccaggagcacccggtgtcccagggcccaagggagaccctggattccagggcatgcctggtattggtggctctccaggaatcacaggctctaagggtgatatggggcctccaggagttccaggatttcaaggtccaaaaggtcttcctggcctccagggaattaaaggtgatcaaggcgatcaaggcgtcccgggagctaaaggtctcccgggtcctcctggccccccaggtccttacgacatcatcaaaggggagcccgggctccctggtcctgagggccccccagggctgaaagggcttcagggactgccaggcccgaaaggccagcaaggtgttacaggattggtgggtatacctggacctccaggtattcctgggtttgacggtgcccctggccagaaaggagagatgggacctgccgggcctactggtccaagaggatttccaggtccaccaggccccgatgggttgccaggatccatggggcccccaggcaccccatctgttgatcacggcttccttgtgaccaggcatagtcaaacaatagatgacccacagtgtccttctgggaccaaaattctttaccacgggtactctttgctctacgtgcaaggcaatgaacgggcccatggccaggacttgggcacggccggcagctgcctgcgcaagttcagcacaatgcccttcctgttctgcaatattaacaacgtgtgcaactttgcatcacgaaatgactactcgtactggctgtccacccctgagcccatgcccatgtcaatggcacccatcacgggggaaaacataagaccatttattagtaggtgtgctgtgtgtgaggcgcctgccatggtgatggccgtgcacagccagaccattcagatcccaccgtgccccagcgggtggtcctcgctgtggatcggctactcttttgtgatgcacaccagcgctggtgcagaaggctctggccaagccctggcgtcccccggctcctgcctggaggagtttagaagtgcgccattcatcgagtgtcacggccgtgggacctgcaattactacgcaaacgcttacagcttttggctcgccaccatagagaggagcgagatgttcaagaagcctacgccgtccaccttgaaggcaggggagctgcgcacgcacgtcagccgctgccaagtctgtatgagaagaacataatgaagcctgactcagctaatgtcacaacatggtgctacttcttcttctttttgttaacagcaacgaaccctagaaatatatcctgtgtacctcactgtccaatatgaaaaccgtaaagtgccttataggaatttgcgtaactaacacaccctgcttcattgacctctacttgctgaaggagaaaaagacagcgataagctttcaatagtggcataccaaatggcacttttgatgaaataaaatatcaatattttctgcaatccaatgcactgatgtgtgaagtgagaactccatcagaaaaccaaagggtgctaggaggtgtgggtgccttccatactgtttgcccattttcattcttgtattataattaattttctacccccagagataaatgtttgtttatatcactgtctagctgtttcaaaatttaggtcccttggtctgtacaaataatagcaatgtaaaaatggttttttgaacctccaaatggaattacagactcagtagccatatcttccaaccccccagtataaatttctgtctttctgctatgtgtggtactttgcagctgcttttgcagaaatcacaattttcctgtggaataaagatggtccaaaaatagtcaaaaattaaatatatatatatattagtaatttatatagatgtcagcaattaggcagatcaaggtttagtttaacttccactgttaaaataaagcttacatagttttcttcctttgaaagactgtgctgtcctttaacataggtttttaaagactaggatattgaatgtgaaacatccgttttcattgttcacttctaaaccaaaaattatgtgttgccaaaaccaaacccaggttcatgaatatggtgtctattatagtgaaacatgtactttgagcttattgtttttattctgtattaaatattttcagggttttaaacactaatcacaaactgaatgacttgacttcaaaagcaacaaccttaaaggccgtcatttcattagtattcctcattctgcatcctggcttgaaaaacagctctgttgaatcacagtatcagtattttcacacgtaagcacattcgggccatttccgtggtttctcatgagctgtgttcacagacctcagcagggcatcgcatggaccgcaggagggcagattcggaccactaggcctgaaatgacatttcactaaaagtctccaaaacatttctaagactactaaggccttttatgtaatttctttaaatgtgtatttcttaagaattcaaatttgtaataaaactatttgtataaaaattaagcttttattaatttgttgctagtattgccacagacgcattaaaagaaacttactgcacaagctgctaataaatttgtaagctttgcataccttagat

SEQ ID NO: 7783 - protein, 1669 aa, Homo sapiens; identical to SEQ ID NO: 1134

SEQ ID NO: 7784 - DNA, 1229 bp, Homo sapiens
gcttggagccgccgcacccgggacggtgcgtagcgctggaagtccggccttccgagagctagctgtccgccgcggcccccgcacgccgggcagccgtccctcgccgcctcgggcgcgccaccatggggccccggctcagcgtctggctgctgctgctgcccgccgcccttctgctccacgaggagcacagccgggccgctgcgaagggtggctgtgctggctctggctgtggcaaatgtgactgccatggagtgaagggacaaaagggtgaaagaggcctcccggggttacaaggtgtcattgggtttcctggaatgcaaggacctgaggggccacagggaccaccaggacaaaagggtgatactggagaaccaggactacctggaacaaaagggacaagaggacctccgggagcatctggctaccctggaaacccaggacttcccggaattcctggccaagacggcccgccaggccccccaggtattccaggatgcaatggcacaaagggggagagagggccgctcgggcctcctggcttgcctggtttcgctggaaatcccggaccaccaggcttaccagggatgaagggtgatccaggtgagatacttggccatgtgcccgggatgctgttgaaaggtgaaagaggatttcccggaatcccagggactccaggcccaccaggactgccagggcttcaaggtcctgttgggcctccaggatttaccggaccaccaggtcccccaggccctcccggccctccaggtgaaaagggacaaatgggcttaagttttcaaggaccaaaaggtgacaagggtgaccaaggggtcagtgggcctccaggagtaccaggacaagctcaagttcaagaaaaaggagacttcgccaccaagggagaaaagggccaaaaaggtgaacctggatttcaggggatgccaggggtcggagagaaaggtgaacccggaaaaccaggacccagagagggcagattcggaccactaggcctgaaatgacatttcactaaaagtctccaaaacatttctaagactactaaggccttttatgtaatttctttaaatgtgtatttcttaagaattcaaatttgtaataaaactatttgtataaaaattaagcttttattaatttgttgctagtattgccacagacgcattaaaagaaacttactgcacaagctgctaataaatttgtaagctttgcataccttagat

SEQ ID NO: 7785 - protein, 296 aa, Homo sapiens
MGPRLSVWLLLLPAALLLHEEHSRAAAKGGCAGSGCGKCDCHGVKGQKGERGLPGLQGVIGFPGMQGPEGPQGPPGQKGDTGEPGLPGTKGTRGPPGASGYPGNPGLPGIPGQDGPPGPPGIPGCNGTKGERGPLGPPGLPGFAGNPGPPGLPGMKGDPGEILGHVPGMLLKGERGFPGIPGTPGPPGLPGLQGPVGPPGFTGPPGPPGPPGPPGEKGQMGLSFQGPKGDKGDQGVSGPPGVPGQAQVQEKGDFATKGEKGQKGEPGFQGMPGVGEKGEPGKPGPREGRFGPLGLK

SEQ ID NO: 7786 - DNA, 585 bp, Homo sapiens
gggagcgcgcggcccgggagtgtggctgcagtgcgccgggacaccagggctccgcgctccgcactcaagaggctcccgcgtcccaacccctcgcgcccgcgcgttcgcggatccaggccgaggaccgaaaggggccgcccgagcccccggggccggcgcccagagagcccagcaaggccggccgccctgccggtgtgccgccggcgggtgcttctggaagggccaatgcgttcgggcagcagcccctgaagccgagcccgaggctaagtgggactgaccggggcccagagtggacgaaccgccagcatggggagagaccagcgcgcggtggccggccctgccctacggcggtggctgctgctggggacagtgaccgtggggttcctcgcccagagcgtcttggcggaatattttccactctggcttggcatgggagaagagacaacccctggcaggcaagttcactgctatctgaagcaaatgcggtgcaagctgagatttgtgtccatcgagcattttactgtctttctctgtctcatcccttggtttcatgaaatatgaaaatagaacagcgcacttttcaga

SEQ ID NO: 7787 - protein, 84 aa, Homo sapiens
MGRDQRAVAGPALRRWLLLGTVTVGFLAQSVLAEYFPLWLGMGEETTPGRQVHCYLKQMRCKLRFVSIEHFTVFLCLIPWFHEI

SEQ ID NO: 7788 - DNA, 6286 bp, Homo sapiens
gggagcgcgcggcccgggagtgtggctgcagtgcgccgggacaccagggctccgcgctccgcactcaagaggctcccgcgtcccaacccctcgcgcccgcgcgttcgcggatccaggccgaggaccgaaaggggccgcccgagcccccggggccggcgcccagagagcccagcaaggccggccgccctgccggtgtgccgccggcgggtgcttctggaagggccaatgcgttcgggcagcagcccctgaagccgagcccgaggctaagtgggactgaccggggcccagagtggacgaaccgccagcatggggagagaccagcgcgcggtggccggccctgccctacggcggtggctgctgctggggacagtgaccgtggggttcctcgcccagagcgtcttggcgggtgtgaagaagtttgatgtgccgtgtggaggaagagattgcagtgggggctgccagtgctaccctgagaaaggtggacgtggtcagcctgggccagtgggcccccaggggtacaatgggccaccaggattacaaggattcccgggactgcagggacgtaaaggagacaagggtgaaaggggagcccccggagtaacgggacccaagggcgacgtgggagcaagaggcgtttctggattccctggtgccgatggaattcctggacacccggggcaaggtgggcccaggggaaggccgggctacgatggctgcaacggaacccagggagactcaggtccacaggggccccccggctctgaggggttcaccgggcctcccgggccccaaggaccaaaagggcagaaaggtgagccttatgcactgcctaaagaggagcgcgacagatatcggggtgaacctggagagcctggattggtcggtttccagggacctcccggccgccctgggcatgtgggacagatgggtccagttggagctccagggagaccaggaccacctggaccccctggaccaaaaggacagcaaggcaacagaggacttggtttctacggagttaagggtgaaaagggtgacgtagggcagccgggacccaacgggattccatcagacaccctccaccccatcatcgcgcccacaggagtcaccttccacccagatcagtacaagggtgaaaaaggcagtgagggggaaccaggaataagaggcatttccttgaagggagaagaaggaatcatgggctttcctggactgaggggttaccctggcttgagtggtgaaaaaggatcaccaggacagaagggaagccgaggcctggatggctatcaagggcctgatggaccccggggacccaagggagaagccggagacccagggccccctggactacctgcctactcccctcacccttccctagcaaaaggtgccagaggtgacccgggattcccaggggcccaaggggagccaggaagccagggtgagccaggagacccgggcctcccaggtccccctggcctctccatcggagatggagatcagaggagaggcctgccgggtgagatgggacccaagggcttcatcggagaccccggcatccctgcgctctacgggggcccacctggacctgatggaaagcgagggcctccaggaccccccgggctccctggaccacctggacctgatggcttcctgtttgggctgaaaggagcaaaaggaagagcaggcttccctgggcttcccggctcccctggagcccgcggaccaaaggggtggaaaggtgacgctggggaatgcagatgtacagaaggcgacgaagctatcaaaggtcttccgggactgccaggacccaagggcttcgcaggcatcaacggggagccggggaggaaaggggacagaggagaccccggccaacacggcctccctgggttcccagggctcaagggagtgcctggcaacattggtgctcccggacccaaaggagcaaaaggagattccagaacaatcacaaccaaaggtgagcggggacagcccggcgtcccaggtgtgcccgggatgaaaggtgacgatggcagcccaggccgcgatgggctcgatggattccccggcctcccaggccctcccggtgatggcatcaagggccctccaggggacccaggctatccaggaatacctggaacgaagggtactccaggagaaatgggccccccaggactgggccttcccggcctcaaaggccaacgtggtttccctggagacgccggcttacctggaccaccaggcttcctgggccctcctggccccgcagggaccccaggacaaatagattgtgacacagatgtgaaaagggccgttggaggtgacagacaggaggccatccagccaggttgcataggagggcccaagggattgccaggcctgccaggacccccaggccccacaggtgccaaaggcctccgaggaatcccaggcttcgcaggagctgatggaggaccagggcccaggggcttgccaggagacgcaggtcgtgaagggttcccaggacccccagggttcataggaccccgaggatccaaaggtgcagtgggcctccctggcccagatggatccccaggtcccatcggcctgccagggccagatgggccccctggggaaaggggcctccctggagaagtcctgggagctcagcccgggccacggggagatgctggtgtgcctggacagcctgggcttaaaggccttcccggagacagaggcccccctggattcagaggaagccaagggatgcctgggatgccagggctgaagggccagccaggcctcccaggaccttccggccagccaggcctgtatgggcctccaggactgcatggattcccaggagctcctggccaagaggggcccttggggctgccaggaatcccaggccgtgaaggtctgcctggtgatagaggggaccctggggacacaggcgctcctggccctgtgggcatgaaaggtctctctggtgacagaggagatgctggcttcacaggggagcaaggccatccaggaagccctggatttaaaggaattgatggaatgcctgggacccccgggctaaaaggagatagaggctcacctgggatggatggtttccaaggcatgcctggactcaaagggagacccgggtttccagggagcaaaggcgaggctggatttttcggaatacccggtctgaagggtctggctggtgagccaggttttaaaggcagccgaggggaccctgggcccccaggaccacctcctgtcatcctgccaggaatgaaagacattaaaggagagaaaggagatgaagggcctatggggctgaaaggatacctgggcgcaaaaggtatccaaggaatgccaggcatcccagggctgtcaggaatccctgggctgcctgggaggcccggccacatcaaaggagtcaagggagacatcggagtccccggcatccccggtttgccaggattccctggggtggctggcccccctggaattacgggattcccaggattcataggaagccggggtgacaaaggtgccccagggagagcaggcctgtatggcgagattggcgcgactggtgatttcggtgacatcggggacactataaatttaccaggaagaccaggcctgaagggggagcggggcaccactggaataccaggtctgaagggattctttggagagaagggaacagaaggtgacatcggcttccctgggataacaggcgtgactggagtccaaggccctcctggacttaaaggacaaacaggctttccagggctgactgggcctccagggtcgcagggagagctggggcggattggactgcctggtggcaaaggagatgatggctggccgggagctccgggcttaccaggttttccgggactccgtgggatccgcggcttacacggcttgccaggcaccaagggctttccaggatccccaggttctgacatccacggagacccaggcttcccaggccctcctggggaaagaggtgacccaggagaggccaacacccttccaggccctgtgggagtcccaggacagaaaggagaccaaggagctccaggggaacgaggcccacctgggagcccaggacttcaggggttccctggtatcacacccccttccaacatctctggggcacctggtgacaaaggggcgccagggatatttggcctgaaaggttatcggggcccaccagggccaccaggttctgctgctcttcctggaagcaaaggtgacacagggaacccaggagctccaggaaccccagggaccaaaggatgggccggggactccgggccccagggcaggcctggtgtgtttggtctcccaggagaaaaagggcccaggggtgaacaaggcttcatggggaacactggacccactggggcggtgggcgacagaggccccaagggacccaagggagacccaggattccctggtgcccccgggactgtgggagcccccgggattgcaggaatcccccagaagattgccgtccaaccagggacagtgggtccccaggggaggcgaggcccccctggggcaccgggggagatggggccccagggcccccccggagaaccaggtttccgtggggctccagggaaagctgggccccaaggaagaggtggtgtgtctgctgttcccggcttccggggagatgaaggacccataggccaccaggggccgattggccaagaaggtgcaccaggccgtccagggagcccgggcctgccgggtatgccaggccgcagcgtcagcatcggctacctcctggtgaagcacagccagacggaccaggagcccatgtgcccagtgggcatgaacaaactctggagtggatacagcctgctgtacttcgagggccaggagaaggcgcacaaccaggacctggggctggcgggctcctgcctggcgcggttcagcaccatgcccttcctgtactgcaaccctggtgatgtctgctactatgccagccggaacgacaagtcctactggctctctaccactgcgccgctgcccatgatgcccgtggccgaggacgagatcaagccctacatcagccgctgttctgtgtgtgaggccccggccatcgccatcgcggtccacagtcaggatgtctccatcccacactgcccagctgggtggcggagtttgtggatcggatattccttcctcatgcacacggcggcgggagacgaaggcggtggccaatcactggtgtcaccgggcagctgtctagaggacttccgcgccacaccattcatcgaatgcaatggaggccgcggcacctgccactactacgccaacaagtacagcttctggctgaccaccattcccgagcagagcttccagggctcgccctccgccgacacgctcaaggccggcctcatccgcacacacatcagccgctgccaggtgtgcatgaagaacctgtgagccggcgcgtgccaggaagggccattttggtgcttattcttaacttattacctcaggtgccaacccaaaaattggttttatttttttcttaaaaaaaaaaaagtctaccaaaggaatttgcatccagcagcagcacttagacctgccagccactgtcaccgagcgggtgcaagcactcggggtccctggagggcaagccctgcccacagaaagccaggagcagccctggcccccatcagccctgctagacgcaccgcctgaaggcacagctaaccacttcgcacacacccatgtaaccactgcactttccaatgccacagacaactcacattgttcaactcccttctcggggtgggacagacgagacaacagcacacaggcagccagccgtggccagaggctcgaggggctcagggcctcaggcacccgtccccacacgagggccccgtgggtgggcctggccctgctttctacgccaatgttatgccagctccatgttctcccaaataccgttgatgtgaattattttaaaggcaaaaccgtgctctttattttaaaaaacactgataatcacactgcggtaggtcattcttttgccacatccctatagaccactgggtttggcaaaactcaggcagaagtggagacctttctagacatcattgtcagccttgctacttgaaggtacaccccatagggtcggaggtgctgtccccactgccccacgttgtccctgagatttaacccctccactgctgggggtgagctgtactcttctgactgccccctcctgtgtaacgactacaaaataaaacttggttctgaatatttttaaaccccg

SEQ ID NO: 7789 - protein, 1712 aa, Homo sapiens; identical to SEQ ID NO: 1138

SEQ ID NO: 7790 - DNA, 1283 bp, Homo sapiens
aggggacatggggccacgggcctctgttcttcaaggctctgttcttcaagggacctttaagaggtgattagaccctctggatctgtcggttctggcacttgctctgtaattcaaccacctctccagcatccttcaaatacgcctctttccatgggagcagattttgttggcttttggccactggcccttaagtcctgattagtatctaccccttgagtcctcagggtgctcaggacagaggaagtcaccagaacaggcaataagaaagagtggagaggatctctgttaccttaagaccccagtgagcctcctccctgcttcccagtcacagactctggacagaaaccctgccccccgcccctggcaagatgccagctcccttcctggtcctgatgtcacaggtccctggacatgacctccccaccagggcaggaccccagctcccttcctggttgtgatgtcacaggtcctgacattccacagtgtcctggagaccaaggatgggaaactgtcaaccttcagaacgtccttctccctcagctggagggagcatggcagtgagccaaggagacgggaccctctgctttgtcctcctgctgtgctgttggcaagaaactgagctccggccgagaaccgtgattccaggttcacctactgaaataccattcagttcaaaacaggaggatatgtctgaattattagatgaaattctggtccaggagattttagatctgaataaaacaacaccgagcgaaatgccaagtacagcatcaacattatcaacaccgttacatgctggtattgatgagaattatcaagctggtggttctgagaattaccatgaattattagagaatttacaattctctcctggcattgaggtcaaaatttccaatgatgaagccaatgctaatgcaaatctccatggcgatccttctgagaattatcgtgggccacaggtgtctcctggcagtgagaagagtgtttccagtaaagaaaagaattcaaagaacactcagtatgaaaatctatccattctggaccaaatccttcaaaatattggaagatcttcaggaaacattttccataaagagcagcagaggaccagcgcacagaggaggagccaaggcagtcagtgaggccgcagccccagaccccctgcgcaggagaggagcctgctagaacccccacccaccagcctccggaacagggcacttgtgtgcacacgcccacgttctctgaaccattccacataaaggaaaatcgtttattcacacgatccc

SEQ ID NO: 7791 - protein, 212 aa, Homo sapiens
MGNCQPSERPSPSAGGSMAVSQGDGTLCFVLLLCCWQETELRPRTVIPGSPTEIPFSSKQEDMSELLDEILVQEILDLNKTTPSEMPSTASTLSTPLHAGIDENYQAGGSENYHELLENLQFSPGIEVKISNDEANANANLHGDPSENYRGPQVSPGSEKSVSSKEKNSKNTQYENLSILDQILQNIGRSSGNIFHKEQQRTSAQRRSQGSQ

SEQ ID NO: 7792 - DNA, 701 bp, Homo sapiens
gtgcctggccaataacaccttaatcttcaggtgcaggctgtgaagatgggaaaaggctgtcaatgctctggcttcttcccactgacaggggacgtagtgggaatgggaatgaaccccaagatgaaattctggtccaggagattttagatctgaataaaacaacaccgagcgaaatgccaagtacagcatcaacattatcaacaccgttacatgctggtattgatgagaattatcaagctggtggttctgagaattaccatgaattattagagaatttacaattctctcctggcattgaggtcaaaatttccaatgatgaagccaatgctaatgcaaatctccatggcgatccttctgagaattatcgtgggccacaggtgtctcctggcagtgagaagagtgtttccagtaaagaaaagaattcaaagaacactcagtatgaaaatctatccattctggaccaaatccttcaaaatattggaagatcttcaggaaacattttccataaagagcagcagaggaccagcgcacagaggaggagccaaggcagtcagtgaggccgcagccccagaccccctgcgcaggagaggagcctgctagaacccccacccaccagcctccggaacagggcacttgtgtgcacacgcccacgttctctgaaccattccacataaaggaaaatcgtttattcacacgatccc

SEQ ID NO: 7793 - protein, 164 aa, Homo sapiens
MLWLLPTDRGRSGNGNEPQDEILVQEILDLNKTTPSEMPSTASTLSTPLHAGIDENYQAGGSENYHELLENLQFSPGIEVKISNDEANANANLHGDPSENYRGPQVSPGSEKSVSSKEKNSKNTQYENLSILDQILQNIGRSSGNIFHKEQQRTSAQRRSQGSQ

SEQ ID NO: 7794 - DNA, 1609 bp, Homo sapiens
acagagctttgaggagctggatcaaaattgtgctccacagagagaagataccggtgtcgggaagcaccagtgccctgaggaagggccatttccaaaagccctgtgctgacacagggttgctggttcctcttcaagagcccactctctggggtggggccatatctccagcagaggtgggctggaaaggacccccccaatcccgcccgccgtgagcttagctggagccatggcctctgcacccatctcgatgcttgcgatgctcttcacattgagtgggctgagagctcagtcagtggctcagccggaagatcaggtcaacgttgctgaagggaatcctctgactgtgaaatgcacctattcagtctctggaaacccttatcttttttggtatgttcaataccccaaccgaggcctccagttccttctgaaatacatcacaggggataacctggttaaaggcagctatggctttgaagctgaatttaacaagagccaaacctccttccacctgaagaaaccatctgcccttgtgagcgactccgctttgtacttctgtgctgtgatgcatactctggggctgggagttaccaactcactttcgggaaggggaccaaactctcggtcataccaaatatccagaaccctgaccctgccgtgtaccagctgagagactctaaatccagtgacaagtctgtctgcctattcaccgattttgattctcaaacaaatgtgtcacaaagtaaggattctgatgtgtatatcacagacaaaactgtgctagacatgaggtctatggacttcaagagcaacagtgctgtggcctggagcaacaaatctgactttgcatgtgcaaacgccttcaacaacagcattattccagaagacaccttcttccccagcccagaaagttcctgtgatgtcaagctggtcgagaaaagctttgaaacagatacgaacctaaactttcaaaacctgtcagtgattgggttccgaatcctcctcctgaaagtggccgggtttaatctgctcatgacgctgcggctgtggtccagctgagatctgcaagattgtaagacagcctgtgctccctcgctccttcctctgcattgcccctcttctccctctccaaacagagggaactctcctacccccaaggaggtgaaagctgctaccacctctgtgcccccccggcaatgcaccaactggatcctacccgaatttatgattaagattgctgaagagctgccaaacactgctgccaccccctctgttcccttattgctgcttgtcactgcctgacattcacggcagaggcaaggctgctgcagctccgctggctgtgcacattccctcctgctccccagagactgcctccgccatcccacagatgatggatcttcagtgggttctcttgggctctaggtcccggagaatgttgtgaggggtttatttttttttaatagtgttcataaagaaagacatagtattcttcttctcaagacgtggggggaaattatctcattatcgaggccctgctatgctgtgtgtctgggcgtgttgtatgtcctgctgccgatgccttcattaaaatgatttggaagagcagaga

SEQ ID NO: 7795 - protein, 146 aa, Homo sapiens
MASAPISMLAMLFTLSGLRAQSVAQPEDQVNVAEGNPLTVKCTYSVSGNPYLFWYVQYPNRGLQFLLKYITGDNLVKGSYGFEAEFNKSQTSFHLKKPSALVSDSALYFCAVMHTLGLGVTNSLSGRGPNSRSYQISRTLTLPCTS

SEQ ID NO: 7796 - DNA, 1592 bp, Homo sapiens
ggctgatgtagctcactgatgtctgtgtagacagggagctgtgacgagagcaagaggtcagaacacatccagactccttaagagaaagcctttctgttttggaaacttttcaaagccagggacttgtccagcccaacctccccattgctcctagctcctgaggctcaggacccctggcttctgtcctccctgctcagggtcctgcagcgttgcctctgctcagccatgctcctgctgctcgtcccagtgctcgaggtgatttttactctgggaggaaccagagcccagtcggtgacccagcttgacagccacgtctctgtctctgaaggaaccccggtgctgctgaggtgcaactactcatcttcttattcaccatctctcttctggtatgtgcaacaccccaacaaaggactccagcttctcctgaagtacacatcagcggccaccctggttaaaggcatcaacggttttgaggctgaatttaagaagagtgaaacctccttccacctgacgaaaccctcagcccatatgagcgacgcggctgagtacttcttgtaacaccaatgcaggcaaatcaacctttggggatgggactacgctcactgtgaagccaaatatccagaaccctgaccctgccgtgtaccagctgagagactctaaatccagtgacaagtctgtctgcctattcaccgattttgattctcaaacaaatgtgtcacaaagtaaggattctgatgtgtatatcacagacaaaactgtgctagacatgaggtctatggacttcaagagcaacagtgctgtggcctggagcaacaaatctgactttgcatgtgcaaacgccttcaacaacagcattattccagaagacaccttcttccccagcccagaaagttcctgtgatgtcaagctggtcgagaaaagctttgaaacagatacgaacctaaactttcaaaacctgtcagtgattgggttccgaatcctcctcctgaaagtggccgggtttaatctgctcatgacgctgcggctgtggtccagctgagatctgcaagattgtaagacagcctgtgctccctcgctccttcctctgcattgcccctcttctccctctccaaacagagggaactctcctacccccaaggaggtgaaagctgctaccacctctgtgcccccccggcaatgcaccaactggatcctacccgaatttatgattaagattgctgaagagctgccaaacactgctgccaccccctctgttcccttattgctgcttgtcactgcctgacattcacggcagaggcaaggctgctgcagctccgctggctgtgcacattccctcctgctccccagagactgcctccgccatcccacagatgatggatcttcagtgggttctcttgggctctaggtcccggagaatgttgtgaggggtttatttttttttaatagtgttcataaagaaagacatagtattcttcttctcaagacgtggggggaaattatctcattatcgaggccctgctatgctgtgtgtctgggcgtgttgtatgtcctgctgccgatgccttcattaaaatgatttggaagagcagaga

SEQ ID NO: 7797 - protein, 110 aa, Homo sapiens
MLLLLVPVLEVIFTLGGTRAQSVTQLDSHVSVSEGTPVLLRCNYSSSYSPSLFWYVQHPNKGLQLLLKYTSAATLVKGINGFEAEFKKSETSFHLTKPSAHMSDAAEYFL

SEQ ID NO: 7798 - DNA, 1502 bp, Homo sapiens
gtgagaaacccctatggctgccagaggagagaagagacaacctgatgatagaagtaactcttataactggaggttgcaggtcaatgactgatcttaattgggaagaacaaggatgacatccattcgagctgtatttatattcctgtggctgcagctggacttggtgaatggagagaatgtggagcagcatccttcaaccctgagtgtccaggagggagacagcgctgttatcaagtgtacttattcagacagtgcctcaaactacttcccttggtataagcaagaacttggaaaaggacctcagcttattatagacattcgttcaaatgtgggcgaaaagaaagaccaacgaattgctgttacattgaacaagacagccaaacatttctccctgcacatcacagagacccaacctgaagactcggctgtctacttctgtgcagcaagtacacattatggctgtgtgaaaacctcctacgacaaggtgatatttgggccagggacaagcttatcagtcattccaaatatccagaaccctgaccctgccgtgtaccagctgagagactctaaatccagtgacaagtctgtctgcctattcaccgattttgattctcaaacaaatgtgtcacaaagtaaggattctgatgtgtatatcacagacaaaactgtgctagacatgaggtctatggacttcaagagcaacagtgctgtggcctggagcaacaaatctgactttgcatgtgcaaacgccttcaacaacagcattattccagaagacaccttcttccccagcccagaaagttcctgtgatgtcaagctggtcgagaaaagctttgaaacagatacgaacctaaactttcaaaacctgtcagtgattgggttccgaatcctcctcctgaaagtggccgggtttaatctgctcatgacgctgcggctgtggtccagctgagatctgcaagattgtaagacagcctgtgctccctcgctccttcctctgcattgcccctcttctccctctccaaacagagggaactctcctacccccaaggaggtgaaagctgctaccacctctgtgcccccccggcaatgcaccaactggatcctacccgaatttatgattaagattgctgaagagctgccaaacactgctgccaccccctctgttcccttattgctgcttgtcactgcctgacattcacggcagaggcaaggctgctgcagctccgctggctgtgcacattccctcctgctccccagagactgcctccgccatcccacagatgatggatcttcagtgggttctcttgggctctaggtcccggagaatgttgtgaggggtttatttttttttaatagtgttcataaagaaagacatagtattcttcttctcaagacgtggggggaaattatctcattatcgaggccctgctatgctgtgtgtctgggcgtgttgtatgtcctgctgccgatgccttcattaaaatgatttggaagagcagaga

SEQ ID NO: 7799 - protein, 278 aa, Homo sapiens
MTSIRAVFIFLWLQLDLVNGENVEQHPSTLSVQEGDSAVIKCTYSDSASNYFPWYKQELGKGPQLIIDIRSNVGEKKDQRIAVTLNKTAKHFSLHITETQPEDSAVYFCAASTHYGCVKTSYDKVIFGPGTSLSVIPNIQNPDPAVYQLRDSKSSDKSVCLFTDFDSQTNVSQSKDSDVYITDKTVLDMRSMDFKSNSAVAWSNKSDFACANAFNNSIIPEDTFFPSPESSCDVKLVEKSFETDTNLNFQNLSVIGFRILLLKVAGFNLLMTLRLWSS

SEQ ID NO: 7800 - DNA, 1644 bp, Homo sapiens
atccactgagcctcctccctgcagctggctgatgtagctcactggtgtctgtgtagatagggagctgtgatgagaacaagaggtcagaacacatccaggctccttaagagaaagcctttctttaaccatttttgaaacccttcaaaggcagagacttgtccagcctaacctgcctgctgctcctagctcctgaggctcagggcccttggcttctgtccgctctgctcagggccctccagcgtggccactgctcagccatgctcctgctgctcgtcccagtgctcgaggtgatttttaccctgggaggaaccagagcccagtcggtgacccagcttggcagccacgtctctgtctctgaaggagccctggttctgctgaggtgcaactactcatcgtctgttccaccatatctcttctggtatgtgcaataccccaaccaaggactccagcttctcctgaagtacacatcagcggccaccctggttaaaggcatcaacggttttgaggctgaatttaagaagagtgaaacctccttccacctgacgaaaccctcagcccatatgagcgacgcggctgagtacttctgtgctgtgagtgacacatgggggtacagcagtgcttccaagataatctttggatcagggaccagactcagcatccggccaaatatccagaaccctgaccctgccgtgtaccagctgagagactctaaatccagtgacaagtctgtctgcctattcaccgattttgattctcaaacaaatgtgtcacaaagtaaggattctgatgtgtatatcacagacaaaactgtgctagacatgaggtctatggacttcaagagcaacagtgctgtggcctggagcaacaaatctgactttgcatgtgcaaacgccttcaacaacagcattattccagaagacaccttcttccccagcccagaaagttcctgtgatgtcaagctggtcgagaaaagctttgaaacagatacgaacctaaactttcaaaacctgtcagtgattgggttccgaatcctcctcctgaaagtggccgggtttaatctgctcatgacgctgcggctgtggtccagctgagatctgcaagattgtaagacagcctgtgctccctcgctccttcctctgcattgcccctcttctccctctccaaacagagggaactctcctacccccaaggaggtgaaagctgctaccacctctgtgcccccccggcaatgcaccaactggatcctacccgaatttatgattaagattgctgaagagctgccaaacactgctgccaccccctctgttcccttattgctgcttgtcactgcctgacattcacggcagaggcaaggctgctgcagctccgctggctgtgcacattccctcctgctccccagagactgcctccgccatcccacagatgatggatcttcagtgggttctcttgggctctaggtcccggagaatgttgtgaggggtttatttttttttaatagtgttcataaagaaagacatagtattcttcttctcaagacgtggggggaaattatctcattatcgaggccctgctatgctgtgtgtctgggcgtgttgtatgtcctgctgccgatgccttcattaaaatgatttggaagagcagaga

SEQ ID NO: 7801 - protein, 277 aa, Homo sapiens
MLLLLVPVLEVIFTLGGTRAQSVTQLGSHVSVSEGALVLLRCNYSSSVPPYLFWYVQYPNQGLQLLLKYTSAATLVKGINGFEAEFKKSETSFHLTKPSAHMSDAAEYFCAVSDTWGYSSASKIIFGSGTRLSIRPNIQNPDPAVYQLRDSKSSDKSVCLFTDFDSQTNVSQSKDSDVYITDKTVLDMRSMDFKSNSAVAWSNKSDFACANAFNNSIIPEDTFFPSPESSCDVKLVEKSFETDTNLNFQNLSVIGFRILLLKVAGFNLLMTLRLWSS

SEQ ID NO: 7802 - DNA, 1611 bp, Homo sapiens
gcagctggctgatgtagctcactggtgtctgtgtagatagggagctgtgatgagaacaagaggtcagaacacatccaggctccttaagagaaagcctttctttaaccatttttgaaacccttcaaaggcagagacttgtccagcctaacctgcctgctgctcctagctcctgaggctcagggcccttggcttctgtccgctctgctcagggccctccagcgtggccactgctcagccatgctcctgctgctcgtcccagtgctcgaggtgatttttaccctgggaggaaccagagcccagtcggtgacccagcttggcagccacgtctctgtctctgaaggagccctggttctgctgaggtgcaactactcatcgtctgttccaccatatctcttctggtatgtgcaataccccaaccaaggactccagcttctcctgaagtacacatcagcggccaccctggttaaaggcatcaacggttttgaggctgaatttaagaagagtgaaacctccttccacctgacgaaaccctcagcccatatgagcgacgcggctgagtacttctgtgctgtgataataatgcaggcaacatgctcacctttggagggggaacaaggttaatggtcaaaccccatatccagaaccctgaccctgccgtgtaccagctgagagactctaaatccagtgacaagtctgtctgcctattcaccgattttgattctcaaacaaatgtgtcacaaagtaaggattctgatgtgtatatcacagacaaaactgtgctagacatgaggtctatggacttcaagagcaacagtgctgtggcctggagcaacaaatctgactttgcatgtgcaaacgccttcaacaacagcattattccagaagacaccttcttccccagcccagaaagttcctgtgatgtcaagctggtcgagaaaagctttgaaacagatacgaacctaaactttcaaaacctgtcagtgattgggttccgaatcctcctcctgaaagtggccgggtttaatctgctcatgacgctgcggctgtggtccagctgagatctgcaagattgtaagacagcctgtgctccctcgctccttcctctgcattgcccctcttctccctctccaaacagagggaactctcctacccccaaggaggtgaaagctgctaccacctctgtgcccccccggcaatgcaccaactggatcctacccgaatttatgattaagattgctgaagagctgccaaacactgctgccaccccctctgttcccttattgctgcttgtcactgcctgacattcacggcagaggcaaggctgctgcagctccgctggctgtgcacattccctcctgctccccagagactgcctccgccatcccacagatgatggatcttcagtgggttctcttgggctctaggtcccggagaatgttgtgaggggtttatttttttttaatagtgttcataaagaaagacatagtattcttcttctcaagacgtggggggaaattatctcattatcgaggccctgctatgctgtgtgtctgggcgtgttgtatgtcctgctgccgatgccttcattaaaatgatttggaagagcagaga

SEQ ID NO: 7803 - protein, 155 aa, Homo sapiens [sequence omitted]

SEQ ID NO: 7804 - DNA, 1468 bp, Homo sapiens
ggaaagaaaggaatacccgatgatggaagtagctcttatggctggagattgcaggtttatgactgatcctatttgggaagaacaatgatggcaggcattcgagctttatttatgtacttgtggctgcagctggactgggtgagcagaggagagagtgtggggctgcatcttcctaccctgagtgtccaggagggtgacaactctattatcaactgtgcttattcaaacagcgcctcagactacttcatttggtacaagcaagaatctggaaaaggtcctcaattcattatagacattcgttcaaatatggacaaaaggcaaggccaaagagtcaccgttttattgaataagacagtgaaacatctctctctgcaaattgcagctactcaacctggagactcagctgtctacttttgtgcagatgtgatactcacgggaggaggaaacaaactcacctttgggacaggcactcagctaaaagtggaactcaatatccagaaccctgaccctgccgtgtaccagctgagagactctaaatccagtgacaagtctgtctgcctattcaccgattttgattctcaaacaaatgtgtcacaaagtaaggattctgatgtgtatatcacagacaaaactgtgctagacatgaggtctatggacttcaagagcaacagtgctgtggcctggagcaacaaatctgactttgcatgtgcaaacgccttcaacaacagcattattccagaagacaccttcttccccagcccagaaagttcctgtgatgtcaagctggtcgagaaaagctttgaaacagatacgaacctaaactttcaaaacctgtcagtgattgggttccgaatcctcctcctgaaagtggccgggtttaatctgctcatgacgctgcggctgtggtccagctgagatctgcaagattgtaagacagcctgtgctccctcgctccttcctctgcattgcccctcttctccctctccaaacagagggaactctcctacccccaaggaggtgaaagctgctaccacctctgtgcccccccggcaatgcaccaactggatcctacccgaatttatgattaagattgctgaagagctgccaaacactgctgccaccccctctgttcccttattgctgcttgtcactgcctgacattcacggcagaggcaaggctgctgcagctccgctggctgtgcacattccctcctgctccccagagactgcctccgccatcccacagatgatggatcttcagtgggttctcttgggctctaggtcccggagaatgttgtgaggggtttatttttttttaatagtgttcataaagaaagacatagtattcttcttctcaagacgtggggggaaattatctcattatcgaggccctgctatgctgtgtgtctgggcgtgttgtatgtcctgctgccgatgccttcattaaaatgatttggaagagcagaga

SEQ ID NO: 7805 - protein, 276 aa, Homo sapiens [sequence omitted]

SEQ ID NO: 7806 - DNA, 520 bp, Homo sapiens
attcttctctcaccatgccaggttcacctcacagtacagagtcctgaaaataaagaagaagatttttttttatctagaaaaggaaccaaacatgtcactttctagcctgctgaaggtggtcacagcttcactgtggctaggacctggcattgcccagaagataactcaaacccaaccaggaatgttcgtgcaggaaaaggaggctgtgactctggactgcacatatgacaccagtgatcaaagttatggtctattctggtacaagcagcccagcagtggggaaatgatttttcttatttatcaggggtcttatgacgagcaaaatgcaacagaaggtcgctactcattgaatttccagaaggcaagaaaatccgccaaccttgtcatctccgcttcacaactgggggactcagcaatgtatttctgtgcaatgagagagggcacagtgacagcaacatgctcacctttggagggggaacaaggttaatggtcaaaccccgtgagtatctctgctgaatcc

SEQ ID NO: 7807 - protein, 131 aa, Homo sapiens
MSLSSLLKVVTASLWLGPGIAQKITQTQPGMFVQEKEAVTLDCTYDTSDQSYGLFWYKQPSSGEMIFLIYQGSYDEQNATEGRYSLNFQKARKSANLVISASQLGDSAMYFCAMREGTVTATCSPLEGEQG

SEQ ID NO: 7808 - DNA, 1226 bp, Homo sapiens
gttcacctcacagtacagagtcctgaaaataaagaagaagatttttttttatctagaaaaggaaccaaacatgtcactttctagcctgctgaaggtggtcacagcttcactgtggctaggacctggcattgcccagaagataactcaaacccaaccaggaatgttcgtgcaggaaaaggaggctgtgactctggactgcacatatgacaccagtgatcaaagttatggtctattctggtacaagcagcccagcagtggggaaatgatttttcttatttatcaggggtcttatgacgagcaaaatgcaacagaaggtcgctactcattgaatttccagaaggcaagaaaatccgccaaccttgtcatctccgcttcacaactgggggactcagcaatgtatttctgtgcaatgagatgctgtgacaccgataaactcatctttggaaaaggaacccgtgtgactgtggaaccaagaagtcagcctcataccaaaccatccgtttttgtcatgaaaaatggaacaaatgtcgcttgtctggtgaaggaattctaccccaaggatataagaataaatctcgtgtcatccaagaagataacagagtttgatcctgctattgtcatctctcccagtgggaagtacaatgctgtcaagcttggtaaatatgaagattcaaattcagtgacatgttcagttcaacacgacaataaaactgtgcactccactgactttgaagtgaagacagattctacagatcacgtaaaaccaaaggaaactgaaaacacaaagcaaccttcaaagagctgccataaacccaaagccatagttcataccgagaaggtgaacatgatgtccctcacagtgcttgggctacgaatgctgtttgcaaagactgttgccgtcaattttctcttgactgccaagttatttttcttgtaaggctgactggcatgaggaagctacactcctgaagaaaccaaaggcttacaaaaatgcatctccttggcttctgacttctttgtgattcaagttgacctgtcatagccttgttaaaatggctgctagccaaaccactttttcttcaaagacaacaaacccagctcatcctccagcttgatgggaagacaaaagtcctggggaaggggggtttatgtcctaactgctttgtatgctgttttataaagggatagaaggatataaaaagatataggactctttttttactcct

SEQ ID NO: 7809 - protein, 288 aa, Homo sapiens
MSLSSLLKVVTASLWLGPGIAQKITQTQPGMFVQEKEAVTLDCTYDTSDQSYGLFWYKQPSSGEMIFLIYQGSYDEQNATEGRYSLNFQKARKSANLVISASQLGDSAMYFCAMRCCDTDKLIFGKGTRVTVEPRSQPHTKPSVFVMKNGTNVACLVKEFYPKDIRINLVSSKKITEFDPAIVISPSGKYNAVKLGKYEDSNSVTCSVQHDNKTVHSTDFEVKTDSTDHVKPKETENTKQPSKSCHKPKAIVHTEKVNMMSLTVLGLRMLFAKTVAVNFLLTAKLFFL

SEQ ID NO: 7810 - DNA, 1988 bp, Homo sapiens
gttcacctcacagtacagagtcctgaaaataaagaagaagatttttttttatctagaaaaggaaccaaacatgtcactttctagcctgctgaaggtggtcacagcttcactgtggctaggacctggcattgcccagaagataactcaaacccaaccaggaatgttcgtgcaggaaaaggaggctgtgactctggactgcacatatgacaccagtgatcaaagttatggtctattctggtacaagcagcccagcagtggggaaatgatttttcttatttatcaggggtcttatgacgagcaaaatgcaacagaaggtcgctactcattgaatttccagaaggcaagaaaatccgccaaccttgtcatctccgcttcacaactgggggactcagcaatgtatttctgtgcaatgagatgctgtgacaccgataaactcatctttggaaaaggaacccgtgtgactgtggaaccaagaagtcagcctcataccaaaccatccgtttttgtcatgaaaaatggaacaaatgtcgcttgtctggtgaaggaattctaccccaaggatataagaataaatctcgtgtcatccaagaagataacagagtttgatcctgctattgtcatctctcccagtgggaagtacaatgctgtcaagcttggtaaatatgaagattcaaattcagtgacatgttcagttcaacacgacaataaaactgtgcactccactgactttgaagtgaagacagattctacagatcacgtaaaaccaaaggaaactgaaaacacaaagcaaccttcaaagagctgccataaacccaaagccatagttcataccgagaaggtgaacatgatgtccctcacagtgcttgggctacgaatgctgtttgcaaagactgttgccgtcaattttctcttgactgccaagttatttttcttgtaaggctgactggcatgaggaagctacactcctgaagaaaccaaaggcttacaaaaatgcatctccttggcttctgacttctttgtgattcaagttgacctgtcatagccttgttaaaatggctgctagccaaaccactttttcttcaaagacaacaaacccagctcatcctccagcttgatgggaagacaaaagtcctggggaaggggggtttatgtcctaactgctttgtatgctgttttataaagggatagaaggatataaaaagatataggactctttttttactcctacaagtgatacactttgaaaatgatgttttgttccttttgactttctttaccttttgaagtagaaagtgggaaccaacaggttcacagcttcattcctcatgaggcaaataggccttgggagaagaagagcgggtgcccttttatctaaacatggaaggctctgctcaactgagcactagatttgctacaaaccagcatcatcttcttcctcctgtcctcacggcttgtcccaccctctatgttcacttcaggagccacactagagattctgcatggcgtggaggaggacaaagtttcagcactttctgcctctcctaatactttacaaatgagattacatttgaatttgctaatactttatgagcaggcaatgaggtttccaaaatctcatctaaatactctccaatctattagcaaaaatcagagtaaaatacagaggaaaggcactgctttctgttaattgatttaacatgcatgaattagctccctctgagttccaggcactatgctgagagtacaaagaagacacaagtctgctttcaagcaactcactgtgaaagtgtttttgaagggaggaacagaaatgagacccctatctttccctataaaaacaacatttttactgtcttttgcctgccaatctgtatttgaaaccattggacactgattctctggcctgggactttggcattgatggttttctgcctttcttctcagcctctgcctctattgcatttattaaactgcattgtgtgcacctc

SEQ ID NO: 7811 - protein, 288 aa, Homo sapiens; identical to SEQ ID NO: 7809

SEQ ID NO: 7812 - DNA, 1441 bp, Homo sapiens
tgtgatttcttcatgttaaggatcaagaccattatttgggtaacacactaaagatgaactattctccaggcttagtatctctgatactcttactgcttggaagaacccgtggaaattcagtgacccagatggaagggccagtgactctctcagaagaggccttcctgactataaactgcacgtacacagccacaggatacccttcccttttctggtatgtccaatatcctggagaaggtctacagctcctcctgaaagccacgaaggctgatgacaagggaagcaacaaaggttttgaagccacataccgtaaagaaaccacttctttccacttggagaaaggctcagttcaagtgtcagactcagcggtgtacttctgtgctctgatgcagtgctaatgctggtggtactagctatggaaagctgacatttggacaagggaccatcttgactgtccatccaaatatccagaaccctgaccctgccgtgtaccagctgagagactctaaatccagtgacaagtctgtctgcctattcaccgattttgattctcaaacaaatgtgtcacaaagtaaggattctgatgtgtatatcacagacaaaactgtgctagacatgaggtctatggacttcaagagcaacagtgctgtggcctggagcaacaaatctgactttgcatgtgcaaacgccttcaacaacagcattattccagaagacaccttcttccccagcccagaaagttcctgtgatgtcaagctggtcgagaaaagctttgaaacagatacgaacctaaactttcaaaacctgtcagtgattgggttccgaatcctcctcctgaaagtggccgggtttaatctgctcatgacgctgcggctgtggtccagctgagatctgcaagattgtaagacagcctgtgctccctcgctccttcctctgcattgcccctcttctccctctccaaacagagggaactctcctacccccaaggaggtgaaagctgctaccacctctgtgcccccccggcaatgcaccaactggatcctacccgaatttatgattaagattgctgaagagctgccaaacactgctgccaccccctctgttcccttattgctgcttgtcactgcctgacattcacggcagaggcaaggctgctgcagctccgctggctgtgcacattccctcctgctccccagagactgcctccgccatcccacagatgatggatcttcagtgggttctcttgggctctaggtcccggagaatgttgtgaggggtttatttttttttaatagtgttcataaagaaagacatagtattcttcttctcaagacgtggggggaaattatctcattatcgaggccctgctatgctgtgtgtctgggcgtgttgtatgtcctgctgccgatgccttcattaaaatgatttggaagagcagaga

SEQ ID NO: 7813 - protein, 114 aa, Homo sapiens
MNYSPGLVSLILLLLGRTRGNSVTQMEGPVTLSEEAFLTINCTYTATGYPSLFWYVQYPGEGLQLLLKATKADDKGSNKGFEATYRKETTSFHLEKGSVQVSDSAVYFCALMQC

SEQ ID NO: 7814 - DNA, 1439 bp, Homo sapiens
attatttttttttcgtgtttaaggtttgaatcctcagtgaaccagggcagaaaagaatgatgaaatccttgagagttttactggtgatcctgtggcttcagttaagctgggtttggagccaacagaaggaggtggagcaggatcctggaccactcagtgttccagagggagccattgtttctctcaactgcacttacagcaacagtgcttttcaatacttcatgtggtacagacagtattccagaaaaggccctgagttgctgatgtacacatactccagtggtaacaaagaagatggaaggtttacagcacaggtcgataaatccagcaagtatatctccttgttcatcagagactcacagcccagtgattcagccacctacctctgtgcaatgagcgcacatggaacaccggtaaccagttctattttgggacagggacaagtttgacggtcattccaaatatccagaaccctgaccctgccgtgtaccagctgagagactctaaatccagtgacaagtctgtctgcctattcaccgattttgattctcaaacaaatgtgtcacaaagtaaggattctgatgtgtatatcacagacaaaactgtgctagacatgaggtctatggacttcaagagcaacagtgctgtggcctggagcaacaaatctgactttgcatgtgcaaacgccttcaacaacagcattattccagaagacaccttcttccccagcccagaaagttcctgtgatgtcaagctggtcgagaaaagctttgaaacagatacgaacctaaactttcaaaacctgtcagtgattgggttccgaatcctcctcctgaaagtggccgggtttaatctgctcatgacgctgcggctgtggtccagctgagatctgcaagattgtaagacagcctgtgctccctcgctccttcctctgcattgcccctcttctccctctccaaacagagggaactctcctacccccaaggaggtgaaagctgctaccacctctgtgcccccccggcaatgcaccaactggatcctacccgaatttatgattaagattgctgaagagctgccaaacactgctgccaccccctctgttcccttattgctgcttgtcactgcctgacattcacggcagaggcaaggctgctgcagctccgctggctgtgcacattccctcctgctccccagagactgcctccgccatcccacagatgatggatcttcagtgggttctcttgggctctaggtcccggagaatgttgtgaggggtttatttttttttaatagtgttcataaagaaagacatagtattcttcttctcaagacgtggggggaaattatctcattatcgaggccctgctatgctgtgtgtctgggcgtgttgtatgtcctgctgccgatgccttcattaaaatgatttggaagagcagaga

SEQ ID NO: 7815 - protein, 130 aa, Homo sapiens
MMKSLRVLLVILWLQLSWVWSQQKEVEQDPGPLSVPEGAIVSLNCTYSNSAFQYFMWYRQYSRKGPELLMYTYSSGNKEDGRFTAQVDKSSKYISLFIRDSQPSDSATYLCAMSAHGTPVTSSILGQGQV

SEQ ID NO: 7816 - DNA, 624 bp, Homo sapiens
gtagctcgttgatatctgtgtggatagggagctgtgacgagagcaagaggtcagaacacatccaggctccttaagggaaagcctctttctgtttctgaaacttttcaaagccagggacttgtccaatccaacctcctcacagttcctagctcctgaggctcagcgcccttggcttctgtccgcccagctcaaggtcctgcagcattgccactgctcagccatgctcctgctgctcgtcccagcgttccaggtgatttttaccctgggaggaaccagagcccagtctgtgacccagcttgacagccaagtccctgtctttgaagaagcccctgtggagctgaggtgcaactactcatcgtctgtttcagtgtatctcttctggtatgtgcaataccccaaccaaggactccagcttctcctgaagtatttatcaggatccaccctggttaaaggcatcaacggttttgaggctgaatttaacaagagtcaaacttccttccacttgaggaaaccctcagtccatataagcgacacggctgagtacttctgtgctgtgagtgacacatcagggcggatctgaaaagctggtctttggaaagggaacgaaactgacagtaaacccat

SEQ ID NO: 7817 - protein, 119 aa, Homo sapiens
MLLLLVPAFQVIFTLGGTRAQSVTQLDSQVPVFEEAPVELRCNYSSSVSVYLFWYVQYPNQGLQLLLKYLSGSTLVKGINGFEAEFNKSQTSFHLRKPSVHISDTAEYFCAVSDTSGRI

SEQ ID NO: 7818 - DNA, 1503 bp, Homo sapiens
gggaggaacctgagactaggggacagaaagactagggattcacccagtaaagagagctcatctgtgactgaggagccttgctccatttcaggtcttctgtgatttcaataaggaagaagaatggaaactctcctgggagtgtctttggtgattctatggcttcaactggctagggtgaacagtcaacagggagaagaggatcctcaggccttgagcatccaggagggtgaaaatgccaccatgaactgcagttacaaaactagtataaacaatttacagtggtatagacaaaattcaggtagaggccttgtccacctaattttaatacgttcaaatgaaagagagaaacacagtggaagattaagagtcacgcttgacacttccaagaaaagcagttccttgttgatcacggcttcccgggcagcagacactgcttcttacttctgtgctacggacgcacagtactcacgggaggaggaaacaaactcacctttgggacaggcactcagctaaaagtggaactcaatatccagaaccctgaccctgccgtgtaccagctgagagactctaaatccagtgacaagtctgtctgcctattcaccgattttgattctcaaacaaatgtgtcacaaagtaaggattctgatgtgtatatcacagacaaaactgtgctagacatgaggtctatggacttcaagagcaacagtgctgtggcctggagcaacaaatctgactttgcatgtgcaaacgccttcaacaacagcattattccagaagacaccttcttccccagcccagaaagttcctgtgatgtcaagctggtcgagaaaagctttgaaacagatacgaacctaaactttcaaaacctgtcagtgattgggttccgaatcctcctcctgaaagtggccgggtttaatctgctcatgacgctgcggctgtggtccagctgagatctgcaagattgtaagacagcctgtgctccctcgctccttcctctgcattgcccctcttctccctctccaaacagagggaactctcctacccccaaggaggtgaaagctgctaccacctctgtgcccccccggcaatgcaccaactggatcctacccgaatttatgattaagattgctgaagagctgccaaacactgctgccaccccctctgttcccttattgctgcttgtcactgcctgacattcacggcagaggcaaggctgctgcagctccgctggctgtgcacattccctcctgctccccagagactgcctccgccatcccacagatgatggatcttcagtgggttctcttgggctctaggtcccggagaatgttgtgaggggtttatttttttttaatagtgttcataaagaaagacatagtattcttcttctcaagacgtggggggaaattatctcattatcgaggccctgctatgctgtgtgtctgggcgtgttgtatgtcctgctgccgatgccttcattaaaatgatttggaagagcagaga

SEQ ID NO: 7819 - protein, 130 aa, Homo sapiens
METLLGVSLVILWLQLARVNSQQGEEDPQALSIQEGENATMNCSYKTSINNLQWYRQNSGRGLVHLILIRSNEREKHSGRLRVTLDTSKKSSSLLITASRAADTASYFCATDAQYSREEETNSPLGQALS

SEQ ID NO: 7820 - DNA, 1504 bp, Homo sapiens
gtaaaaggcagaagcctcacacagcccagtaactttgctagtacctcttgagtgcaaggtggagaattaagatctggatttgagacggagcacggaacatttcactcaggggaagagctatgaacatgctgactgccagcctgttgagggcagtcatagcctccatctgtgttgtatccagcatggctcagaaggtaactcaagcgcagactgaaatttctgtggtggagaaggaggatgtgaccttggactgtgtgtatgaaacccgtgatactacttattacttattctggtacaagcaaccaccaagtggagaattggttttccttattcgtcggaactcttttgatgagcaaaatgaaataagtggtcggtattcttggaacttccagaaatccaccagttccttcaacttcaccatcacagcctcacaagtcgtggactcagcagtatacttctgtgctctgagtgagcagtgcttccaagataatctttggatcagggaccagactcagcatccggccaaatatccagaaccctgaccctgccgtgtaccagctgagagactctaaatccagtgacaagtctgtctgcctattcaccgattttgattctcaaacaaatgtgtcacaaagtaaggattctgatgtgtatatcacagacaaaactgtgctagacatgaggtctatggacttcaagagcaacagtgctgtggcctggagcaacaaatctgactttgcatgtgcaaacgccttcaacaacagcattattccagaagacaccttcttccccagcccagaaagttcctgtgatgtcaagctggtcgagaaaagctttgaaacagatacgaacctaaactttcaaaacctgtcagtgattgggttccgaatcctcctcctgaaagtggccgggtttaatctgctcatgacgctgcggctgtggtccagctgagatctgcaagattgtaagacagcctgtgctccctcgctccttcctctgcattgcccctcttctccctctccaaacagagggaactctcctacccccaaggaggtgaaagctgctaccacctctgtgcccccccggcaatgcaccaactggatcctacccgaatttatgattaagattgctgaagagctgccaaacactgctgccaccccctctgttcccttattgctgcttgtcactgcctgacattcacggcagaggcaaggctgctgcagctccgctggctgtgcacattccctcctgctccccagagactgcctccgccatcccacagatgatggatcttcagtgggttctcttgggctctaggtcccggagaatgttgtgaggggtttatttttttttaatagtgttcataaagaaagacatagtattcttcttctcaagacgtggggggaaattatctcattatcgaggccctgctatgctgtgtgtctgggcgtgttgtatgtcctgctgccgatgccttcattaaaatgatttggaagagcagaga

SEQ ID NO: 7821 - protein, 140 aa, Homo sapiens
MNMLTASLLRAVIASICVVSSMAQKVTQAQTEISVVEKEDVTLDCVYETRDTTYYLFWYKQPPSGELVFLIRRNSFDEQNEISGRYSWNFQKSTSSFNFTITASQVVDSAVYFCALSEQCFQDNLWIRDQTQHPAKYPEP

SEQ ID NO: 7822 - DNA, 1472 bp, Homo sapiens
gcattacagaatatgaactaagatacagaagtggcgcctctgagaaaagaaggttggaattatcgtaatttgtttctaggctgagataccagcatggagaaaatgttggagtgtgcattcatagtcttgtggcttcagcttggctggttgagtggagaagaccaggtgacgcagagtcccgaggccctgagactccaggagggagagagtagcagtcttaactgcagttacacagtcagcggtttaagagggctgttctggtataggcaagatcctgggaaaggccctgaattcctcttcaccctgtattcagctggggaagaaaaggagaaagaaaggctaaaagccacattaacaaagaaggaaagctttctgcacatcacagcccctaaacctgaagactcagccacttatctctgtgctgtgcaggcacagcggaggaagccaaggaaatctcatctttggaaaaggcactaaactctctgttaaaccaaatatccagaaccctgaccctgccgtgtaccagctgagagactctaaatccagtgacaagtctgtctgcctattcaccgattttgattctcaaacaaatgtgtcacaaagtaaggattctgatgtgtatatcacagacaaaactgtgctagacatgaggtctatggacttcaagagcaacagtgctgtggcctggagcaacaaatctgactttgcatgtgcaaacgccttcaacaacagcattattccagaagacaccttcttccccagcccagaaagttcctgtgatgtcaagctggtcgagaaaagctttgaaacagatacgaacctaaactttcaaaacctgtcagtgattgggttccgaatcctcctcctgaaagtggccgggtttaatctgctcatgacgctgcggctgtggtccagctgagatctgcaagattgtaagacagcctgtgctccctcgctccttcctctgcattgcccctcttctccctctccaaacagagggaactctcctacccccaaggaggtgaaagctgctaccacctctgtgcccccccggcaatgcaccaactggatcctacccgaatttatgattaagattgctgaagagctgccaaacactgctgccaccccctctgttcccttattgctgcttgtcactgcctgacattcacggcagaggcaaggctgctgcagctccgctggctgtgcacattccctcctgctccccagagactgcctccgccatcccacagatgatggatcttcagtgggttctcttgggctctaggtcccggagaatgttgtgaggggtttatttttttttaatagtgttcataaagaaagacatagtattcttcttctcaagacgtggggggaaattatctcattatcgaggccctgctatgctgtgtgtctgggcgtgttgtatgtcctgctgccgatgccttcattaaaatgatttggaagagcagaga

SEQ ID NO: 7823 - protein, 127 aa, Homo sapiens
MEKMLECAFIVLWLQLGWLSGEDQVTQSPEALRLQEGESSSLNCSYTVSGLRGLFWYRQDPGKGPEFLFTLYSAGEEKEKERLKATLTKKESFLHITAPKPEDSATYLCAVQAQRRKPRKSHLWKRH

SEQ ID NO: 7824 - DNA, 478 bp, Homo sapiens
aaagcagagtgtttatcttgtgagccattctccatatttcagatataagatttcagttctcagtgagtctaagtgacagaaggaatggagaccctcttgggcctgcttatcctttggctgcagctgcaatgggtgagcagcaaacaggaggtgacgcagattcctgcagctctgagtgtcccagaaggagaaaacttggttctcaactgcagtttcactgatagcgctatttacaacctccagtggtttaggcaggaccctgggaaaggtctcacatctctgttgcttattcagtcaagtcagagagagcaaacaagtggaagacttaatgcctcgctggataaatcatcaggacgtagtactttatacattgcagcttctcagcctggtgactcagccacctacctctgtgctggtgtggacacgggcaggagagcacttacttttgggagtggaacaagactccaagtgcaaccaa

SEQ ID NO: 7825 - protein, 130 aa, Homo sapiens
METLLGLLILWLQLQWVSSKQEVTQIPAALSVPEGENLVLNCSFTDSAIYNLQWFRQDPGKGLTSLLLIQSSQREQTSGRLNASLDKSSGRSTLYIAASQPGDSATYLCAGVDTGRRALTFGSGTRLQVQ

SEQ ID NO: 7826 - DNA, 478 bp, Homo sapiens
agagtgtttatcttgtgagccattctccatatttcagatataagatttcagttctcagtgagtctaagtgacagaaggaatggagaccctcttgggcctgcttatcctttggctgcagctgcaatgggtgagcagcaaacaggaggtgacgcagattcctgcagctctgagtgtcccagaaggagaaaacttggttctcaactgcagtttcactgatagcgctatttacaacctccagtggtttaggcaggaccctgggaaaggtctcacatctctgttgcttattcagtcaagtcagagagagcaaacaagtggaagacttaatgcctcgctggataaatcatcaggacgtagtactttatacattgcagcttctcagcctggtgactcagccacctacctctgtgctgtgaggcacatggaggtagcaactataaactgacatttggaaaaggaactctcttaaccgtgaatccaa

SEQ ID NO: 7827 - protein, 120 aa, Homo sapiens
METLLGLLILWLQLQWVSSKQEVTQIPAALSVPEGENLVLNCSFTDSAIYNLQWFRQDPGKGLTSLLLIQSSQREQTSGRLNASLDKSSGRSTLYIAASQPGDSATYLCAVRHMEVATIN

SEQ ID NO: 7828 - DNA, 542 bp, Homo sapiens
gagcaggctttgtcgggtggagctgattggttgcaggagcagcaacagttccagagccaagtcatgacaccgacctccccaaggtttagttaaatatatcttatggtgaaaatgcccggagcaagaaggcaaagcatcatgaagaggatattgggagctctgctggggctcttgagtgcccaggtttgctgtgtgagaggaatacaagtggagcagagtcctccagacctgattctccaggagggagccaattccacgctgcggtgcaatttttctgactctgtgaacaatttgcagtggtttcatcaaaacccttggggacagctcatcaacctgttttacattccctcagggacaaaacagaatggaagattaagcgccacgactgtcgctacggaacgctacagcttattgtacatttcctcttcccagaccacagactcaggcgtttatttctgtgctgtggagccacagtgtctggggctgggagttaccaactcactttcgggaaggggaccaaactctcggtcataccaagtaag

SEQ ID NO: 7829 - protein, 145 aa, Homo sapiens
MVKMPGARRQSIMKRILGALLGLLSAQVCCVRGIQVEQSPPDLILQEGANSTLRCNFSDSVNNLQWFHQNPWGQLINLFYIPSGTKQNGRLSATTVATERYSLLYISSSQTTDSGVYFCAVEPQCLGLGVTNSLSGRGPNSRSYQ

SEQ ID NO: 7830 - DNA, 430 bp, Homo sapiens
aatatatcttatggtgaaaatgcccggagcaagaaggcaaagcatcatgaagaggatattgggagctctgctggggctcttgagtgcccaggtttgctgtgtgagaggaatacaagtggagcagagtcctccagacctgattctccaggagggagccaattccacgctgcggtgcaatttttctgactctgtgaacaatttgcagtggtttcatcaaaacccttggggacagctcatcaacctgttttacattccctcagggacaaaacagaatggaagattaagcgccacgactgtcgctacggaacgctacagcttattgtacatttcctcttcccagaccacagactcaggcgtttatttctgtgtgtgtcttataacaccgacaagctcatctttgggactgggaccagattacaagtctttccaa

SEQ ID NO: 7831 - protein, 139 aa, Homo sapiens
MVKMPGARRQSIMKRILGALLGLLSAQVCCVRGIQVEQSPPDLILQEGANSTLRCNFSDSVNNLQWFHQNPWGQLINLFYIPSGTKQNGRLSATTVATERYSLLYISSSQTTDSGVYFCVCLITPTSSSLGLGPDYKSF

SEQ ID NO: 7832 - DNA, 1203 bp, Homo sapiens
actgaactttgagcttcaggcagcacaactcacatttgtgcaaagagctacatgccacatgctgttctccagcctgctgtgtgtatttgtggccttcagctactctggatcaagtgtggcccagaaggttactcaagcccagtcatcagtatccatgccagtgaggaaagcagtcaccctgaactgcctgtatgaaacaagttggtggtcatattatattttttggtacaagcaacttcccagcaaagagatgattttccttattcgccagggttctgatgaacagaatgcaaaaagtggtcgctattctgtcaacttcaagaaagcagcgaaatccgtcgccttaaccatttcagccttacagctagaagattcagcaaagtacttttgtgctcttggggaacgataaactcatctttggaaaaggaacccgtgtgactgtggaaccaagaagtcagcctcataccaaaccatccgtttttgtcatgaaaaatggaacaaatgtcgcttgtctggtgaaggaattctaccccaaggatataagaataaatctcgtgtcatccaagaagataacagagtttgatcctgctattgtcatctctcccagtgggaagtacaatgctgtcaagcttggtaaatatgaagattcaaattcagtgacatgttcagttcaacacgacaataaaactgtgcactccactgactttgaagtgaagacagattctacagatcacgtaaaaccaaaggaaactgaaaacacaaagcaaccttcaaagagctgccataaacccaaagccatagttcataccgagaaggtgaacatgatgtccctcacagtgcttgggctacgaatgctgtttgcaaagactgttgccgtcaattttctcttgactgccaagttatttttcttgtaaggctgactggcatgaggaagctacactcctgaagaaaccaaaggcttacaaaaatgcatctccttggcttctgacttctttgtgattcaagttgacctgtcatagccttgttaaaatggctgctagccaaaccactttttcttcaaagacaacaaacccagctcatcctccagcttgatgggaagacaaaagtcctggggaaggggggtttatgtcctaactgctttgtatgctgttttataaagggatagaaggatataaaaagatataggactctttttttactcct

SEQ ID NO: 7833 - protein, 142 aa, Homo sapiens
MKNGTNVACLVKEFYPKDIRINLVSSKKITEFDPAIVISPSGKYNAVKLGKYEDSNSVTCSVQHDNKTVHSTDFEVKTDSTDHVKPKETENTKQPSKSCHKPKAIVHTEKVNMMSLTVLGLRMLFAKTVAVNFLLTAKLFFL

SEQ ID NO: 7834 - DNA, 1965 bp, Homo sapiens
actgaactttgagcttcaggcagcacaactcacatttgtgcaaagagctacatgccacatgctgttctccagcctgctgtgtgtatttgtggccttcagctactctggatcaagtgtggcccagaaggttactcaagcccagtcatcagtatccatgccagtgaggaaagcagtcaccctgaactgcctgtatgaaacaagttggtggtcatattatattttttggtacaagcaacttcccagcaaagagatgattttccttattcgccagggttctgatgaacagaatgcaaaaagtggtcgctattctgtcaacttcaagaaagcagcgaaatccgtcgccttaaccatttcagccttacagctagaagattcagcaaagtacttttgtgctcttggggaacgataaactcatctttggaaaaggaacccgtgtgactgtggaaccaagaagtcagcctcataccaaaccatccgtttttgtcatgaaaaatggaacaaatgtcgcttgtctggtgaaggaattctaccccaaggatataagaataaatctcgtgtcatccaagaagataacagagtttgatcctgctattgtcatctctcccagtgggaagtacaatgctgtcaagcttggtaaatatgaagattcaaattcagtgacatgttcagttcaacacgacaataaaactgtgcactccactgactttgaagtgaagacagattctacagatcacgtaaaaccaaaggaaactgaaaacacaaagcaaccttcaaagagctgccataaacccaaagccatagttcataccgagaaggtgaacatgatgtccctcacagtgcttgggctacgaatgctgtttgcaaagactgttgccgtcaattttctcttgactgccaagttatttttcttgtaaggctgactggcatgaggaagctacactcctgaagaaaccaaaggcttacaaaaatgcatctccttggcttctgacttctttgtgattcaagttgacctgtcatagccttgttaaaatggctgctagccaaaccactttttcttcaaagacaacaaacccagctcatcctccagcttgatgggaagacaaaagtcctggggaaggggggtttatgtcctaactgctttgtatgctgttttataaagggatagaaggatataaaaagatataggactctttttttactcctacaagtgatacactttgaaaatgatgttttgttccttttgactttctttaccttttgaagtagaaagtgggaaccaacaggttcacagcttcattcctcatgaggcaaataggccttgggagaagaagagcgggtgcccttttatctaaacatggaaggctctgctcaactgagcactagatttgctacaaaccagcatcatcttcttcctcctgtcctcacggcttgtcccaccctctatgttcacttcaggagccacactagagattctgcatggcgtggaggaggacaaagtttcagcactttctgcctctcctaatactttacaaatgagattacatttgaatttgctaatactttatgagcaggcaatgaggtttccaaaatctcatctaaatactctccaatctattagcaaaaatcagagtaaaatacagaggaaaggcactgctttctgttaattgatttaacatgcatgaattagctccctctgagttccaggcactatgctgagagtacaaagaagacacaagtctgctttcaagcaactcactgtgaaagtgtttttgaagggaggaacagaaatgagacccctatctttccctataaaaacaacatttttactgtcttttgcctgccaatctgtatttgaaaccattggacactgattctctggcctgggactttggcattgatggttttctgcctttcttctcagcctctgcctctattgcatttattaaactgcattgtgtgcacctc

SEQ ID NO: 7835 - protein, 142 aa, Homo sapiens; identical to SEQ ID NO: 7833

SEQ ID NO: 7836 - DNA, 527 bp, Homo sapiens
gcagtcacctctttccctttctttccaaaatgcacacatctactttccaaaatagaccgcaactatttctattgatctggaagaagcttgtaccaggcaacccatttaggagaagttggatgaagagggagagggagatgctactcatcacatcaatgttggtcttatggatgcaattgtcacaggtgaatggacaacaggtaatgcaaattcctcagtaccagcatgtacaagaaggagaggacttcaccacgtactgcaattcctcaactactttaagcaatatacagtggtataagcaaaggcctggtggacatcccgtttttttgatacagttagtgaagagtggagaagtgaagaagcagaaaagactgacatttcagtttggagaagcaaaaaagaacagctccctgcacatcacagccacccagactacagatgtaggaacctacttctgtgcagggcacagtgtggcaacaaccgtaagctgatttggggattgggaacaagcctggcagtaaatccga

SEQ ID NO: 7837 - protein, 153 aa, Homo sapiens
MHTSTFQNRPQLFLLIWKKLVPGNPFRRSWMKREREMLLITSMLVLWMQLSQVNGQQVMQIPQYQHVQEGEDFTTYCNSSTTLSNIQWYKQRPGGHPVFLIQLVKSGEVKKQKRLTFQFGEAKKNSSLHITATQTTDVGTYFCAGHSVATTVS

SEQ ID NO: 7838 - DNA, 1559 bp, Homo sapiens
aggaacatgactaaacctggggaggaagacatagaaaagcaactgctctatcattggctgacaagatcctgacaacaacacaatgagagctgcactccttgcaagtctttactagtagctgttgcttctgttctctggaaattctttaaacctagaatcagacacaaaaactgaactctgggtccacaatcctcatttgtccttgaagtatgaggctggtggcaagagtaactgtgtttctgacctttggaactataattgatgctaagaccacccagcccccctccatggattgcgctgaaggaagagctgcaaacctgccttgtaatcactctaccatcagtggaaatgagtatgtgtattggtatcgacagattcactcccaggggccacagtatatcattcatggtctaaaaaacaatgaaaccaatgaaatggcctctctgatcatcacagaagacagaaagtccagcaccttgatcctgccccacgctacgctgagagacactgctgtgtactattgcatcgaggaagctacatacctacatttggaagaggaaccagccttattgttcatccgtatatccagaaccctgaccctgccgtgtaccagctgagagactctaaatccagtgacaagtctgtctgcctattcaccgattttgattctcaaacaaatgtgtcacaaagtaaggattctgatgtgtatatcacagacaaaactgtgctagacatgaggtctatggacttcaagagcaacagtgctgtggcctggagcaacaaatctgactttgcatgtgcaaacgccttcaacaacagcattattccagaagacaccttcttccccagcccagaaagttcctgtgatgtcaagctggtcgagaaaagctttgaaacagatacgaacctaaactttcaaaacctgtcagtgattgggttccgaatcctcctcctgaaagtggccgggtttaatctgctcatgacgctgcggctgtggtccagctgagatctgcaagattgtaagacagcctgtgctccctcgctccttcctctgcattgcccctcttctccctctccaaacagagggaactctcctacccccaaggaggtgaaagctgctaccacctctgtgcccccccggcaatgcaccaactggatcctacccgaatttatgattaagattgctgaagagctgccaaacactgctgccaccccctctgttcccttattgctgcttgtcactgcctgacattcacggcagaggcaaggctgctgcagctccgctggctgtgcacattccctcctgctccccagagactgcctccgccatcccacagatgatggatcttcagtgggttctcttgggctctaggtcccggagaatgttgtgaggggtttatttttttttaatagtgttcataaagaaagacatagtattcttcttctcaagacgtggggggaaattatctcattatcgaggccctgctatgctgtgtgtctgggcgtgttgtatgtcctgctgccgatgccttcattaaaatgatttggaagagcagaga

SEQ ID NO: 7839 - protein, 135 aa, Homo sapiens
MRLVARVTVFLTFGTIIDAKTTQPPSMDCAEGRAANLPCNHSTISGNEYVYWYRQIHSQGPQYIIHGLKNNETNEMASLIITEDRKSSTLILPHATLRDTAVYYCIEEATYLHLEEEPALLFIRISRTLTLPCTS

SEQ ID NO: 7840 - DNA, 1351 bp, Homo sapiens
aaacctggggaggaagacatagaaaagcaactgctctatcattggctgacaagatcctgacaacaacacaatgagagctgcactccttgcaagtctttactagtagctgttgcttctgttctctggaaattctttaaacctagaatcagacacaaaaactgaactctgggtccacaatcctcatttgtccttgaagtatgaggctggtggcaagagtaactgtgtttctgacctttggaactataattgatgctaagaccacccagcccccctccatggattgcgctgaaggaagagctgcaaacctgccttgtaatcactctaccatcagtggaaatgagtatgtgtattggtatcgacagattcactcccaggggccacagtatatcattcatggtctaaaaaacaatgaaaccaatgaaatggcctctctgatcatcacagaagacagaaagtccagcaccttgatcctgccccacgctacgctgagagacactgctgtgtactattgcatcgtcagatgaataataatgcaggcaacatgctcacctttggagggggaacaaggttaatggtcaaaccccatatccagaaccctgaccctgccgtgtaccagctgagagactctaaatccagtgacaagtctgtctgcctattcaccgattttgattctcaaacaaatgtgtcacaaagtaaggattctgatgtgtatatcacagacaaaactgtgctagacatgaggtctatggacttcaagagcaacagtgctgtggcctggagcaacaaatctgactttgcatgtgcaaacgccttcaacaacagcattattccagaagacaccttcttccccagcccagaaagttcctgtgatgtcaagctggtcgagaaaagctttgaaacagatacgaacctaaactttcaaaacctgtcagtgattgggttccgaatcctcctcctgaaagtggccgggtttaatctgctcatgacgctgcggctgtggtccagctgagatctgcaagattgtaagacagcctgtgctccctcgctccttcctctgcattgcccctcttctccctctccaaacagagggaatccctcctgctccccagagactgcctccgccatcccacagatgatggatcttcagtgggttctcttgggctctaggtcccggagaatgttgtgaggggtttatttttttttaatagtgttcataaagaaagacatagtattcttcttctcaagacgtggggggaaattatctcattatcgaggccctgctatgctgtgtgtctgggcgtgttgtatgtcctgctgccgatgccttcattaaaatgatttggaagagcag

SEQ ID NO: 7841 - protein, 162 aa, Homo sapiens
MNNNAGNMLTFGGGTRLMVKPHIQNPDPAVYQLRDSKSSDKSVCLFTDFDSQTNVSQSKDSDVYITDKTVLDMRSMDFKSNSAVAWSNKSDFACANAFNNSIIPEDTFFPSPESSCDVKLVEKSFETDTNLNFQNLSVIGFRILLLKVAGFNLLMTLRLWSS

SEQ ID NO: 7842 - DNA, 1500 bp, Homo sapiens
caagatcctgacaacaacacaatgagagctgcactccttgcaagtctttactagtagctgttgcttctgttctctggaaattctttaaacctagaatcagacacaaaaactgaactctgggtccacaatcctcatttgtccttgaagtatgaggctggtggcaagagtaactgtgtttctgacctttggaactataattgatgctaagaccacccagcccccctccatggattgcgctgaaggaagagctgcaaacctgccttgtaatcactctaccatcagtggaaatgagtatgtgtattggtatcgacagattcactcccaggggccacagtatatcattcatggtctaaaaaacaatgaaaccaatgaaatggcctctctgatcatcacagaagacagaaagtccagcaccttgatcctgccccacgctacgctgagagacactgctgtgtactattgcatcgtcagatggtcagaattttgtctttggtcccggaaccagattgtccgtgctgccctatatccagaaccctgaccctgccgtgtaccagctgagagactctaaatccagtgacaagtctgtctgcctattcaccgattttgattctcaaacaaatgtgtcacaaagtaaggattctgatgtgtatatcacagacaaaactgtgctagacatgaggtctatggacttcaagagcaacagtgctgtggcctggagcaacaaatctgactttgcatgtgcaaacgccttcaacaacagcattattccagaagacaccttcttccccagcccagaaagttcctgtgatgtcaagctggtcgagaaaagctttgaaacagatacgaacctaaactttcaaaacctgtcagtgattgggttccgaatcctcctcctgaaagtggccgggtttaatctgctcatgacgctgcggctgtggtccagctgagatctgcaagattgtaagacagcctgtgctccctcgctccttcctctgcattgcccctcttctccctctccaaacagagggaactctcctacccccaaggaggtgaaagctgctaccacctctgtgcccccccggcaatgcaccaactggatcctacccgaatttatgattaagattgctgaagagctgccaaacactgctgccaccccctctgttcccttattgctgcttgtcactgcctgacattcacggcagaggcaaggctgctgcagctccgctggctgtgcacattccctcctgctccccagagactgcctccgccatcccacagatgatggatcttcagtgggttctcttgggctctaggtcccggagaatgttgtgaggggtttatttttttttaatagtgttcataaagaaagacatagtattcttcttctcaagacgtggggggaaattatctcattatcgaggccctgctatgctgtgtgtctgggcgtgttgtatgtcctgctgccgatgccttcattaaaatgatttggaagagcagaga

SEQ ID NO: 7843 - protein, 129 aa, Homo sapiens
MRLVARVTVFLTFGTIIDAKTTQPPSMDCAEGRAANLPCNHSTISGNEYVYWYRQIHSQGPQYIIHGLKNNETNEMASLIITEDRKSSTLILPHATLRDTAVYYCIVRWSEFCLWSRNQIVRAALYPEP

SEQ ID NO: 7844 - DNA, 1466 bp, Homo sapiens
gtgggtggcagcaagcactcttctagcccagagaagtctgttccaggacgggctctttcaggagcagctaaagtcaggggccatgtccaccatgtgatagaaagacaagatggtcctgaaattctccgtgtccattctttggattcagttggcatgggtgagcacccagctgctggagcagagccctcagtttctaagcatccaagagggagaaaatctcactgtgtactgcaactcctcaagtgttttttccagcttacaatggtacagacaggagcctggggaaggtcctgtcctcctggtgacagtagttacgggtggagaagtgaagaagctgaagagactaacctttcagtttggtgatgcaagaaaggacagttctctccacatcactgcagcccagcctggtgatacaggcctctacctctctaactttggaaatgagaaattaacctttgggactggaacaagactcaccatcatacccaatatccagaaccctgaccctgccgtgtaccagctgagagactctaaatccagtgacaagtctgtctgcctattcaccgattttgattctcaaacaaatgtgtcacaaagtaaggattctgatgtgtatatcacagacaaaactgtgctagacatgaggtctatggacttcaagagcaacagtgctgtggcctggagcaacaaatctgactttgcatgtgcaaacgccttcaacaacagcattattccagaagacaccttcttccccagcccagaaagttcctgtgatgtcaagctggtcgagaaaagctttgaaacagatacgaacctaaactttcaaaacctgtcagtgattgggttccgaatcctcctcctgaaagtggccgggtttaatctgctcatgacgctgcggctgtggtccagctgagatctgcaagattgtaagacagcctgtgctccctcgctccttcctctgcattgcccctcttctccctctccaaacagagggaactctcctacccccaaggaggtgaaagctgctaccacctctgtgcccccccggcaatgcaccaactggatcctacccgaatttatgattaagattgctgaagagctgccaaacactgctgccaccccctctgttcccttattgctgcttgtcactgcctgacattcacggcagaggcaaggctgctgcagctccgctggctgtgcacattccctcctgctccccagagactgcctccgccatcccacagatgatggatcttcagtgggttctcttgggctctaggtcccggagaatgttgtgaggggtttatttttttttaatagtgttcataaagaaagacatagtattcttcttctcaagacgtggggggaaattatctcattatcgaggccctgctatgctgtgtgtctgggcgtgttgtatgtcctgctgccgatgccttcattaaaatgatttggaagagcagaga

SEQ ID NO: 7845 - protein, 267 aa, Homo sapiens
MVLKFSVSILWIQLAWVSTQLLEQSPQFLSIQEGENLTVYCNSSSVFSSLQWYRQEPGEGPVLLVTVVTGGEVKKLKRLTFQFGDARKDSSLHITAAQPGDTGLYLSNFGNEKLTFGTGTRLTIIPNIQNPDPAVYQLRDSKSSDKSVCLFTDFDSQTNVSQSKDSDVYITDKTVLDMRSMDFKSNSAVAWSNKSDFACANAFNNSIIPEDTFFPSPESSCDVKLVEKSFETDTNLNFQNLSVIGFRILLLKVAGFNLLMTLRLWSS

SEQ ID NO: 7846 - DNA, 1509 bp, Homo sapiens
gttcatatgtaaaatgaagggtctgtggaaggacatgaataaagcacaggaggttgaagtcagatttgcagctttctaggcaggagacaagacaatctgcatcttcacaggagggatggccatgctcctgggggcatcagtgctgattctgtggcttcagccagactgggtaaacagtcaacagaagaatgatgaccagcaagttaagcaaaattcaccatccctgagcgtccaggaaggaagaatttctattctgaactgtgactatactaacagcatgtttgattatttcctatggtacaaaaaataccctgctgaaggtcctacattcctgatatctataagttccattaaggataaaaatgaagatggaagattcactgtcttcttaaacaaaagtgccaagcacctctctctgcacattgtgccctcccagcctggagactctgcagtgtacttctgtgcagcaagcgcacaacaataacaatgacatgcgctttggagcagggaccagactgacagtaaaaccaaatatccagaaccctgaccctgccgtgtaccagctgagagactctaaatccagtgacaagtctgtctgcctattcaccgattttgattctcaaacaaatgtgtcacaaagtaaggattctgatgtgtatatcacagacaaaactgtgctagacatgaggtctatggacttcaagagcaacagtgctgtggcctggagcaacaaatctgactttgcatgtgcaaacgccttcaacaacagcattattccagaagacaccttcttccccagcccagaaagttcctgtgatgtcaagctggtcgagaaaagctttgaaacagatacgaacctaaactttcaaaacctgtcagtgattgggttccgaatcctcctcctgaaagtggccgggtttaatctgctcatgacgctgcggctgtggtccagctgagatctgcaagattgtaagacagcctgtgctccctcgctccttcctctgcattgcccctcttctccctctccaaacagagggaactctcctacccccaaggaggtgaaagctgctaccacctctgtgcccccccggcaatgcaccaactggatcctacccgaatttatgattaagattgctgaagagctgccaaacactgctgccaccccctctgttcccttattgctgcttgtcactgcctgacattcacggcagaggcaaggctgctgcagctccgctggctgtgcacattccctcctgctccccagagactgcctccgccatcccacagatgatggatcttcagtgggttctcttgggctctaggtcccggagaatgttgtgaggggtttatttttttttaatagtgttcataaagaaagacatagtattcttcttctcaagacgtggggggaaattatctcattatcgaggccctgctatgctgtgtgtctgggcgtgttgtatgtcctgctgccgatgccttcattaaaatgatttggaagagcagaga

SEQ ID NO: 7847 - protein, 154 aa, Homo sapiens [sequence omitted]

SEQ ID NO: 7848 - DNA, 1511 bp, Homo sapiens
gttcatatgtaaaatgaagggtctgtggaaggacatgaataaagcacaggaggttgaagtcagatttgcagctttctaggcaggagacaagacaatctgcatcttcacaggagggatggccatgctcctgggggcatcagtgctgattctgtggcttcagccagactgggtaaacagtcaacagaagaatgatgaccagcaagttaagcaaaattcaccatccctgagcgtccaggaaggaagaatttctattctgaactgtgactatactaacagcatgtttgattatttcctatggtacaaaaaataccctgctgaaggtcctacattcctgatatctataagttccattaaggataaaaatgaagatggaagattcactgtcttcttaaacaaaagtgccaagcacctctctctgcacattgtgccctcccagcctggagactctgcagtgtacttctgtgcagcaagcgcacacggcactgccagtaaactcacctttgggactggaacaagacttcaggtcacgctcgatatccagaaccctgaccctgccgtgtaccagctgagagactctaaatccagtgacaagtctgtctgcctattcaccgattttgattctcaaacaaatgtgtcacaaagtaaggattctgatgtgtatatcacagacaaaactgtgctagacatgaggtctatggacttcaagagcaacagtgctgtggcctggagcaacaaatctgactttgcatgtgcaaacgccttcaacaacagcattattccagaagacaccttcttccccagcccagaaagttcctgtgatgtcaagctggtcgagaaaagctttgaaacagatacgaacctaaactttcaaaacctgtcagtgattgggttccgaatcctcctcctgaaagtggccgggtttaatctgctcatgacgctgcggctgtggtccagctgagatctgcaagattgtaagacagcctgtgctccctcgctccttcctctgcattgcccctcttctccctctccaaacagagggaactctcctacccccaaggaggtgaaagctgctaccacctctgtgcccccccggcaatgcaccaactggatcctacccgaatttatgattaagattgctgaagagctgccaaacactgctgccaccccctctgttcccttattgctgcttgtcactgcctgacattcacggcagaggcaaggctgctgcagctccgctggctgtgcacattccctcctgctccccagagactgcctccgccatcccacagatgatggatcttcagtgggttctcttgggctctaggtcccggagaatgttgtgaggggtttatttttttttaatagtgttcataaagaaagacatagtattcttcttctcaagacgtggggggaaattatctcattatcgaggccctgctatgctgtgtgtctgggcgtgttgtatgtcctgctgccgatgccttcattaaaatgatttggaagagcagaga

SEQ ID NO: 7849 - protein, 280 aa, Homo sapiens
MAMLLGASVLILWLQPDWVNSQQKNDDQQVKQNSPSLSVQEGRISILNCDYTNSMFDYFLWYKKYPAEGPTFLISISSIKDKNEDGRFTVFLNKSAKHLSLHIVPSQPGDSAVYFCAASAHGTASKLTFGTGTRLQVTLDIQNPDPAVYQLRDSKSSDKSVCLFTDFDSQTNVSQSKDSDVYITDKTVLDMRSMDFKSNSAVAWSNKSDFACANAFNNSIIPEDTFFPSPESSCDVKLVEKSFETDTNLNFQNLSVIGFRILLLKVAGFNLLMTLRLWSS

SEQ ID NO: 7850 - DNA, 450 bp, Homo sapiens
ctgcatcttcacaggagggatggccatgctcctgggggcatcagtgctgattctgtggcttcagccagactgggtaaacagtcaacagaagaatgatgaccagcaagttaagcaaaattcaccatccctgagcgtccaggaaggaagaatttctattctgaactgtgactatactaacagcatgtttgattatttcctatggtacaaaaaataccctgctgaaggtcctacattcctgatatctataagttccattaaggataaaaatgaagatggaagattcactgtcttcttaaacaaaagtgccaagcacctctctctgcacattgtgccctcccagcctggagactctgcagtgtacttctgtgcagcaagcgcacagtgcttgtggggataactatggtcagaattttgtctttggtcccggaaccagattgtccgtgctgccct

SEQ ID NO: 7851 - protein, 125 aa, Homo sapiens
MAMLLGASVLILWLQPDWVNSQQKNDDQQVKQNSPSLSVQEGRISILNCDYTNSMFDYFLWYKKYPAEGPTFLISISSIKDKNEDGRFTVFLNKSAKHLSLHIVPSQPGDSAVYFCAASAQCLWG

SEQ ID NO: 7852 - DNA, 1435 bp, Homo sapiens
agatcagaagaggaggcttctcaccctgcagcagggacctgtgagcatggcatgccctggcttcctgtgggcacttgtgatctccacctgtcttgaatttagcatggctcagacagtcactcagtctcaaccagagatgtctgtgcaggaggcagagaccgtgaccctgagctgcacatatgacaccagtgagagtgattattatttattctggtacaagcagcctcccagcaggcagatgattctcgttattcgccaagaagcttataagcaacagaatgcaacagagaatcgtttctctgtgaacttccagaaagcagccaaatccttcagtctcaagatctcagactcacagctgggggatgccgcgatgtatttctgtgcttataggatgtaactcagggcggatctgaaaagctggtctttggaaagggaacgaaactgacagtaaacccatatatccagaaccctgaccctgccgtgtaccagctgagagactctaaatccagtgacaagtctgtctgcctattcaccgattttgattctcaaacaaatgtgtcacaaagtaaggattctgatgtgtatatcacagacaaaactgtgctagacatgaggtctatggacttcaagagcaacagtgctgtggcctggagcaacaaatctgactttgcatgtgcaaacgccttcaacaacagcattattccagaagacaccttcttccccagcccagaaagttcctgtgatgtcaagctggtcgagaaaagctttgaaacagatacgaacctaaactttcaaaacctgtcagtgattgggttccgaatcctcctcctgaaagtggccgggtttaatctgctcatgacgctgcggctgtggtccagctgagatctgcaagattgtaagacagcctgtgctccctcgctccttcctctgcattgcccctcttctccctctccaaacagagggaactctcctacccccaaggaggtgaaagctgctaccacctctgtgcccccccggcaatgcaccaactggatcctacccgaatttatgattaagattgctgaagagctgccaaacactgctgccaccccctctgttcccttattgctgcttgtcactgcctgacattcacggcagaggcaaggctgctgcagctccgctggctgtgcacattccctcctgctccccagagactgcctccgccatcccacagatgatggatcttcagtgggttctcttgggctctaggtcccggagaatgttgtgaggggtttatttttttttaatagtgttcataaagaaagacatagtattcttcttctcaagacgtggggggaaattatctcattatcgaggccctgctatgctgtgtgtctgggcgtgttgtatgtcctgctgccgatgccttcattaaaatgatttggaagagcagaga

SEQ ID NO: 7853 - protein, 116 aa, Homo sapiens
MACPGFLWALVISTCLEFSMAQTVTQSQPEMSVQEAETVTLSCTYDTSESDYYLFWYKQPPSRQMILVIRQEAYKQQNATENRFSVNFQKAAKSFSLKISDSQLGDAAMYFCAYRM

SEQ ID NO: 7854 - DNA, 458 bp, Homo sapiens
agaagaggaggcttctcaccctgcagcagggacctgtgagcatggcatgccctggcttcctgtgggcacttgtgatctccacctgtcttgaatttagcatggctcagacagtcactcagtctcaaccagagatgtctgtgcaggaggcagagaccgtgaccctgagctgcacatatgacaccagtgagagtgattattatttattctggtacaagcagcctcccagcaggcagatgattctcgttattcgccaagaagcttataagcaacagaatgcaacagagaatcgtttctctgtgaacttccagaaagcagccaaatccttcagtctcaagatctcagactcacagctgggggatgccgcgatgtatttctgtgcttataggagcgcacatggaggtagcaactataaactgacatttggaaaaggaactctcttaaccgtgaatccaagtaag

SEQ ID NO: 7855 - protein, 138 aa, Homo sapiens
MACPGFLWALVISTCLEFSMAQTVTQSQPEMSVQEAETVTLSCTYDTSESDYYLFWYKQPPSRQMILVIRQEAYKQQNATENRFSVNFQKAAKSFSLKISDSQLGDAAMYFCAYRSAHGGSNYKLTFGKGTLLTVNPS

SEQ ID NO: 7856 - DNA, 2155 bp, Homo sapiens
aaatgtggaagctgaagctgcaagtcaagggcccgtctgacaagtccggcagggccgggaaaggggttaaggcgagcaagtgggtgtggcccgtgcgttgattggcaggggtgggaccgggcttgtcacccgccccggctactccaacccctgggcgggcgggggtaccgcctgggcaagggccggggcgccgggccgagccacctcttcccctcccccgcttccctgtcgcgctccgctggctggacgcgctggaggagtggagcagcacccggccggccctgggggctgacagtcggcaaagtttggcccgaagaggaagtggtctcaaaccccggcaggtggcgaccaggccagaccaggggcgctcgctgcctgcgggcgggctgtaggcgagggcgcgccccagtgccgagacccggggcttcaggagccggccccgggagagaagagtgcggcggcggacggagaaaacaactccaaagttggcgaaaggcaccgcccctactcccgggctgccgccgcctccccgcccccagccctggcatccagagtacgggtcgagcccgggccatggagcccccctggggaggcggcaccagggagcctgggcgcccggggctccgccgcgaccccatcgggtagaccacagaagctccgggacccttccggcacctctggacagcccaggatgctgttggccaccctcctcctcctcctccttggaggcgctctggcccatccagaccggattatttttccaaatcatgcttgtgaggaccccccagcagtgctcttagaagtgcagggcaccttacagaggcccctggtccgggacagccgcacctcccctgccaactgcacctggctcatcctgggcagcaaggaacagactgtcaccatcaggttccagaagctacacctggcctgtggctcagagcgcttaaccctacgctcccctctccagccactgatctccctgtgtgaggcacctcccagccctctgcagctgcccgggggcaacgtcaccatcacttacagctatgctggggccagagcacccatgggccagggcttcctgctctcctacagccaagattggctgatgtgcctgcaggaagagtttcagtgcctgaaccaccgctgtgtatctgctgtccagcgctgtgatggggttgatgcctgtggcgatggctctgatgaagcaggttgcagctcagaccccttccctggcctgaccccaagacccgtcccctccctgccttgcaatgtcaccttggaggacttctatggggtcttctcctctcctggatatacacacctagcctcagtctcccacccccagtcctgccattggctgctggacccccatgatggccggcggctggccgtgcgcttcacagccctggacttgggctttggagatgcagtgcatgtgtatgacggccctgggccccctgagagctcccgactactgcgtagtctcacccacttcagcaatggcaaggctgtcactgtggagacactgtctggccaggctgttgtgtcctaccacacagttgcttggagcaatggtcgtggcttcaatgccacctaccatgtgcggggctattgcttgccttgggacagaccctgtggcttaggctctggcctgggagctggcgaaggcctaggtgagcgctgctacagtgaggcacagcgctgtgacggctcatgggactgtgctgacggcacagatgaggaggactgcccaggctgcccacctggacacttcccctgtggggctgctggcacctctggtgccacagcctgctacctgcctgctgaccgctgcaactaccagactttctgtgctgatggagcagatgagagacgctgtcggcattgccagcctggcaatttccgatgccgggacgagaagtgcgtgtatgagacgtgggtgtgcgatgggcagccagactgtgcggacggcagtgatgagtgggactgctcctatgttctgccccgcaaggtcattacagctgcagtcattggcagcctagtgtgcggcctgctcctggtcatcgccctgggctgcacctgcaagctctatgccattcgcacccaggagtacaggtcagtgggagtggggctggcagtagaagagtagaccctg

SEQ ID NO: 7857 - protein, 485 aa, Homo sapiens
MLLATLLLLLLGGALAHPDRIIFPNHACEDPPAVLLEVQGTLQRPLVRDSRTSPANCTWLILGSKEQTVTIRFQKLHLACGSERLTLRSPLQPLISLCEAPPSPLQLPGGNVTITYSYAGARAPMGQGFLLSYSQDWLMCLQEEFQCLNHRCVSAVQRCDGVDACGDGSDEAGCSSDPFPGLTPRPVPSLPCNVTLEDFYGVFSSPGYTHLASVSHPQSCHWLLDPHDGRRLAVRFTALDLGFGDAVHVYDGPGPPESSRLLRSLTHFSNGKAVTVETLSGQAVVSYHTVAWSNGRGFNATYHVRGYCLPWDRPCGLGSGLGAGEGLGERCYSEAQRCDGSWDCADGTDEEDCPGCPPGHFPCGAAGTSGATACYLPADRCNYQTFCADGADERRCRHCQPGNFRCRDEKCVYETWVCDGQPDCADGSDEWDCSYVLPRKVITAAVIGSLVCGLLLVIALGCTCKLYAIRTQEYRSVGVGLAVEE

SEQ ID NO: 7858 - DNA, 3145 bp, Homo sapiens
aaatgtggaagctgaagctgcaagtcaagggcccgtctgacaagtccggcagggccgggaaaggggttaaggcgagcaagtgggtgtggcccgtgcgttgattggcaggggtgggaccgggcttgtcacccgccccggctactccaacccctgggcgggcgggggtaccgcctgggcaagggccggggcgccgggccgagccacctcttcccctcccccgcttccctgtcgcgctccgctggctggacgcgctggaggagtggagcagcacccggccggccctgggggctgacagtcggcaaagtttggcccgaagaggaagtggtctcaaaccccggcaggtggcgaccaggccagaccaggggcgctcgctgcctgcgggcgggctgtaggcgagggcgcgccccagtgccgagacccggggcttcaggagccggccccgggagagaagagtgcggcggcggacggagaaaacaactccaaagttggcgaaaggcaccgcccctactcccgggctgccgccgcctccccgcccccagccctggcatccagagtacgggtcgagcccgggccatggagcccccctggggaggcggcaccagggagcctgggcgcccggggctccgccgcgaccccatcgggtagaccacagaagctccgggacccttccggcacctctggacagcccaggatgctgttggccaccctcctcctcctcctccttggaggcgctctggcccatccagaccggattatttttccaaatcatgcttgtgaggaccccccagcagtgctcttagaagtgcagggcaccttacagaggcccctggtccgggacagccgcacctcccctgccaactgcacctggctcatcctgggcagcaaggaacagactgtcaccatcaggttccagaagctacacctggcctgtggctcagagcgcttaaccctacgctcccctctccagccactgatctccctgtgtgaggcacctcccagccctctgcagctgcccgggggcaacgtcaccatcacttacagctatgctggggccagagcacccatgggccagggcttcctgctctcctacagccaagattggctgatgtgcctgcaggaagagtttcagtgcctgaaccaccgctgtgtatctgctgtccagcgctgtgatggggttgatgcctgtggcgatggctctgatgaagcaggttgcagctcagaccccttccctggcctgaccccaagacccgtcccctccctgccttgcaatgtcaccttggaggacttctatggggtcttctcctctcctggatatacacacctagcctcagtctcccacccccagtcctgccattggctgctggacccccatgatggccggcggctggccgtgcgcttcacagccctggacttgggctttggagatgcagtgcatgtgtatgacggccctgggccccctgagagctcccgactactgcgtagtctcacccacttcagcaatggcaaggctgtcactgtggagacactgtctggccaggctgttgtgtcctaccacacagttgcttggagcaatggtcgtggcttcaatgccacctaccatgtgcggggctattgcttgccttgggacagaccctgtggcttaggctctggcctgggagctggcgaaggcctaggtgagcgctgctacagtgaggcacagcgctgtgacggctcatgggactgtgctgacggcacagatgaggaggactgcccaggctgcccacctggacacttcccctgtggggctgctggcacctctggtgccacagcctgctacctgcctgctgaccgctgcaactaccagactttctgtgctgatggagcagatgagagacgctgtcggcattgccagcctggcaatttccgatgccgggacgagaagtgcgtgtatgagacgtgggtgtgcgatgggcagccagactgtgcggacggcagtgatgagtgggactgctcctatgttctgccccgcaaggtcattacagctgcagtcattggcagcctagtgtgcggcctgctcctggtcatcgccctgggctgcacctgcaagctctatgccattcgcacccaggagtacagcatctttgcccccctctcccggatggaggctgagattgtgcagcagcaggcacccccttcctacgggcagctcattgcccagggtgccatcccacctgtagaagactttcctacagagaatcctaatgataactcagtgctgggcaacctgcgttctctgctacagatcttacgccaggatatgactccaggaggtggcccaggtgcccgccgtcgtcagcggggccgcttgatgcgacgcctggtacgccgtctccgccgctggggcttgctccctcgaaccaacaccccggctcgggcctctgaggccagatcccaggtcacaccttctgctgctccccttgaggccctagatggtggcacaggtccagcccgtgagggcggggcagtgggtgggcaagatggggagcaggcacccccactgcccatcaaggctcccctcccatctgctagcacgtctccagcccccactactgtccctgaagccccagggccactgccctcactgcccctagagccatcactattgtctggagtggtgcaggccctgcgaggccgcctgttgcccagcctggggcccccaggaccaacccggagcccccctggaccccacacagcagtcctggccctggaagatgaggacgatgtgctactggtgccactggctgagccgggggtgtgggtagctgaggcagaggatgagccactgcttacctgaggggacctgggggctctactgaggcctctcccctgggggctctactcatagtggcacaaccttttagaggtgggtcagcctcccctccaccacttccttccctgtccctggatttcagggacttggtgggcctcccgttgaccctatgtagctgctataaagttaagtgtccctcaggcagggagagggctcacagagtctcctctgtacgtggccatggccagacaccccagtcccttcaccaccacctgctccccacgccaccaccatttgggtggctgtttttaaaaagtaaagttcttagaggatcat

SEQ ID NO: 7859 - protein, 713 aa, Homo sapiens; identical to SEQ ID NO: 1142

SEQ ID NO: 7860 - DNA, 1799 bp, Homo sapiens
aaatgtggaagctgaagctgcaagtcaagggcccgtctgacaagtccggcagggccgggaaaggggttaaggcgagcaagtgggtgtggcccgtgcgttgattggcaggggtgggaccgggcttgtcacccgccccggctactccaacccctgggcgggcgggggtaccgcctgggcaagggccggggcgccgggccgagccacctcttcccctcccccgcttccctgtcgcgctccgctggctggacgcgctggaggagtggagcagcacccggccggccctgggggctgacagtcggcaaagtttggcccgaagaggaagtggtctcaaaccccggcaggtggcgaccaggccagaccaggggcgctcgctgcctgcgggcgggctgtaggcgagggcgcgccccagtgccgagacccggggcttcaggagccggccccgggagagaagagtgcggcggcggacggagaaaacaactccaaagttggcgaaaggcaccgcccctactcccgggctgccgccgcctccccgcccccagccctggcatccagagtacgggtcgagcccgggccatggagcccccctggggaggcggcaccagggagcctgggcgcccggggctccgccgcgaccccatcgggtagaccacagaagctccgggacccttccggcacctctggacagcccaggatgctgttggccaccctcctcctcctcctccttggaggcgctctggcccatccagaccggattatttttccaaatcatgcttgtgaggaccccccagcagtgctcttagaagtgcagggcaccttacagaggcccctggtccgggacagccgcacctcccctgccaactgcacctgtagaagactttcctacagagaatcctaatgataactcagtgctgggcaacctgcgttctctgctacagatcttacgccaggatatgactccaggaggtggcccaggtgcccgccgtcgtcagcggggccgcttgatgcgacgcctggtacgccgtctccgccgctggggcttgctccctcgaaccaacaccccggctcgggcctctgaggccagatcccaggtcacaccttctgctgctccccttgaggccctagatggtggcacaggtccagcccgtgagggcggggcagtgggtgggcaagatggggagcaggcacccccactgcccatcaaggctcccctcccatctgctagcacgtctccagcccccactactgtccctgaagccccagggccactgccctcactgcccctagagccatcactattgtctggagtggtgcaggccctgcgaggccgcctgttgcccagcctggggcccccaggaccaacccggagcccccctggaccccacacagcagtcctggccctggaagatgaggacgatgtgctactggtgccactggctgagccgggggtgtgggtagctgaggcagaggatgagccactgcttacctgaggggacctgggggctctactgaggcctctcccctgggggctctactcatagtggcacaaccttttagaggtgggtcagcctcccctccaccacttccttccctgtccctggatttcagggacttggtgggcctcccgttgaccctatgtagctgctataaagttaagtgtccctcaggcagggagagggctcacagagtctcctctgtacgtggccatggccagacaccccagtcccttcaccaccacctgctccccacgccaccaccatttgggtggctgtttttaaaaagtaaagttcttagaggatcat

SEQ ID NO: 7861 - protein, 67 aa, Homo sapiens
MLLATLLLLLLGGALAHPDRIIFPNHACEDPPAVLLEVQGTLQRPLVRDSRTSPANCTCRRLSYRES

SEQ ID NO: 7862 - DNA, 3414 bp, Homo sapiens
aaatgtggaagctgaagctgcaagtcaagggcccgtctgacaagtccggcagggccgggaaaggggttaaggcgagcaagtgggtgtggcccgtgcgttgattggcaggggtgggaccgggcttgtcacccgccccggctactccaacccctgggcgggcgggggtaccgcctgggcaagggccggggcgccgggccgagccacctcttcccctcccccgcttccctgtcgcgctccgctggctggacgcgctggaggagtggagcagcacccggccggccctgggggctgacagtcggcaaagtttggcccgaagaggaagtggtctcaaaccccggcaggtggcgaccaggccagaccaggggcgctcgctgcctgcgggcgggctgtaggcgagggcgcgccccagtgccgagacccggggcttcaggagccggccccgggagagaagagtgcggcggcggacggagaaaacaactccaaagttggcgaaaggcaccgcccctactcccgggctgccgccgcctccccgcccccagccctggcatccagagtacgggtcgagcccgggccatggagcccccctggggaggcggcaccagggagcctgggcgcccggggctccgccgcgaccccatcgggtagaccacagaagctccgggacccttccggcacctctggacagcccaggatgctgttggccaccctcctcctcctcctccttggaggcgctctggcccatccagaccggattatttttccaaatcatgcttgtgaggaccccccagcagtgctcttagaagtgcagggcaccttacagaggcccctggtccgggacagccgcacctcccctgccaactgcacctggctcatcctgggcagcaaggaacagactgtcaccatcaggttccagaagctacacctggcctgtggctcagagcgcttaaccctacgctcccctctccagccactgatctccctgtgtgaggcacctcccagccctctgcagctgcccgggggcaacgtcaccatcacttacagctatgctggggccagagcacccatgggccagggcttcctgctctcctacagccaagattggctgatgtgcctgcaggaagagtttcagtgcctgaaccaccgctgtgtatctgctgtccagcgctgtgatggggttgatgcctgtggcgatggctctgatgaagcaggttgcagctcagaccccttccctggcctgaccccaagacccgtcccctccctgccttgcaatgtcaccttggaggacttctatggggtcttctcctctcctggatatacacacctagcctcagtctcccacccccagtcctgccattggctgctggacccccatgatggccggcggctggccgtgcgcttcacagccctggacttgggctttggagatgcagtgcatgtgtatgacggccctgggccccctgagagctcccgactactgcgtagtctcacccacttcagcaatggcaaggctgtcactgtggagacactgtctggccaggctgttgtgtcctaccacacagttgcttggagcaatggtcgtggcttcaatgccacctaccatgtgcggggctattgcttgccttgggacagaccctgtggcttaggctctggcctgggagctggcgaaggcctaggtgagcgctgctacagtgaggcacagcgctgtgacggctcatgggactgtgctgacggcacagatgaggaggactgcccaggctgcccacctggacacttcccctgtggggctgctggcacctctggtgccacagcctgctacctgcctgctgaccgctgcaactaccagactttctgtgctgatggagcagatgagagacgctgtcggcattgccagcctggcaatttccgatgccgggacgagaagtgcgtgtatgagacgtgggtgtgcgatgggcagccagactgtgcggacggcagtgatgagtgggactgctcctatgttctgccccgcaaggtcattacagctgcagtcattggcagcctagtgtgcggcctgctcctggtcatcgccctgggctgcacctgcaagctctatgccattcgcacccaggagtacagcatctttgcccccctctcccggatggaggctgagattgtgcagcagcaggcacccccttcctacgggcagctcattgcccagggtgccatcccacctgtagaagactttcctacagagaatcctaatgataactcagtgctgggcaacctgcgttctctgctacagatcttacgccaggatatgactccaggaggtggcccaggtgcccgccgtcgtcagcggggccgcttgatgcgacgcctggtacgccgtctccgccgctggggcttgctccctcgaaccaacaccccggctcgggcctctgaggccagatcccaggtcacaccttctgctgctccccttgaggccctagatggtggcacaggtccagcccgtgagggcggggcagtgggtgggcaagatggggagcaggcacccccactgcccatcaaggctcccctcccatctgctagcacgtctccagcccccactactgtccctgaagccccagggccactgccctcactgcccctagagccatcactattgtctggagtggtgcaggccctgcgaggccgcctgttgcccagcctggggcccccaggaccaacccggagcccccctggaccccacacagcagtcctggccctggaagatgaggacgatgtgctactggtgccactggctgagccgggggtgtgggtagctgaggcagaggatgagccactgcttacctgaggggacctgggggctctactgaggcctctcccctgggggctctactcatagtggcacaaccttttagaggtgggtcagcctcccctccaccacttccttccctgtccctggatttcagggacttggtgggcctcccgttgaccctatgtagctgctataaagttaagtgtccctcaggcagggagagggctcacagagtctcctctgtacgtggccatggccagacaccccagtcccttcaccaccacctgctccccacgccaccaccatttgggtggctgtttttaaaaagtaaagttcttagaggatcataggtctggacactccatccttgccaaacctctacccaaaagtggccttaagcaccggaatgccaattaactagagaccctccagcccccaaggggaggatttgggcagaacctgaggttttgccatccacaatccctcctacagggcctggctcacaaaaagagtgcaacaaatgcttctattccatagctacggcattgctcagtaagttgaggtcaaaaataaaggaatcatacatctcaaaattttgcaaattagctgcgagcctg

SEQ ID NO: 7863 - protein, 713 aa, Homo sapiens; identical to SEQ ID NO: 1142

SEQ ID NO: 7864 - DNA, 2068 bp, Homo sapiens
aaatgtggaagctgaagctgcaagtcaagggcccgtctgacaagtccggcagggccgggaaaggggttaaggcgagcaagtgggtgtggcccgtgcgttgattggcaggggtgggaccgggcttgtcacccgccccggctactccaacccctgggcgggcgggggtaccgcctgggcaagggccggggcgccgggccgagccacctcttcccctcccccgcttccctgtcgcgctccgctggctggacgcgctggaggagtggagcagcacccggccggccctgggggctgacagtcggcaaagtttggcccgaagaggaagtggtctcaaaccccggcaggtggcgaccaggccagaccaggggcgctcgctgcctgcgggcgggctgtaggcgagggcgcgccccagtgccgagacccggggcttcaggagccggccccgggagagaagagtgcggcggcggacggagaaaacaactccaaagttggcgaaaggcaccgcccctactcccgggctgccgccgcctccccgcccccagccctggcatccagagtacgggtcgagcccgggccatggagcccccctggggaggcggcaccagggagcctgggcgcccggggctccgccgcgaccccatcgggtagaccacagaagctccgggacccttccggcacctctggacagcccaggatgctgttggccaccctcctcctcctcctccttggaggcgctctggcccatccagaccggattatttttccaaatcatgcttgtgaggaccccccagcagtgctcttagaagtgcagggcaccttacagaggcccctggtccgggacagccgcacctcccctgccaactgcacctgtagaagactttcctacagagaatcctaatgataactcagtgctgggcaacctgcgttctctgctacagatcttacgccaggatatgactccaggaggtggcccaggtgcccgccgtcgtcagcggggccgcttgatgcgacgcctggtacgccgtctccgccgctggggcttgctccctcgaaccaacaccccggctcgggcctctgaggccagatcccaggtcacaccttctgctgctccccttgaggccctagatggtggcacaggtccagcccgtgagggcggggcagtgggtgggcaagatggggagcaggcacccccactgcccatcaaggctcccctcccatctgctagcacgtctccagcccccactactgtccctgaagccccagggccactgccctcactgcccctagagccatcactattgtctggagtggtgcaggccctgcgaggccgcctgttgcccagcctggggcccccaggaccaacccggagcccccctggaccccacacagcagtcctggccctggaagatgaggacgatgtgctactggtgccactggctgagccgggggtgtgggtagctgaggcagaggatgagccactgcttacctgaggggacctgggggctctactgaggcctctcccctgggggctctactcatagtggcacaaccttttagaggtgggtcagcctcccctccaccacttccttccctgtccctggatttcagggacttggtgggcctcccgttgaccctatgtagctgctataaagttaagtgtccctcaggcagggagagggctcacagagtctcctctgtacgtggccatggccagacaccccagtcccttcaccaccacctgctccccacgccaccaccatttgggtggctgtttttaaaaagtaaagttcttagaggatcataggtctggacactccatccttgccaaacctctacccaaaagtggccttaagcaccggaatgccaattaactagagaccctccagcccccaaggggaggatttgggcagaacctgaggttttgccatccacaatccctcctacagggcctggctcacaaaaagagtgcaacaaatgcttctattccatagctacggcattgctcagtaagttgaggtcaaaaataaaggaatcatacatctcaaaattttgcaaattagctgcgagcctg

SEQ ID NO: 7865 - protein, 67 aa, Homo sapiens; identical to SEQ ID NO: 7861
